United States Patent Application Publication US 2008/0114160 A1 - sequence listing, part 36

SEQ ID NO: 9279 - DNA, 3036 bp, Oryza sativa
atatatatatatatatatatatatatatatatatatatatatatatatatatatatatttaggaaagtatttcagattttaatgctttatctgtcttgtactttcaataattgagtggagatgaaggaacatagttacttgtttgaacaaatatactgtgtttattaggcaaatacatctattggttccatgttaattgctaatatttgtaactgataccgatatatttgttctgcagtgcatgctttaaataagctaccatattctaagatagactctaaggccgttggaatcacaactggagttatttttgtaacttatagcagcttgatagcatcctctgagaaaggccgttcccgtttgcagcaattgatagagtggtgtgggtctgagttcgatggtcttctggtgtttgatgaggtaaagaagactctggtataaatattaatcgattgtgctaggcatcttctagttagcatgcaattttctattcaatccgctgcaaattaatctggtatgcttaaatgatgtgtttcttgcagtgccacaaagcaaaaaatctgattcctgaggcagggagccagcccactcgaactggtaaagcagttcttgagatccaggtgtgtgactatatatatattttgggttgattagatacgtgccattaaaaaattgtggaaatatgccattactatttgcgtatttgtaacgatgccactgctacttgttgataatcttagtggtgccactgagatacatattttgcttgtattggacgaaatgcccttatcttctacctctctcttccctcatcttctacctctctctcttccctcatcctttcccatctctctgacccgaatcgacgcctcaccgctacttctcgactaggttggcccgtcaacgtcacgtcaggtgccgaggtggcagagagcaccggacaggtccccacggctcttcacgaaggcgatcctcgccgcgtcaggtgccgaggtggtcggcggcggggaggtggagagcgtcaggcggctgctcgctcctcggtcctcgtttcttcgtcgcctagggactcttcgtggtgaggagaggtgaccggatttgggactcattggcctccctcttttccgactccgccttgccagccgcgtagagggataaagggagggaggagatatgccatcggcgccggtgaccgtgagccttgcagtgacatcgtcgtcgtcagtgtggagctctacaggagatggtcggcggtggcgcgaggtggagggagacataggtgtcgtggatgaagagcgccagaaagggaggcggcggcgactgcggtggtcatgtccattgacagctgtgcttgtggtcgccgctgtcaagccatcgctgtctcaggttgtcgaagagaagagggggaaaggggaggaaggaagaagaagggcaattttgtccaatctttttttgtacatgcatccaaggggtaaatagtggcatgtctcaaatatgtctaaaattataatggcacggttccaaatacttgaatactagtggcaaatttcaaaaccagcatatttttaatggcatggatctaattaaccctttttttcttgctctggtctccctatgatcaacagaacattactagtatacatttattgcggtcatcttatgtagccgactttttgaatataaattctttggccctggaaagcaaacactttcctagagtgatagcatatacttcctctgtccatgaatataaagcacttttggaacagtgctaagtaatttttttttaacttttgtctatcatcaatagcacaaaaattataacaattgactacataagaataatgtttctagatctatcgtgaaacaaaatatcataatatgcaactctttgtatttaaaatagtttatttttatagatgttattagtcaaagtagcatatcgaagaccgtgttgatgcccaaaagtgcttatatttgtggatggagggagtatttttcaaatatcaaaccagaagtcaatgaccttatgttgtatgttgtgatgttatagtattattcctcattcctcaatttgatagattatgtggtatctgggatgggatgattctttcaaagaaattctactgatgatctgttcttaattattgtcaccaaacattgcaggaaatgttacctgaagctcgggtggtttactgctcagcaactggtgcatcagagcctcgaaatctgggttatatggttcgccttggtctctggggagatggaacatcatttcagaattttcagaaatttctaggtttatttttgttcctttatacttatattttatttttttatatacctttccatttgtgtttgcatgttatcgtaattcatacaaaaatttcaaataattatttccaatgccgaccagctaccatcataataacaatttcaatatataagggcatgagcagtagtagactagtagttgtctcttatcaaagcatagcagtagttgtccactttccctgcaaaatgcgaatcagaagcaggtcaataggctaagagacgaaatgagcagatctttttgctgcattatttcctttttcaacagatagtaaagtactatccgctgtctgtgttcggtaaagttatcttgaaaggcttagtgatcaccactgtcgagcactttttttttttctttgggagaaaaaatatataccaagagctgtttacaactagcactggtattagtggaagaagaatttcctccattcactattgatggacctggcaattttgcccacaagttacccatagtacaacatatcctttatgttattttttgtgcttaaataactatgatgagaaacggcacttgtgaaatccaatagaaaattaagacaaagttcactttcaactctgaattttcattttttggccttggttcattttccccctgaactgcacaggtcaccacccttcatccgatcttaattttctattggatttcacaagtgccatttctcatcatagttctaaagcataaaa

SEQ ID NO: 9280 - DNA, 3027 bp, Oryza sativa
catggtttaataaaaacttcccaggtatttttggccagaattgaaattatattagtatctttctcacaacttactgcttaacactactaacttaatttttaagattatggacaatccttctggtgacttcagcagaaagtaccgtcacatatctaaaggaggatgggccttccagttgcagatcaggggtggcaggtttcagattgcacagcagaagctcttaaggtgcagatcaaaatttaaatattaagtgaagaacaaattagcgctacctgatgcagacatgggtcaagcagggttgattttccatttctattcatctgtctaggtttaattgattctgattgattattctcgaaagtaaaatgaaaactgaaaacaagaaaaaggcatgggttgatttttccatttctattcatctgtctgggtttaattgattctgatcgattatgctcgaaagtaaaacgaaaactgaaaacaagaaaaaggcatgggttgattttccaagtctatattcatctgtctaggtttaattgattctgactgatagctcgaaagtaaaaccaaaactgaaaacaagaaaatggagcatggcacatatgcacctaaattccccccaaatctggtgttaatgtctttaagtttacgataccatctgatatcattataccatacatggaagatggagcacacaaatctacaacaaagtaatacagtttattgtttcaggctttgctactgctgtcaaagtgtttgtcagatggtgcagattatcaaatggaaacctactgctactttgacgcggtgaatgtattactctcgttacaggtgattattctgcagcgcagacagtaccacatactatagcatatgatttggacagagttcaccttaaaaaaaaatctactgcccaaataattctctagttccctagaacattaatcatttattttgctatcctatctgttactccctctgtcccaaaaaaaaagtagctatttttggttatgaagccagaaatagctacatttttaggcacagggagtagctaggaaagtaagggccctattcttgaggtcaagtactattcatgtcatcacgtgaacggtgaacagcacccatgggtactgtagaagtccaagttatcatataaaagggaccatgaaactccattgtaattaaagcaatgaatagacaagagaaaggatagatgtagagtaataaagatttgactgaattctatgcagaacccaaatggtgggtatggagcatgggagctagctcgcacatatccatggatggaggtaaatctgctcagcacctcaacctaataactgtatcaatgcactaaatagtgtaactgtaatggcctacgtatgctactatcctctttctttattatcctattatttgatttaagaattatatgattaacgccactgcattctgttattgtacacatatctagaatatactgtcagctcagagttccaaacatagaaaagaagtgagaaaatattaatgtgttattcacagtcacaaggcatacttcagagcattaggactatcaaaggtgaaggagagtatgctatgacttgcagaattcacatttaggatacataaataagagaatataatggaagcaaactagctgaataagttaaatacttagatggcacataatatcaaggatttaaggaaattaacgttagaggagcatggcagtaacaaattatatacatctgaagcactaaataatgagaatttgaattacgttttgcagattttcaacatgacagagatatatgcagacatcattgtggagcatcagtgagaattttacaatctttctttctcaaattctcctattgcagaatgctataacatgcacacatactgcaggtacgtagagtgtacctcatcagtcatccaagcattggcattgttccgggagaagtaccctgggcatcggaaagatgaaatagatcaatgcatcaggaaagcaacagaattcatcgagaagttacagaatgatgatggatcatggtcagcactccttaaaaaaaatactatagaaaattgaagtactaattaaatctatcaattaacataatcctagttacataggagaatgatggcattgctggcacactgcctctgtttagagtgctcttgccaaaatctaagagacagtatgcctaatccggtgaaactaaatgattcaccaaatcgccaaacagaatgggctagatcatcacgttctgagttgcaacacatatttcggattgacaatgtacttatgtacagataagaaaacaatgaaaattgagataatatacagtagcaaagcatattaagagaatcagttgccgatagcattactagtaaagacttttgtataacagaaaaaaatagactggatcgaggttaaataaattcaatggtacatattagattttaaaacactgctacaagtaaatgtaatactgatagctggttgagagattggtaatttggattaatatttttttttctacaggtttggatcatggggtatttgcttcacgtatggaacatggtttgcaatagagggtctgtcagccgtggggcagtgttatgatgacagcacctgcattcggaaagcctgtaagtttctgttatcaaagcaactaacaaatggtggatggggggagagtcatctttcatccagaaccaaggtaacactcccggaatgctttattgtgtcaatcaactttaatttttgacagcttagattaagcatcgggtttaggaaaacttctatctttctttgtcttgaaataaattgaagacaaacagatagcattttctaagaactggtaatcaggtaataacactaggagctaaaatcatccttagattaattagccgacagggtcactctagaaaaaaggacaaacaagtaaatgacatgcattaattgaaacaaaaactgaaaaatcagaagagcatgcaatgtcactgaaagaaaatgtaatagctgatatt

SEQ ID NO: 9281 - DNA, 8170 bp, Oryza sativa
aataagcgcttgtgctcttggctctccttagtttccttccatctctcttctttcactttagcttctttctctttggcgtcgagcaaatctttcatcgcctccttgtatggtccatcttctccattcttcatcttctcctttgcttgcttcctacccattggtctttttttagcacttggctgtaataaatcaggagttgtactcttcctagcatcatctccttcttcatcttcttcaccagcactcttaattggggtggaagacttcctagaccttggcctcttgtgggattctagagtttgaaactttggagaattcctcaacttgagccaacaatgattaaacttaaatgccctattcttcgatgcattggatgagtacaatgcctcagcttcaagaacctgaagcaaaattcaagtgttagttcacatacatacaagattgttattaataataatgaataaacaatttaacttacaagctcttgatgtggtatgccacttggatgtcgacgctcaatttgctcgtagcagccctgaaacttgcttacttccttctgaatgttaccccaaagtgctcaagagagtttgcattcctatcagactcaaaatcacagttagcatggtagtgctctgcaatcctttgccaatatgccttccctggttgctcattgccaataataggatccgagctaatgctttgccatgaaatgcacagttgaatgtcctccttacgattaaagttgcttgatcttttggctcttccttttgcaccatttgttgaagtatgaaggtcttcattttgcattggcaaggaatatgcctcaacatgggtctcttcggacatcatgcacataaaggaatcacattcatttgccatcacaatctagtcactgcaataagtagataaattgacaacttctccaatcaatctcaggaaaaatggcagatgctagctaatatatgttggtagaatgcataatggtagcaaatttttccaatcattagaatttagaacaggttatgctagagctctacaaaattgaattaaaaagaaaaccatatagcaccccaaagcagcttattttttttctcttttttaacagtctactcgaagaacctgcatataactaacatcggtacaaataaaattgtgtagctcaggaaattaagcagcactacacccataccctctagaatacgatcacaagatttcaactggcacagtgtctcaaagtcatgcatattgaaaatcacactgaaaaccatatagcactatccaaaacttacaattcccaaaaccatattagcttgatccaatttatctttccccctgctaatttcagttacagtttttttttgtgttgaccttattactaatgcaattgtttaactacttgaaatcaatcatcattacatgagctcacctgaccatattatacatggattcagattttcatttgtcaatgaaggagttactatccaaactatgtttcctatacgcgtatgcatggctatttttcatatttctgaaactacaagattaggaacctactttcaataaattagattattcaggaaaaaatcaatcagatcattccaaagaaagtataattacatatggattatgagattaattattgtattaattaacagtcaaacatttgaggaaaacaaaatcacataataaaacaacaaaaccatctcatcgtggaaggttagttcctacccatttcttctccaaatatacattttcgtactgacaacttttctctcaaacacgctaggtgctaccatataactcaatccacaaatccactagaaaaatgaaaacatgataccttcaactagcgcaactagcaccagggagaagggcgtcaggatccaggaggatattgccaggtgggcaggtggccggccaggaaggagggcaccagggaggacgcctgcaggggaggagggtgccgccgcgccagccaggaggaggatgttgggaaggaggaggcctaccggggaggagtgtgacgggcagggaggagggcgccacccgggatgagggcgtcggcaggggaggagggcgccggccaggaggagcggcgtagatccgtggaggcgcagctagcgggatatttcacgtgaaaaaagaagtgcccgcgtgtctctgccgcggatgggggctgcggagaaagcccctgggactgggggcctgaggggataatttggaggccttcctattttaggggctttagtaggggccttattggacctgattttttagtctcaactctcaaaattagtataggggctgtgtttagaacctctactggagatgctctaagggaaaatatatggaatggagcctctgcaaccctaattagtgtggatccatcttatatatattgtcatcacataatatttcatgataggaaaaactataagctatagaactttaacaccgctgaggtcgataacatagcacacctcaaagtttaggtggatcaaacacgttagccacttgccactaggtcatggctgatcagtgacagtacatggtggattggtgccgccctgatgcttagaccattgctaagattttcagcccgtgtcaaaagacaaaaaaagaggtttctatttaacaaatactaaataaacagagtacattttacttcaatctatataaatatagaaaaattgcatgaatttcatgtgatcaacgtcaactagagctataccaaaggaacttactaactgacaacgatggtgatgatcatgactaagtaggaactaagaagaattatcatatcataaagcagtgattcagttctccttactaagcgaacaaatatagtggaacctttactgcctggaatgcacattcacatcatcatcatgagctttagttctttgaggtagctgtagccgagaaaaaacaagcttgttctagctaaataagtgaaagagaaaaagagactttaaaaaatagaacaagaagatcttaaaattatattaaaagtgcatttggctttgactggattataaaataagaggttattttttgaagggaagatgttgggttctggacagcaaagttgggtcacgtgttccactatgtcatataggacgctccgtctttggttgaggtagtgcactatgattaaatttacaatttttgtaacctgttattgaatttaggtttcgtagaactcccatccggttaatgaaatggtcgacaattttgtcgacaagagtttttttctttaagaattttgtgtaacacaatatataatatatgttttgagataggagatacagtaggtagcaaggccctcgtagcgatgtcgcaaacttacaatagaaggtcaggccaaagttataaaatttgataatttgattgtattaacacttgtggcaatgaccacgtgggaccttctcgagtctacgacggtaagtcaggatgtcaaataatcaaagtactccctccgtctcaaaaaaagtaaacctaggaggggatgtgacattttctggtacaacaaatctagataaagggctgtccagatttattgtattaggagatgtcacatatttgcttgagtttttttttttgacggagtacagtttatataggatgttaaaaaaagaagagagagagagagaaagatatctctgggccaaaggtagggtcggacaaatgggcccaacagccaatacggtactagttacgtagcccagcaacatggcgccatccgtggaacggaacgggcgtccccttcccgtgtcttatccactcccaacgttccattctgtggatgcttccgccaccgccaccgcccaacgaccagcagcaagcagctcagccaaggggctccccatcgtatcgatccccattcgcgccgtcctcttcttcttcttcttcttctcgattcataggtgtggtttccatttcttgctgtggttgctggttgaactagcttttgctttgcttggattgtgttttgattgaggggtttgttagtgttagcaatctaacccaagatatctttgcaattatatgctccagttaatccgtcaggcttttgttgcttgctgctgctgctgcggtggcgggtggggaggaaggatgctgattgcggctgatttcccgggagattcgacggtgtcccgatgcgcattccccggtttgttctgagtgatgatgcggtctccgtttcgtgatctttgattgatgagccgttccgcggtaagctctgaaggcggcattgcgctccggctcttcgtggactggaggatccggcgccggagggtctgcgcatgcaagatgttcgacactggttcccaaaggggtagggtgaagcagctggtggcttttgccaagaagaggaggcggcccaagaagcagccgtcgcggcggccatggtggaaggcgtggttctcggactggaacgacgaggaggagagcttgtctggctggagggaggatgaggagctgctcgaggaggttggcggcgaggaagggctgtcggacgacgagaagtttgagacgtggaagaggaaggccgaggctattgtcgagctgcgggaggcgcggcaggatgccatgaacgcggaagggcgctcgtgggaggattggattggcgggggcagtagcacagcgggggatggcggcggtgactggggtggggatttggatgtgtcagacctgataacggatgatcctacagagatagtgagggataaaggtttgattgaaactttcagagactctgtagatgaagattacaatgacatgctgtttgaagaccgggtttttctgtatgcttcaacgaattcggtgagctctttacctatcttgttttctgtcaccaaatgttataacccactgtccagtgataaccatgagatacttgtaatgctttttgaatatgatgaactacttcctccgtttcatattttaagtcgttttgacttttttcttcatcaaacttctttaaatttgaccaaatttgtagaaaaaattagcaacacctatcacaccaaattagtttcattaaatatagcattgaatatattttgatagtacgtttgttttatgttggaaatgttaccatatttttctataaacttggtcaaactaaaaaaagtttgactggtaaaaaagccaaaacgacgtataatatgaaatagaggtagtactatataatattggagtgcataatatagcaacaaactttaatctttacaccttacaatattatcgaacgctgagggtccattttgatggtaatgattttgcatctggtggctggtgtattttgaccattttgatgattaaaaattaaaaatgttaaaaagtgtagcagcattatattgttatattaagaccctagcaaattggatctaacaaaagaaagtttgcactttcaggccaaatttctagcattattgattgtgattccatgggtgttggattttctggttcatgactatgttctgatgccatttttggaaaggtaaatcctctcacagtgttccatttttactttcttaactttttcccctcacttcttaatgtaagaaaatgcattccatgtacacccaatctgatgtttaggaatttataaggtgaagtttcaagcactgatgatattctcagtttctcactctctgtgcttctgaaattacatgcgatcaataatcatctatgctaaatgcagaattgattacatggaacattacacaataacaggtacgtccagaaggtaccacttgctgctgagctgcttgatgtaaggcgcagccagaaactcctgatggtaaaggacataaatactgagaaagcaagatatcgttttgaagtagagattggtaaatctcctccactttctgatgatgagctctggtcagagttacgggaaaaagcgtgagaaacactctaactattatactttcttgccttgttgtaacttctgttgatgcactagcattgtctgacatgagcaatggaccttctatcctgcaatttcatatgttcaatcttaacagatctgctctgctacttgatcaggatagagttgagagatgaatggagattagaaaaccgaaaagcgtttgcaaatatctggtctgacatggtttatggaatttccctattccttcttatgtacttcaaccagagtaaagtatgttttatcagataagcagctttgttttttttttccatctttgattgtgttccaataaatttttcagctttctgagtgtgcatgtgagctaagtgattggttataaataaacaccccacaagttgacaaatttctgcactattaggcctctctcagagttatccgatttctgctgttaatacatagtacatgatgattttgtgccaaaagaactgcagtgatgaactgaccagagtattcccccattctatttgtacctggttatacatcatacttttctgacctagtgcagtagtaagaccacctcagtttctgcaatatgtttgattgttagtatcatttagtaacacatactggaagtccatgatttatgtacaatgaattcatcaatctatcttatccatcatcgtagcctatttttctctcccattgaatgcttagtgttatcctgcgtacaacttattcttattgcctgctaagctttcaggttgcgatgctgaaattcacaggatataagttactaaataatatttcagacagtgggaaagcattccttataattctagtttcagacatccttctagggtgagttacaattcatttttcttgagttcatatatacatgtggttttagtgtgaacctagtttgtaacaaagcatacactaaacaattgtgctatttcttttgctggataatggatgtcagcaacctaactaaaggcaaataacatgagttctaacctacctctctcatgtgttacctgcttatctaaaaaatcatacatttaaataagtaattcttgttaaaagaagattcgtccaaaatgttcaaagaagttaaagaggaggccagagctccctccaggggagagtgccttttcttttcagaaactaatatcagggggatactcagcagcatgttttagaaagcaattcattatatcttgtcatcatgattcatgagcgattttttaaatattctctcataagtatggataagtttgtaaaaatgcatggaagaaatattatagctattttttttgtcaggaatgaggcagatggttctgtgtttcttcttcgttcgcacttcaaatatgatcttaatatttcttcatttttctctctcttcaaagatgtttgtagcattcgtgtggcagaatcttatttatcatctagttagaaacttagaatagtgaacctaagtggtacagtatcccgttagaagttaattcacacaaatgcatatgaactgctttgcgaataatggaattcttcctgttcatgcttatgttatacatcatgacatcttttctgtttcaaacaaactatggatagtttgtaattttgtttctgctttttttcttgttttcatgtaaacgtaacacaaggttaacattgttttggtttgtctgtgatcttgttgactatattaacatcatttagctgcattttcacaggtaccattcagagtcaggttggcattctttggtagaagtcattctcgagcactacggccttgaagccgatcaagctgcaatcaccttctttgtttgtctggttcctgttgccttggatgtatttataaaattttgggtcagtccacttcttgccttcacacaatcaagctaatagggctatgaacatttattttattctttaaaaaacatttatttcattttatctttttttaaaaaagaatataagtgtttgttaaggcctcataatttatgactagtttcacccaaagttgataacattatagattcacgtttggctactcagcgctaacatttcagataatattaactgaaagttttatagtctttctacaaagtgatttgaactttattgctgggccgacagttattaggaagacaaccttttgtagatacaatttcatttcctgacactgctcttaaatcaattgttcaccttgcatgtgctagaacccattgcattttttaataactggaaatacatgttctcttgata

SEQ ID NO: 9282 - DNA, 20233 bp, Oryza sativa
tgctaatcggtatttgtgttttcagcctcctcgtcctccaactcatgttcctgaatcaagtgaaaacactccatcggctgcagacagccatcatgtggatgaagaagaaaaagctacaccagctcctgctattcctgtaagtatataccttaagtctgcaaatcatatcggctgccatctctttttacataactcataatcccaacgtttctcttttttaggttttagctgacatgttctcttttgacattaggcaattcttggatgaagaggaagaaacaacaagcaaaactctggtgcccttagctgatgatatcaagtcaactctactacacatctcaaaaaggcttgaaggctctctagaaatcttggtgacaagctgtggatccatccgagatagacttaatgaaatccatgacaagatcccggatgagctagcgaatgccatcactccagcagcataccttaagcagcatcggcttaaacttgaaaaagcccaaaggaggattgccgatcagcgtgaaagaagagatcttgaggcaaccatccaagctaacagggtttctatcaatgaaaagaaggcaaagcttgatgaattggaggctggtacaaaccccactcaaactaacattgatcggctgaatgctcgaaagatagaactcttggctgagttggagcagtgcaatgcaccggtcgcccttgaacagcaaaagcttgctgacttgccaaaaggcattgaggatcagaagtcaaagttgaaagtatctgtcaagcacttggccgatctgaccaaatctctgaaggtgttcccaagcactgatgcagccgatgcccaaatcatagacgaagtagatcatattaggcaaagggcaatatcggtcatccaaaaatacatgtctggatgagctaagtcttgtaattccaactttaaatttgcaaacttaacttttgggacgtaatataactttctgcttgtgaagcttgctcttgaattttgcttttgaaatccagacttgtcatatatatttgcccccctaattatgcaatgttgaagacattgataaaattataatttggactaaggacgatatgtcaaatatcggccatcatacatcggcaaagcacaaccgattatgataagaaaaatccactaagggcaatataatctatatcggccatcatatatcggcaaatacagccgattatggtagaaaaaactgctaagggcgatataacttatatcggccatctcaaggcgatgtcagcacatcggctaacatgtatcggcaacacttagccgatcatgaattgatccgaacacttggataatatttctttaagtattttccattacgagctcgtccaaaaacttcaccatcaagttcttgcaacatataagcccctttgtacacaactttgtatatttgaaacggtccttcccaattaggtaaccacttgcagaatttattatcgcgagttcctattgacaagatcaatttccaaactagctcccctttagaaaaggatttgggcaccacctttttgttgtaatgccaagcaacttgttctttatctttagtcacctttgcaagggctctcaatctggactgaactagatcttctgtttcatctaccataagattgtaatactcatcggctgttaagttatcttgtagatctattctccttgagccgattgtagtttcccatggtaagctgcctcatgtccacaaacaagcttataaggaggaacttgaatcgatccatgacaaccatccgataagaccataatgcttcagccaaccttgtatgccattgccgaggaaaatcagaaatctttctcttgattaatttaatcaggctcttgttagatgcctcggcttgcccattagcttgcgcataatatggtgaagaattcaacaatttgatgcccatgctatcggcaaactaagcaaattcatcagaaacaaagattgatcattgatcggttgttatagtctgaggaatcccagatcggtagataatatactccttgacaaactgtattgcatccccagaatcgactttcttcaaaggaattgctttcacccacttggtaaaatagtcggttgccaccaatataaacttatgccccttgcttgaaggtggattgatctgaccgatcatatcaattccccaacctctgaacggccatggcttgattataggattcatagccgatgctagtgctctctgaattgctccaaacttctgacaatcttgacattctttgtaatatcggaagcaatcctctaacattgtcggccaaaaataccttgtacgccgaagcaaccacttcatcttgtgagctgattggtgagtaccgcaaataccttcatgtacttcgcccatcacaaccttagcttgatcggcactcaaacatttaagcaatacctcatcaatcgtctgataatacagctcatcatccaataaggtatatttcaaagccttatagcgcaattttcgtgaagccgactgagatgaattctgcaaatactgataaacatcatacctccaatcatcggctgtgattgcagctacctccacctcaatatccttcatcatcggcttgtatcctaacgctccatgagccaagtcattagcttcaacgttctgctcccgagagacatgcttcaaagtcaccagacgaaaataattcattagttctcggcacttctcgttgtagatcatcaaaacatcatttttgcattcatattctcttgccaattgattgatcactaacaaagaatctcccatgatctccacagcatcggcttcaacctccttgagcaattgcaaccccttgagatctgcttcatactcagcctggttgttggtcgcataaggtttgatagtataagcaaattcaaaacttgccccccgaggagaaattataaccaagtcgataccacaaccaggagtgcaaagtgacccatcaaaaaataaagtccagggcacaatctcaaccgagccgattgaatcatcaggatgttccacaataaaatcggctatagcttgccccttgattgccttgggtgattcatatctgaggtcaaattctgttaaagcatatatccacttcccaactctccctttgaggaccagagccgacagcatatatttgatcacatcagctttgcataccacagtgcattcattggataacaaataatgcctcaactttgtgcaggagaagtacaaacacaagcataatttttccatcggagaataccttgtttctgcatccaagagccttcgacttaaataaaaaatagctctctccttgccttctagctcctgaatcaaaaccgagttgattgacttctcatcggccgatagatacaacctaaaaggcactcccttttgtggaggaattaaaactggaggggaactcaaatatgccttaatattgtccaaagccttctgctgctctgccccccaagtgaattcttgatcggctttcaaccttaacaaaggtctaaaaggttccaatctcccagataggttagatataaaccttcgaacaaaattaatcttgccgatcaatgattgtagttgtgtcttatcttctggaggttgaattttcttgatttcatttatgctcctttgagatacttcaatccctctctcatgaataagaaaacccaagaactgtccagctgatacaccaaaagcacacgtcgtgggattcatcattaggccatattttctggttctctcaaaaaccttcctcaaatcggctatgtggtcctctacctgttttgatttaacaaccacatcatcaatatagacctcaaccaacaagccgatcagatcatggaatatgtagttcatggccttctgatatgtagctccagcactcttcaagccgaaagtcatcacaacccactcaaataagctgattgcaccaggacatctaaaagcagtcttatgaatgtcttcttttgccataaaaatctgattgtaaccagcattgccatccataaaacttataattttgtgacctgaagtagcatcaatcaattgatcggcaatcggcattgggtactcatccttaggggtagccttatttaagtctcgaaaatcaatgcacaccctaagtttgccttttttttcttgatcattggaactatattggaaactcactcgacatatcggcacggttgaataaaaccagcatcatataatcgagtaatcttagccttgatagcatcatacatttgggccttacatctccttagaggctgctgatgtggtttatatcctagcttaataggaagccgatgttcgacaatcgatcggctgaatcctggcatctcataatattctcaagcaaagcaatttctatattctttcaatagctctattaacttggttctgaattctgcatataaattcttactgataaatgtcggccttggtctatccctggaccaatgtcaacttcttccaaatcatcggccgacatgaaaccctgtccttgcttgtcatcgagatcatctactgtgtccttagtgtagaaatagaaatttgaaccctccacgatgctgttaacgccaaaatttggtaagcccgaagtcatcatcggcctagagtcagtatcggcttcagagtcttagaatcggccgatgggagttgtcaagtcgccaccagttgtgttcttgatggaatcggatcaattaaagaaaatttatctagaagagtccgaattcaaggaggatgcggcatgtcaagttatctattaattaggaatagttttttttgccgccggagcagagctcttgcctgcgcaagaccaccaagacaaaccccatcttctcctctacaaccgtgttgacgtataacacgaggcctgggagatctgcttaactccagtgcaagtccaaaactcgccttccggtatgctagcatgccagttgatttgatcttgcaatcaacaagaaataaagacaaagaaaccgtggttaaatccataaatgatagccgatcggctaagtgccgatgatatatcatttatcttcgagccgatgtcatatgtaaatcgatcggcagttataaatagataataaagaactaaatctattcgatcggctgtagatattaaaaatatataatcctggtgtcgatatatacttaaatcaagtgattgggatagatcggtcaccgtgctgagacagtataaatcacttagatcgaaatatatattaacaacaaaactatatatgttcatagcatagccgatcaaatagatctagcatgtatcggctaatactccgatacaactctatgttaagatattaaaacaagcagaatataccagacagaaacttaatatacttagatgcaataagatcttaatataaaaggcagatttaacatgtcaacgaagcatatagagcaaatataattaaaccagataagatcggctgacactccgatgctaccctaatcagcaaccagaaggcaggctagagattgatattctaagcacgacttaatagatcaaactcaactgatgcaacattaagtatgaaaagaagagcaatatctagacaatcaagtcgctggaagtttcacagggtggtagatatcttatataatctaaatcaacaccgatgtctaacctaatcggctgccctctaccgatagatattagccgattgtaggttagatagcgatattgccagagattatgtaagatatataataactcgacgaattacataaacaagattagagtatcataaagatggaagcactaatcccgagaacgcaagccgtcataacaagttttacctcttgttgaagatcgaaaccgatgcagctcaacccgaaagcaagaactcgtcgaaataaaactaaagcaaaagggtggcgatgcgccgaaattgtattgaacatgtgtgttaattgattacatggggttcaggatctatttatacccgaaaattacaaactatgtccatatcggacatgactcttatctctaacaaactctaagataccataagtctttacggcagacttttacccaaacatatctgtaaggaatttacataaaatatcctaattaatagatacaattgacttctcaggactctatccatacgtggcaatcatcttgaagcatatcaactcaactcgatgtcgtacataagtcatattgccggaatcggctgtatcacttaacccagtctgactcggacttagccgatccaatcgtagccgatccggactccagccgattcctactctgtttctgcaacaatcttcatctttgattctacttcgatcttatcctcatctccgatactgatataaccaaatttggttgttaacaaaccgacttgattcaccgcctctcactgcctataaaaggacgacgaggtcgcccttttcttccatatccatccgagctctctctctctttcttcttcatgtccagctatggccggccgtctgccgatctcccttaccggagcgttgtcggccaagtcctcgcgccactagcttcgtctcatcgaggcgaatccatttcacccctttcccctttcccttcctgaaacaagccaccacaacctcctcttttgctgccagagcagagctcttgcctgcaccgttccagcctcctctctcactttctctgccgactgtcaccctccccgggtgcgcgtcgctcgagaacatgttttaccaccgacgttgcagcctctcaaccaccggagtaccggcgcccctcctctcccttctctctgtttgttcatggagaaagagagaagaagcaggaggaaggaggaagaagaagaagaagaaaaagagagaaaaacaaaaagaaaaagaaaaagtctgacaggtgggcccctgcacagtactactttatattttctagatttaacttgaatcctattctttagaagcccatatctcctaaaccgtagatccgattccagttaaacttggacctaaattcatctaaattcaaaccctaccttttgataccaaatttgctatttaaatattttatttgaatttccttgatttatttaaatgtcatttgcttttcaaatatctccttttactccaaaataccctttagccactaaaagtcgccggttagaactttacgccttccatggagacgttcgtgtggtatattggccccgacgtcgaaccgttggttgtaaagcccggcaaaacccaaacccaaggtcaaagtgctgctctaggtaccccacgcctcgatgcgtacaacggtcggagcttcactattccctcgacctccacagcacgtcgcacaattagctctcgggctctgtgtgatcttagccgctccacaaccactcacggttgtcggagtaacacttccgccccactaaattaacctgcacccaccccctattcctccagccgatatgttgtctgctgacaccggctagagaagacaccaaatctagtcgttatgctgttcaacactagcatcgactagcacacaatcaaaccctagctgataccttgctagataaatcctagccgtcatccaaattccacacccaccagtatcgcctatccaccctactctcagtcacctactctccaaacaaccaagacccacacatgaaatataagtgacatttgttgcttgatcccctttctatcttagcctccaaccctttagaacccatacatgaaatattagccaataatccctataccttataaaggagatatttataccccaaacccaacatttcttgcccttcatcgctttcttgttattttctgacttttattgaatttggttctttctcttctttagtagagtctattttggatggcagcctgtgatatttcgaggatcggataatcaggttgcctatcttggatatatttgcattggagcaaggcaagttattattccttccctttgagcataaatgccctatattctatattctattctatgccctagccatacatgattttgaatgcataatctgaacatatagcgaactagttatatgctagcttttgcttagccctgcctagttagactgcataaaatataatgaacttagattggaacagtacgtaagatttggttgattttcgggtggctagtactgttttggtcgatataagtttaccaagtacttatgtcaaatgaacgagtacgaccgcagcttctagaatggggacagacctagatattatgttaattaacaatgtggtacctctgtatagtggttcttatgtaagtcctcgcgaaggaggcaaacttacgccgagcagggtgattgtaatatttaccgaggcgcaggtaaatatttgagataaattgtaatatcacgaactctgtgtgtattgtgaaaacctggttgagatgacgggagtctctcaaccagttctctccaaaaaccccgggaacgccagaactcctttcgctgctgataacgttacgttcagagcacatggggactcaagttcatggaacaggtaccacaattgttgataacctaatactgggccgtgactaagctaatgaatattggcaagtcgtggattgcgagtaaagcgtacatttactgcagtaaagtataaatgaatctattcgaatagttgtgctcatggatttgagtattgggactcatatggtatttggttagaaacttaattccgaaacttaaatactgttgcatttaaaacattctaggctttcttactctatattctttgctttctgcaagtaaacctagctctactcaaatattaccatttcatgcattcattattgaatataatagcttgctgagtacgttgtactcgcccttgcttcaacccgctttttcagagtcaatttgatgttcttaccgaagccgggagttcaatcatataagttagttccattctaacttaattctcaagtatagactagataaatggtttaagtctatatcaaaacattagagttgagtcattctatagcttctgctgtaatagttagccacaaacttgtaaataccctaatattattctgtaataatatctcctttgaaaccttgaccaaatatatgcaatgaagaaccaaattgttgaacctgtatcaatctactaatccagggcttgatacagtctaaccatgtcggtttccgaatcattagttttgggacccgacatgtccgcagccgatgttatggtttgagcctaagtgatgagcaactagccgatctcgccttccaaggattgtcagcagctatcagagagagattcttttgccacgagtttgacaaccatgctcatctaatgcaaatagtatcagctcatgaaagccgattacaagaagcaaaggaatattagttttggggttatcaagatcagaaagaagataattttgaagcatgagttctcatactccaaaactggggggcatgtgttaacgttaaaatttggtaagcccgaagtcatcatcggcctagagttattatcggcttcagagtcttagaatcggccgatgggagttgtcaagtcgccagcagttgtgttcttgatagagtcggatcaattaaaggaaatttatctaaggattactggtgtggtggccctgttctctttttttttttgagcttcttttcgttaaattcatttttctctcttagatgtgacatgactaaatacagcgctgctgtaaataaaaaataaacatcttctgttttcattgttttaataggtaaatataaagatttttaagtaatatttaaaaatagtgctgatcaacgacattgtcactttattaaaagttttagtttgttttttctccttttgagtttgggcatataccaatattgagataggtaggctaaagttaattatgttctatttttaatggattgggtttgtaatatcttgcatgcactcatatttgtatgttttgccttgtgagagaaatctatacagtttttgtgtgcgtggatgctgggaatgactagaaattcatagcggaaggtttcaatgaaatgaaagaaaaaaaagcagtgtaggaaacaacgcggaaggcatggacttctagttgtagattgggtctttgtgaataaacctggactcctaacctgctctggacggacctggactccagatggacatgggcacaatgaaggaatgtacatgtaaatttttttcctattaaagagctccgattatgaaaattaaatcaaactgataattttctgttcgtcacatcggtatttcatccgtaaatccaatccagcgatgccctagcctccgttctcgtacgcactttgtccctaccattggtgattgctttccctgcggaaaagaaaaacgcatccgcacggtgcaggattgaattcctgatcgactaggatcgggactgaatggatcgtgttagctcctcaccgtcaccggtgtgcctcgcgtcgttctgcatagagatggccactttgcatagcgatggcctccctggtgggccagcttgttcgtcgggagcacctccgcgacgccgcacgccaagccttgagtgtcgtggccttgagctggggatgaccctggacaggcaaatagccccgtgacactcatctcggcggcctgcactgacgccatgttggcggggtcgacatgcttggatccgcggaaaggttgccgatggttgtagtggtaacttatcaacgttgagatacatagcaaatgcaaattcgttgagctacaccctccaaaattatcaccatagatgggctcatcagtaatgctccatatcaacacgacaatatggaattcacacgatttacacaactcatatgtataaaatttggagatatttgcgaggtatatacaaattcaatgtttttatgcacatgtgttataagtacacaagcaatcttatctatcaatatttatattcacccggtgcaatgcacgggtatatttgctagtacagtaataataattcttgttgtagtagtaatcctgggaaaaatatataggaggatttcccatctagaatatccaaaacgaccaaacccatctagaatcccagatttcccattttacccccgggcgcaaaccctcgccgcgtctccccgatggccggcggcggcggcggcggcggctccccctcgccggtagccgcctcggcggcccccgtgcaggtgcgctgcgccggatgccgcggcgtcctcgccgtggcccccggcatgaccgagttcatctgccccaagtgccgcatggcgcagcgcctcccccccgagctcatgcccccttccccgcccaaggcctcccctactccgccgcctcagccacagcctcatcctcagcttcagccgccgcctcttcctgctcctctccctcccccttcccgccgctccgcgccgcgagcgcagggcgtggaccccacgaagatccagctgccgtgcgcgcgctgcaaggccatcctcaatgtgccccatggcctcgctcgcttccgctgcccccagtgcgacgtcgacctcgccgtagacctctccaaactccgcaatttcctcgccacggccggtccaggcttcgcccctccgcttccgcttccgccgccgccaccaccgccgatgccgcccatcccgctgccgcacatgcccttcctcccgatgatgccacatgttccggtgccgatgccgccgatggcatcgcccgctgaattgcccgaggagattaatgaggtgagcaaccagcattgtactggttacagatttacagttgtggtggaatgtgtgtgttatttcaggccgaaatattacagttatggtcctactgctagctgactgaatttatgtctgaaggcttaccgttttctcagaatctgtcatgtatggatgcccatgctcatgttatgcttaggagagctttggctcactggaacccttttagagtttttttttaattttgctgtcaaatcacctctacattcgtggttacccgatacccatggggaaccgcattatagtacatgtgttcttttaccaggaatcctataaaagatggtattgttgcctcatgctcatcatctatttccccccagttggtaataataggagagcagtgaacccataagttgggtaggctatggcctatgggacacaacttctaggcttgtgatttccagaaacgaaacttcatggaatgaaaagctataacttgcaccattgcatggacatgggcttgatttatttttcttgtttgcttctggacaaacaactcggtatgatgactgtgacttgttacgtcatgcttgttttggggttgggagtgtcggatggtatcttttatgatcctatcaataaaggaattttgagattggcaccagaaacctgtttctacccttgattctataaaatataagtgtggcttctcacaattccatgtgattctataaaatataagtgtggcttctcacgattccatgtgaatggtgaacctgtttttaccctttgatactgttgtttgggcactgcccatacagtttggcccacacccagtttctatacgctttccatactgaagacaatgggctgaattattatttaggtatttgtctcatcattttcaatttttttttgtctatatgcaagcatgaaaaaataaaccttatatttttgtttggagggagtatcattggtgcacgtgaagtcttgagtattccataacattctgtcataaacattcagttgttttagcgcattttcactcaagaaccaatgccactgccttcttgctattatactggggttctaactgtagctatcttcaagcaggttgcagttgatgttgagcgtgaggaagatgaaggtggtactgtcggggaaacttttatggattacgtaagattttaggtttttgactgcttttatagaaaatggagggtagttccttcaagtccaagatctgtttctgactttctgttttattttttatgagctctaattttttgccatatttgttttctatttccagaggcctcccaagctatctcttggtcttcctcatccagaccctgtggtagaaacttcatctttgtctgcagtgcaacctcctgaacctacatatgacttgactattatggatgaattggatgagaccaaggtgttatcttgcttacaaattgaaacgatagtgtatgcttctcaggttagttatcttcttgctgttgacacgtccttatttttaaatttatgtatgtattgcatctgttgtaagtctagattcttgtatgcagaggcacctttatcatctgcctactggtgctagagcaggtttctttattggcgatggagctggtgttggtaaaggccgaacgattgctggattgatctgggaaaattggaaacagggaaggcataaggcattgtaagaacatatgaaacaaaaagaattcagtaacttatctgacaaaagcacctaactatttgttttggctgtactcatgttgtttctgcccttatgcttctgacgatgaattaattatccaggtggatttccattggttcagatctgaaatatgatgctcgcagagatttggatgatgttggtgcaaaatatgtggaaggtatgattctacgcatgcatcttacaacagttatctagcaaaaacaaaaaaagagttgtaactcacttggattgatgctactgtatgcaaatacaatattggagaacagacacagcaatgtggtcgtgtttgaatcttctatccaaacatataagctggcatgcaatgttatttataggccctgcttgggggagcttttggcagctgcagcttctgccagaatctcaagctcccccaaacagtccagattcttactcagattgtgagaatctgtacttttagaatccataaaatggattagaagccagaagctaggaaactcaccttctccagattctcaccagcagattctcagaattttaagctctcccaaacaggggccgtattaacatattagatcataacagagaacaggtgacttgaaaataaaaatgcaataaaccagagaaattatcaaatccatttgtggacatttgcctgcataactaaaacaggaaagggtctaagaaagtaaactcgaattcattttcatgtatatgtcaatgcttagcaagtttacattgggcataaatttctgagagtaccaaaacacaactctgtgcatccaaattggtggttagcttcatggttgttaaggcattgctgtggtgtcgacaaagcggtaagcaggtgcaggggctaaggcgttggctctgctttttaggaaaaccagaggagcaaggaaaaaaggacttaagctcatcatggaaccctagttggcggtgtttctgtcccgcctcagatctgtgctaccatcctccactctgcctcacggtcaatgtcctccctgtcccgtcgttgagaaaattgatagaattccattcttcaaagtgggctttgataagatgatatccccttacattgcactctttaaaatgccagaaattatctcttctatatatttttttcatttaggagattttaagtctgctttagttcttttccatagcctggacatgtggcttagtcaggacctgactgagccgcacccatctgtctagagcacatgtccccgttcctcccacgcaggtggccgcaactgcaagactagcaagagttcttcctcccccgggacttttggctctctcctaacctcacgctgcagccgctgctacgtatctgatcttgcaccaccctgagctgttgctgtcgcattggatgctggatgggatgtagaccagtgccacgaactccagtggaatgggcatgagggcatggcggttgttgccgcgggtggttcggttgtcacttgcttgttgaagaagcctcaagtcatgccttcggagaaaaagggacatgcgagataaatgtgtcttctcaagtacccagaatttggaatagaaattaaaatagacttagccaaagatggcaaaatatacaagaggcaaggtagagtggcattttaaaccatgcactttgaggagtggcctttatgaatcctctcctggcatgggtggagagagaacctgtttggctggagttaagtgcaacgtactatagtgtggtggctggctggatgtaattctgtgccatatcttttctcatttttttttattgtgcaaggcatggctcgcgttatgctgtctgtaaggcagggtcagggtcgccttacaaccattgttagtgctgtcaataaactggcctcggcttcagctcaatacaaaacttagtgttctagggatcctagtgcatgcttcgtggaggcaggctctgagcccagatcaaggtttgagcaggctggtgcttatattaaggaagcttgataacaaatgcggatccaagttctttatctttagttattgtgacaaatcaagtataatcaacactagactcatcaagattttgagaccaaaagagaatggattcataccaaatgcctagatcatgtaaaacatgggcatcaggacatgtctagaacttgtaaattcacagcaactgagctctgatagacaaagctcacgattctgggcagctctagctaggatcatctggagctctagcctagtttgaatcaagctcagagtgggcggagttcaagcaggttgtaattaataagaattatctatttcttaaataattaatcaatatagtagtctagggattagtgaactggtatcctatctgttagtttagaaggctattggtttgttcaagatgttagagatatgatttttgttagttaggcaagtattctattcttgtaggtcaagtactgtacacatcagcagtacccatggctgccatatccgcataaaagtgctcacgtatgcaagtatcaatcaactagccttagggcctctgttccatatcaggaagaagcctagctggcgaccagatgagggtgtctttggacacctaccaatccaattcatataaacaaatcttggtaaatcttttcatggatttttctaaactggacttttaagaatgtctttgtaaaactgcatgtgccctacagaaactatcactaaacagcacttttaacccattctccattctatccaatggcttctccccatctagaatggggagaggataaatctgtagccacatggatggacattgcatatcagcatctgacctattactctctttaactgacatcgtgaatgtgacggcatgctggcgcatgagttgtgccctttgactacttcctattacaagaagggtagacactgtcgtatgtcacatgtgggtcctggccaaattaaattatacactttagtggtagttttgaagtgatggaatgccaaatactcagcaataattatatatatatatatatatatatatatatatatatatatatatatatatatatatatatatatatatatatatatatatatatagaaaatcatgagctgcagttaccaatctgatcatctcaagttagcatgtaagtttttttaacatatttcttatatggtttcctctatatcaccaaaagtgaacgatcttaaaaactgactcaaatatggatatgtatttccaaaagcaaacgaacttaaaaaccaatttatacacggatgacgtatcaaatatcgacaaaaacatctttaatttttataatagtagagattaaatataatcttatcgtattttcaatcggtacttgtatgcagcttgtgtggttatagccatttatctcaaagcttgatatagccggttcaactcttggcacctcaatttatgcttcttttttttttattttttttggtgtgttgcgcgagctgcttggtgacgcctgtcatcacgtcgtcttctagcgcatggctcgacgtttatctcaccatgttgcacgagctgtttggtgatgctttgttttcacgtcatattctagcacaacctgacccggcccatggttatgacgctggcattctggcaatcacatcgtcctcctacgtgacgccatcacacaacttcttgggctccatgacgtcagcgagcggctagaggcaagccaaggtgagcatgcagccgcacttgcaattaaaatgcacacaggagtttatgcgttgttggctggttgtctaggaactcgttggagttgatgcactgttggagacgaaagcattcgagtgtatgcaagggtatagaagtccaaagtaatcattcaaatgccaaaacatcaagaattctcatgcaaaggacccaagcgtcaaacatcaagaaatatagtacctagggagtagatttttttgacagtatggtggtgtttgaaaatcctgaagataaagattaagtgtttcacgcaaaacgagatggtagtagcgtgtgattaattgagttttaattattagaaacttgaaaaatggattaatctggtattttagagcaactttcatatagaaagtttttacgggaaacacactgtttagcagtttgaaatgcgtgtcacgagaatctaaaatttcattcaacaattgttggacattcgaacgcagcctatggcttttcataacacgttgattatttgatcaagctgaaataagaacactcaattacatagtcactttcattttgcggtcaagcacggattggaataagcgccggtttgacatgaagttcttgaaaacacagggcatcgagataaaataaaaatttatatgcttgttattcatacatctggttaggttagagggtcaacctagattttcacgagcataagcagatcctagattgcacatcaagggtgctagccacatcctcgcgcgagagagagagagatcgaggtgctagcgcatagtgtaaccatcaccatgcgcaccttgcatctcagcacaatgaaatgtgtaacctatcttttatccaaaatcaatcatttcatttcgtttaattcgtagcacaccagagataaccatttctcaaattcctctttcttatatcgattaatgtgtatagctgttcttttcaatgcatctttcctttggcacaaatgcagtaagcaagcttatttcgttaaatagtagcttccgcactctttctacttactaaaattaatgtgaatgatcagggccctttagaggttctaatcatggagcacaaagctaccaaaaatgcatagtttccttcaaaaataactactcccattatatgtagtggctatctctcttaacttatcttacatgtattggtatctctcataactccttatcattctttcttttacttaaatgttaatttgcactaatatttttctcataatcaaatacataatcaactgctttttcctagttctccactacggtgagcactggaaaatacagtgtaagattcaaaaattatagtataaatatatggaatttaaagtataagatatagcatagtataagatttaacctttttccttgaaaaatatgacaacagaaatatagctagccattattaaatattggttatccatgcaagcatactaccatcgaaaataatcagtcaaatctgccattcacaaatatagacatttcttcttgctacgcatgtagagaaatacttccttcatttcatattataagttgtttgactttttttaagttaaaattctttagttttgaccaaatttatagaaaaagcaataacatctatgacaccatattagtgtcattaaattttacattgaatatattttgataatatttttgttttatatttaaaatattaatatatttttctataaatttaatcaagcataaagaaggttaactaagaaaaaaaatgcgtaacaagacttatcgaagtgcgtaacaggatggaggtagtaatcactaggcactcaaacgctgaagcaactacgtcagtttttgactcgagtagttagagataagtactattagtactatgtttgtgcttataagaagaatgtaatgaagcacgtcaccagcattttgttcagcttaaaagcatcccattagaaccaagtaattttccagatttgtgcagaaaattgaactagctcttgtgaaaatatttccaatttctcataaaattcatgtggtcggaagtaggaggatcagatcttttcaggaagtcaggaatgttcagatcgacttctgcaaacaggccttcaacctgtacccaccttttctgttcatcagacaaaattcctgctacatattgcagcatgcaattaaaccaggcacaaagatattttttttaaaaaaaaatccaacgcatagatcgaattcaccgcttgtaaaaaagggagcaatttctgattgaagcataggtatttcctcacatgcatgaattgaataatttcctgcaggaacaagaaaatagtctcatcccgcacaccaaattggacctaaattattttcttagactggcctaaattccttgataacattacaaatgccacaaggaactacaatggagaaaaaagggggaaaggcaaattcctactgcagcctctgctgtttgtatacatatacatagttgtttcgaatttcacataacaaaaagatgaaaacacagaaggttcgatatgtgagcatcctgggacaaaatcgctcattatcggtgaataccgcatcaacctgaatattcctggatgatatgtgtaatcagcacattttttttatgtggagagtatatatactacagaatgttatgtatgccttttgtagggtaagcactggttagggcgacctccgaaattgcaatccatggcaactatgttggcatttcatcaatcagacactagccccgagtgagccctgcagcagagtagctttcttcagaaactcagattcaaatttgctttctcaatgaacgattaactgctcacagcaatatgtaactagttcttttgtcaatcagacatgtttatctctgtttcattcacagtctggttcaaaaagaaagaaagaaagaaagaaagaaagccaatatttcaacaatttaagaaagaatcaagaagcacctcgcaaacaccatcacaaaaagttgctaatgaacctttgataacaacacaatacaagccaaaggtatataacaccgaatacatacctggaaggatggtctttccttcaaattcttaatggaatgaattaagcagatcaaattcctgat

SEQ ID NO: 9283 - DNA, 6939 bp, Oryza sativa
agaaggtccggggcgactacgccgccggaccggagctcggcggtgacgccgaagagagagagcgacggcgcgagctcgattccgccggagagagagagcggcgagtggcggaaacggtggaggaaggcacggggagtgtttatatagggttgggagggggagagagcggccggatgagggggaatcggccgcggaagatccggccgccattgatgcgccggcgaggtttagggggaaacgtttccgaacgaatccgagggagagagagagagaaaagtggggggaaagagggagggaatcacggggagtgtttcccccctcttgattgcgcgcggggcggacgggagcggcgggattcgcggcggcggcggcgctagggcacgggcgaggcggcgggagcggcgggaggaaggggatgacgggtgggccccacccgtcagcgagggtggcgggcgggcccgcccgtcagcggcacgcgcgcgaggaggaggccgaatgggccgcgggggagaggagagagaggaagggaggtgggccgagccggcccaagagggggagaggggggggaaaaagacttttagggtttttctttttacaaaaccattttaactttgtttttttcttcttaattaatatttgtgctctgaaaattccactaaaatttatttacgcattttaggcttttatgaaatatacaaaaatcctccaagccttatttgacttttaacttagcacattttaattgttggaggctttcacatggattttacttattctatgcataatttcgaggatgtattttagagtcgttttgggacgcgacagatgctcggtctgtccatctgtctgcgggtgatacgcggtgctgaaatttaatcgggtacccaactcttcttggagcttcttccagaagtgagacgtgaattggcttcccctatcagatataattttcttaggaacgccatggagactcacgatcctagcgaagtagagttcggctagtttgttccctccataggtggtcttcacaggaataaaccgagctaccttggttagtcgatccacgactacccatatagaatcatacccgccctggatttttggaagtccggtgatgaaatcgatcccaatttcatcccatttccattctggtacttgtagaggttggagaagtccgaccggtcgttggtgctcttccttgacacgctggcacacatcacaaagggccacgaactctgcaatttcccacttcatactaacccaccagtatttctctttcaagtccaagtacatcttcgtgctgccaggatggatggaatagggactttcgtgagcttcctgaagtatcaactgtttaagttccctgtcgtctggaacgcatacccgattttcgttccgtagggttccgtgttcatcctctgtgaaacaagcggctttaccctgtttcatattcttgaggatcccatgcatatctggatcattcttctgagcctcgcggatttgatcgagcaaggtaggcttggcttctagagtagccaagaatccatggctaacgatgcttaggttcagggcttccatctgttgattaagttccggtggaatgccacggacgccaagagtgttgcaacagctttttcgactcagcacgtctgcgaccacgttggccttaccagggtgatagtggattcccacatcataatccttgatgagctctaaccatcttctctgccgaagattcagatccgactgagtgaagatgtatttcaaactcttatgatcagtatatatttcacagcgattctcaatgagatagtgccgccagatctttagagcatgaaccacagcggctaactccaaatcatgggtagggtagttgccttcatgaggccgaagctggcgggaggcataggctaccacgtggccttcctgcgtgagcacgcaccccaatccttggcgcgaagcgtcacagtacactaggaagtccttgcgagtatccggtaagattaacactggcgaggaaaccagcttttctttgagagtttggaatgtcttctcgcattgcggtgtccacacaaatttttcctccttcttcagcaactgtgtcatgggttgagcgattttggagaagttctcgatgaatcttcggtagtatcctgccaaacccaaaaatctgcggacttgagtgactgtcttgggttgcttccagtcagtgacggcggtcactatttcagggtccacagcaactcctttagcggatatcacgtgccctaagaatttgacttcggacaaccagaactcacacttgctaagcttggcatacaattgatgttcccgcaactttcccaacaccagacggagatgctgctgatggtctttctctgattgtgagtataccaggatgtcgtcaatgaaaaccacaacaaacttatccaagtattccatgaacacttggctgatcccctcctcctgagatagatttcagtggttggttctggctctcccagagctccaattgaacaaggaggcatttgcttgcacacacatgcacccagttgcatcagactcgcatgaccaggaggcagaggaagccagaacaaggctcatgctcatcatgcacgcagaagccatttctctcatgctttcagctgccaagcttcacccagcacggcttgcggttcgctcctcccgtgcgtgcacagctcaagtgaaaccgcctcatcacttccatgtgatcatcctcctcctcagctcccagaatcctaggggcataaataatctagccgtggcatctccattcgatcaccctcatcgatcgatccgcccgatttggtctggccagctttcgtcttctgatagatggttgcttttatacacctgaaactaaggcaattaaagcttaagtgtaagtacaatgcccctctttgttttcctacattttagcatctgtttatgaccatgatgatgatgcattgctgcttttaaggttaaggtgcacatcgaaaagatttgctacttgcttgtagacaagaatcgcataaaatgtaacaatggtttcagaaaggaaatgctcatactaacgaaagtttcatgacacaatatttcagatctttcaaggaggaataagaatcaacctgtcaagtaaaaagttttaatatttgtatgatcagaaagggcatacaccaacctaaatttgctgtgtaagaaagtagctagctgtgccaaatcattgtcacctcagtcagatctgccacaagcacgtacacatatatgtgaaaccgactagctttcttgcagctggaaaaactccaacgtacaacagtaaatgatataatctcaatatctagatataaaatatcctttttggaaacttctacaacgataatatatatcggtttgtcctaaaaactctttttttgttccaacaggtaagacttacaagtagcagaatagtttctacaatatgtggaagctcaagattgccgagggaggaccatggctaaagagtggaaacagtcatgttggaagagaaacatgggaatttgacccaaattttggaacaagtgaagagcgggaggcggttgaggctgcacggatagagttccagaagaataggttcagaacaagacacacctccgatgttttggctcgcatgcaggtataatgaaaacttaagttcaactattgcaaagagcttgattcgtacctcaaatcagaccgcagcagcatctgtatagctctataagaaactcacgccagtccttgtaacacctgacattagccacaagcatatgcatttatagatgtgtaaacaagcatgaaactaatcctgaaaaacaaaactaaacagcaaagggaacagcacaatatgatgtttagtatccatctggaattttcatttttgcagttagctaaggcgaacaacttcagtattgatctacagaaagaaaaagatggaaaccccataaatattgacacagctacagtatcagatatactgaagaaggcactcagttatttctcagccatacaggcatatgatgggcactggccaggggatttcccaggcccactgtttaccactgcaaccatggtaagatagtaacatacacaatcaacttcatgtctcctgggattaccatcatatcatacatcaagtttccagcatcaattcaatttgacagggatccttatgtttgtttgttccaactgcagatcatagttctatatgtcacagagtcattaactattacactgtcatcggaacatcacaaggagatctgtcgatatctgtacaatcgtcaggtaacactcaatagttaacaggaagttaatggctactttttaagtaaatacacctaaaagattaattatatttcatataagatgtgaacaagacttaactcaaagtttgtgaaccagaacatcgatggaggatggggactacatgcagaaggtgaaagttccatgcttagcacagctctcaattatactgctctgagactacttggggagaatgttgatgatggaccagatatatccatgcataaagcaagaaaatggatacatgaccatggaggtgcaacaatgataccgatcttgggaaaagtgtggctctcggtaacaatactttcagctgtatcctagttctatactcaaatacgttttcagctagtaattttactaaggtggcttgggatctcaagtttccacaagttagtttaatttatcaaatataataattacctcacctgaattaaagatctttccacctacagaaatcaaatggttaatactagtcaatgagaacatcaaaatgatttggaaaagcaaggttatcaaaagtatcaagtattgttttagtagtatgttagttatgcaaatttcatttgattatgggagtggatcttccactatctacattcccctattgtaaactgtatatttaatattacaggtgcttggagtttttgactggtcaggtgtaaatcctattcccccagaattatttcttcttccatctttcgttcctatccaaccaggtaaaattttcttccttgctatatgttcaattatattagcacagatcttatcaccagactttgaaatgaaacatgctagttagaacatatagattatgctttagttcctgaggtcaagtcgtcttctgcaattactgagcaagaagtccacaataaagcccctatttagagagatatgttgacaggaaaattacaggtgatcaccatcatcaatgatgaagtgaacttcattagcataaaaagcattatcaattcactcattaaatgttgataattttgtattattcgattactttatcttacagttgttccatctgtagaaatagagtagctatgtaaaatagaacaaatcaaatatcattatgggtgcaattttgtttttgtatgcaggacgattatggagtcacttccgaatggcttttattcccatgtcttatttgtatggaaaaaagtttgtcggtcctataacaagattggttatatcattaagggaagagctacatattcatccctataaaaagattgactggaaggaggcacgcaaattatgtgcaaaggtcagttcactaaacttaacacatttctgcctcgcacgagaaatttagcgaggtactcagcaacaggtgctcgctaggccacctcaggaatatttagatataatgccaactaatattatggtctatgtatagacatctagatatgtcaggaattactaacatcatattatcagctactatgaaatagagctaagatgtgctccaatgcttgcaatattcgcatgcttgttgtagttaaatatcagattgtttatcagaagattcaaagtccgtatagcttgaatcaactgcagtaattttctttcattgtgaattcaaatgtaggaagatgcctataatccacatatgtggctacaagagtgcctatctgactgcctttatagttttggtgagccgtttcttacacgttggccaatttcctacatgagaaaaagagctctataccaaattgctgagttcttgaagtatgaagatgaaaattctcagtatatctgcattggtgctgcacagaaggtaggagttcttccttgtcaaaatgagactcatacttaccctagaaatctcagaagaaaaaaaagcagtaatagcttcttattctcagtttccttttaacagattgagaagctgaattaccaactagtatttttgtccaaaagtttctcatgagcctgcaaatcctgcatcaactgcattcatttgctttacaagcatccccatgaaacaagaagtacatagtacagagaacttggttgaaagttaaaactgcatatctttaaaaaaaaggtcgagactgaatatgcatgtgcagagcgcagacaaatgcaaaacaaaataagactttgatatttaaaattaatcaattttcatggagatgcaaaatcttacacagattgttaaatcgaatacacatttagcatatatataaggtttagctaaatgtttattctcagaaagtgcttaaaggtaaatttcaggcttccttatacatgcatagtgaaagacactatgttcagcagacttgtttttacagaatgagtgcacttctgaaaatgcgtggtaaaattctagcatcatttacttctgaaaatacatggtaaaactctagcaccaattttaccatgtattttcattaattgaacactgcacagtgcactcattccataataatgagcctgctgaacataatttctttttctatgcatttcttttgacctgaattttaagctctagcatgtgagtgaacattattttgaacaggcattattcatgttgtgctggtggattgaaaatcccaattcagatgcattcaagcgtcatttggctagagtagctgattttctatg

SEQ ID NO: 9284 - DNA, 27640 bp, Oryza sativa
ccttccttctcgccggattcgagctcgcgacgtcgctctctctctccgccgtcgccgccgagctctggtccgccgccgtcgtcgccccggaccgcctcccacctcggcgccgcctcctttggcttcaccgcatcctcgccgacctcgtccacctctccgtttcggtcgccaaccgccggagcgccgtcgtccccgtcgacccgatccgcgccaccgcctccctccgctccggccgcctcccccgtcgccgccgtcgccccgggatgagctgtggaccgtcgcctcctttccccttcccttccctctctcggccgccgctccgccgcgccggtggtcgccggctccgaccatcggagcgtgggcgcgccgcctcccgccgaccgcgcaagcatggccgccctcgggcgtgccgagtggctaccgcgtggggcctggctgtcagccgcccgcgcccttgggtgcggctgacgtgtggggcccacagcgccgaccggtgtgagcccgggtccttaagaagtcaagaacccatttttgtgctttgttcctgcttgttatatggagtttattagagtaaaagcctttttcttgtttccattggtcgtgtagacgctgcagcttcggaagatccgctcttcgtggaggttgaagccgacgtttgggaaagcgagcaaggacatattgaacatattgaatcccattttataaaattattttgatttaaattattgcattatcgctttatttaaattcccgcgttatcactgttttattcagccatgcctatttacctttgttatgaccttattattatggctattgttattattattaccttgttcaccctagactaaacaaaaccccaactagtgggcactccactcatggtgctactagtatgaatttaggtagatgcttcgctggttaattaggcaacattaggtggttttacaactttagactttgggaatattcatatcacctggacattatggaatggttggattattgcggaattggattcacacctccccctctattcaaaaccctcaaaatggttttaggctgggctcggggtgcatggttttgatggtagcacctcggccatatatggaccggtcttcgggcctctgttgcaaagcactaccgtacttccacatgtctagtgggtaaggcttagtttctggctcagtctggttataaacaaaagtacacggatggggatggacgaagtcgggggtcgatggacatctccagggcaaatgaaggctacacgagctgcggcccggtagtcgagatgtcatggcacagggccggtgtcctgctgctaggggctcagtcctgcctgcctgtcccgggggttccggccgtaggtgggattgggtcggtactcttgtctatggctaggatgggttggaaactatgtcacgtcttctgtctgtataccgtggtggtatgtggcacgtggttacacgtgaggaagatgtgtcttgtgggtaaagatgtacacctctgatcagagtataatttattcgaatagccgcgccctcggttatgggcaagccgagcaatgtacccaagttagtgttttaattcttaaaacctgcttaacaactaaaatgtggaatggttagcctgggttggcttgggacgagctgggacccagggtcgggttgccagttcggtctgaatcatcgtaggccttgggttaaggcaggttcgtgtgggttcacggccttgataaataatattgtttagttctagaatcgtgtttaccaaatagctttgagcaactaaagatctttaaatgctgtttactgtaaccctaatcctttatagtgtaactcctttgtgggtgtgtcttgttgagtacggtggttgtactcagtcttgctcaatttttcccaaacctagaagaggagcccctagaagatgaaggctttggtgtctagctcgtgcctgccgtcaagcgcctgtggtcgtcgccctagtcttccgctgtttctcggttgtctttgtgtgtgctgggccttcgctgcccatgtaataaattaactatttacgcttccgcttgttaaactctgaattgtatcaacttctggtgtaccttgcctcctgggacaaggaataatacacgcacgtaaggaacgcccgttgggttatttccggtcgtgacaagttggtatcagagccacccttaaccctaggacgagccgtaggtcccaagccttagcaatattttcgaaataaaaatcctttgtatttgtgaaaatcctctagtctctctctgtcttgctgcttcgtttatcgccaaaatctgacctttaaaatgttgcttttctttttgtttttgtttgtagatggccggcagcgtcagccgtcgtggtctggacatgactggtttcgtcttggagctgcggggcatgtgcgttgtcctggggtatccgcatggagtggactaccagggcaggccgcttccggagcaggagggtgacgatgcagagccccacgctgcttgggaggttactgcagtgatcctcactggctctcccgagcggacttcgctggcagtcaccgcgggtggagattctttctccgccgcttgccagagcgccgctctcctcgccatctgcactcttcaccagcgctacccggacgagttgcagcactcgccctaccgctaccaccctcgccgcggaggagcccgcgactacgccaccttccgggatgctagctcggaggatgacgctaccatcatgcacctggcgcgcatggtggaggcgtacgacgcggctcgtatcgacttccatcagatggtgcgccgtgggatggtcgagaacaatctgaagatcctggagctgcgtcaagagaacctgcagctcaagaaagacctagacgcagtggaggcgcagctgcatcagctcaagatcgcccagggagaggtctgccgccccaagcgtcgccgcgtctgccgcagccagaagatcaccgcccgcaagagcacctccaggcccgagcttgttcgtcagtccctggcatggacttgcttcgtcgagaaccctcgtgccgagcccgcgtgtcacgcccggaaattcactagtaatttccgaactaatttgtgcataaaatcctcgtccaggaatcagccgaggtacacaaactgacaatttaatatacaaatccatcttaataataacgttacatacttacaaaagaaaagaaaacagcagcggaattaacggtctagcgatggcttcagctccactcccacaggcagctcaactggggtataagccaaacgtcttctccttctggatcctttttcttcaactgaggttgattgattattgcaagaatgagtatatgacatactcaacaagccacacagcaaatatgcaagtgcacaaggattccaaaggaatggcataatataggctcatttgcaaaagcagcatttagcaaagagttaagataagtaaaacagtagagtaattaatcatcaattttaatcaacactgaacaacacacccatgctgtacaggcccaaccatcctgaacaaccatacccggctgtacagatctaactccaaaccaggagctaagcaaattattaccaattataacatccataattattgtgaaaggtgtgagactaatcacgaaaaacattgctcaacccgcccataaccgcgggcacggctattcgaatagttttactctggccagaggtgtaccactgtacccacaagacacaaccccacatcatgtcaccatgtgcctcagtaccaccacggtacctcggaaaggagttgtgacaataccccttgcacaacataacccattatagcgcacctttcctggatcataatcacccccttataaacaaggcatggactccccagcgacccccgtggacttctcgccacttctcagtctggcgcactataatgaatcacgctatacaaaagataaagccgttgcccacgctggcttgtggttggcacgataaatgtctcacaacagtagctcgcgaaccggtccttaattgccatgagcacgaccttcaaaaccatgtgctcacaacccaccactaatcatattttaattaccaattaattatcataacacgattaaccatcgtgagctaccattaaatataaccataaataataatgtagtataaatgattcatcccattagtgagctaatgtctctaagcattgctaagcaattatatatataacattcagctgaaccaaaccaatacataaggttcaagctaatcaatttattacccaaggtatcaaggaatagggcattcaatgcaaattggccataacaaaggaataggttcacaccacccggtgacattcgaaaataaatgcacagttgaaataaatagagaatttaaatataggatcaacatgctcaaaggattgtgtttagaatctgtgtgacttgccttgcaacaatcgatcttcaattaatcttcttgatcacttccgacgcactcacgaaccttcgcaacgacggaaacgacaagctaacacgcaaaacgaagaaaaagactaataaaaaccaaataaacaatacatataaaataaacaaacatgtagatcataattttagatgaattatgagacttgaacagccttattctgacttcaaaagaatttattatgaattttacaagattaaatctaattaaagcccatttaaaaagaattaaataaatttaattcaatttatggacaattttaatatgtagatctttattttagaaaaatttagcaacttgaaccacctgaaacggatctacggttatttagatatgattttccgaagatttaatctattaaaagaaattggaaaaggagaagatgatgacgtcagcatgacgtcacccacggaggccggctagggttggcgacctcgccggagctaggatggtcggccgcggctttggaggacatgtacacgtagaggacgacgagacgaacccaacggtactcaccctcgaaccaaacgacgaacgacgacggccggcgacgagatgaacggcggcggcggctcagacctcgccggagatggagctccggtggccggcgacgaaaggggacgggtggccgagcttcctcactcctcggcgcacctcttggcggcggcggcaacggcagcgacggcaggggcggcggcgcgacctcgccgaagctcggccggcggcggcggcgagttggacgacgcggcgacgaggctacggggcactagagagctcgggaaaaggggcaaacgaaagaggagtactagagggtcctatttatagccttggattgaagagatcggactcctcccgcaagaaatcgatccgagaaatcaaaaactcggttttggagataaactcgaaaacgagtttgattcggataaaatacccaacgatttgctccgattcttgaggggaaagatagaggagaacgagaggataaaatcccctcaaacaatcggaagaaaagaggccggattgggtgcggatttgagaggagaaaggagcggctcgggctcggcatctcggccggcttgggcgaggccggaggttgaagaaacctctgacatgtgggccccacatgtcggcggctagagggagagggggcgggcggcgtcggctgggccggcttgggccggttcggccgcgcgcggggagaaagaatgttgggccgaattcagcccaacgacttaagggagggtttttaaaactttttcaattaaaataattcatgaaatgatgtttcatttattaaaaatacttcccttgctcaaacaattcccagaaaattctagaaaatagaggaacaagcaaagtatttaataaaattttatctagctcaattttatattgagatttagcaaattaaaattagatcttctcttttaagcttttaaaatcatttctaataattccttttaaacaacaatttataacttaaggattttaaacaagaaaagcacttaacaattataattagatcattattgatcaaataattactgaactgttctttgtatcatttaggaattgagctccgaaaaatccgagaaaattccagagagtataattaaccatggagaattaaaaaaaattaaatccatccatgctttatatttaggagattttatttcccacaattaacttcacttgtaaattaatgaacatttaatataaattctattattaatttattaaataatttataaatcctgaaacgaaaatcaggatgtgacaccgcgcccgtggttccccaggagggggaagcctccggcgttggcagcacggaagatgcgctgttgctcaccttccgtcctggcccgtcgcagcggtagacgagcagttagtaggcttgcgcgtgtgttctttctcgtttgtcttcttgttggagttgtgtggggcatggttatgccggtgtgtggcataactgtgtcggagcctgcctttattttatttgcctaagcaacttgaactttaatgaaccaatttaatagcagtaataaattcaagaattatggtagtcgtgggtggttagctttaattgtcagctctctctgtttgttggttctgtgtggggttttcagatggtgatgaccaggagaagtgctagtaccggtgatggcaaccaacctgaaggcagcaaccacaaccaccagggcagcccacctccacctcctcctccgcctccaccaccaccaccagataccaacgccattctcacccaaatcctcgcccagcaggccaacatgatgattgctttcctccaccacctccaaaatccgccacaacataatgctccaccaccacccccacaacactctaaactcgccgagttcctccgcatccgtccacccaccttctttagctccaacaaccccgtggatgcgttggattggttgcatgccgtggggaaaaagctagacactgtgcagtgcagcgatgaggagaaagtcatcttcgccgcccaccagctgcaggggcccgcatctctatggtgggaccatttccaggctacgcagccagaggggcagcctattacttgggctcgcttcactgccgctttccggagaacccatgtgcccgccggagtcgtggcccttaagaaaagggaattccgagagttgaagcaaggcaaccgctccgtgatggagtatttgcatgagttcaacaacctggcccgttacgccccggaggatgtgcggagatgaggagaagcaagagaagttcttggcaggaatggaccctgagctgtccgtccgtctagtttccggggactatccggatttccaacgtctggtggacaagagcatccgcttggaagccaagcacaaggaactggagtcgcacaagcgccgcttggcgaatttccgcaatcaacagggtgctaaccaaagggtccgctacaccaatccctatccagggggatcgtcctcgcagcagcaacctcgctccgcgccccgacctcaattcgtggtgcgcgtcccacagccgcagcaacagcagagtcagcaagggactcgtgcgccccgtcctcctacaccaactgtgcagcctggtcaaggccgcagggacgctcaaggtccgcagcgtctgtgcttcaactgcttcgagcctgggcactttgcggataaatgcccgaagccgaggcgccagcaaggccaagcgcctccccgctccaacaacggtggtaaggatgtcattcggggtcgtgtgaaccacgtgacggccgaggacgtgctgacaactccagacgtcatcgttggtacgttcctcattcattccatccctgctaccattttgttcgactctggagcatcccactcgttcatatctgtgccattcgtggggagaaatcagttgggggtagaaaggcttaggaaccctctgctcatcaccacccctggaggggttatgacagcaaagtattatagtcctgccgtccctatagaaattcaggggattccttttccctcggatctgattcttctagacaccaagaacttggatgtgatccttgggatgaattggttggctcaattccaaggagtagtggattgcgcgagacgcactgttactctgtaccgagggccggaacaaccggttgttttctttgcacccccaacctctgtcagaagttcagaacttcatcagatagtactgtcagaaatccccatcgtcagggagttcggagatgtgtttccggaagaactacccggtatgccgcccaagcgagagattgagttccggatagatcttgctccaggaaccactcctctgtacaagcgaccctaccgtatggcagcaaatgaactggccgaatttaagaaacagttggaagagttaaaagaaaaggggtatatacgtccgagtacttccccctggggtgctcctgtgatttttgtggagaagaaagacaagacgaagaggatgtgcgttgactacagagctctcaatgaagtcaccatcaaaaacaagtaccctcttccccggatcgatgatctgttcgattagcttaaaagtgccacggtattctccaagatcgatcttcgttccggaaatcaccagttgcgcattagggaagaagatattccgaagaccgcattcaccacgcgatacggactgtatgaattcacggtgatgtcattcggtctaaccaatgctcctgccttcttcatgaacttaatgaacaaagtgttcatggaatacttggataagtttgttgtggtgttcattgatgacattctgatatactcacaatcagaggaagaccatcagcaccatctccgtctggtgttgggaaagttgcgggaacatcaattgtatgccaaacttagcaagtgtgagttctggttgtccgaagtcaaattcttagggcacgtgatatctgctaaaggagttgctatggaccccgaaacagtgaccgccgtcactgattggaagcaacccaagacagtcactcaagtccgcagtttcttaggtttggcgggatactaccggaggttcatcgagaacttctccaaaatcgctcgacccatgacacagttgttgaagaaagaagagaaatttgtgtggagcccgcaatgcgagaaggcgtttcaaactctcaaagaaaagctggtttcctcgctagtgttagtcttgccagatactcgcaaggatttcatggtgtattgtgacgcttcgcgccaaggattggggtgcgtgctcatgcaggacggtcatgtggtggcctatgcctcacgccagctacggcctcatgaaggcaactaccctacccatgatttggagttagccgcggtggttcatgctctaaaaatctggcggcactatctcattgggaatcgctgtgaaatatatactgatcataagagtttgaaatacatcttcacccagtcggatctgaatcttcggcaaaggagatggttagaactcatcaaggattatgatgtgggaattcactatcatcctggtaaggccaacgtggtcgccgacgctctaagtcgaaagagccattgcaacactcttaacgtccgtggcattccacccgaacttaaccaacagatggaagccctgaatctgagcatagtgggtcgtggattcttggctacgctggaagccaagcccaccttgctcgatcaaatccgcgaggctcagaagaacgacccggacatgcgtggactcctcaaaaatatgaaacagggtaaagccgcgggtttcacagaggatgaacacggagccctatggaacggaaatcgggtatgcgttccggatgtcagagaactcaaacagctgatacttcaggaagctcacgaaagtccttattccatccaccctggcagtacgaagatgtacttagacttgaaggagaaatactggtgggttagtatgaagcgggaaattgcagagttcgtggtcctttgtgatgtgtgccagcgtgtcaaggcagagcaccaacgaccggccggacttctccaacctctccaagtaccagaatggaaatgggatgaaattgggatggacttcatcaccggacttccaaaaacccaaggtggatatgattctatatgggtagttgtggaccggttaaccaaggtagctcgatttattcctgtgaagaccacctatggagggaacaaactagccgagctctacttcgctaggatcgtgagtctccatggcgttcccaagaaaatcgtatctgataggggaagccaattcacctctcacttttggaagaagctccaagaagagctgggtacccgattaaatttcagcaccgcgtatcacccgcagacagatggacagaccgagcgtctaaatcagatcctagaagatatgcttcgcgcatgtgtcctagatttcgggaagacctgggataagagtctcccctatgccgagttctcctacaataacagctaccaagccagcatacaaatggcaccttatgaagcgttgtatgggcgcaaatgccggacaccgctcttgtgggaccaagttggggaaagtcaagtgttcgggactgatatcctgagagaagctgaagcgaaggtcagaaccattcgggataatttaaaggtggcacagccacggcagaaaagttatgcagataaccgtcgccgtaacctggaattcgcggtggacgattttgtgtaccttcgaatcacgccattgcggggtgtacacaggtttcggacaaaagggaagctcgcacctcggttcgtgggtcctttccgtatcattgctcggcgcggagaagtcgcttaccagttggagctgcccgcctccttgggcaacgtgcatgatgtgttccatgtgtcgcaactcaagaaatgtctccgagtgccatccgagcaggccgactcagagcaaattgaagttcgcgaagacttgacctacgtggagaggccagtgaaaatcctggacaccatggagcgcaggaccaggaaccgggtaatccgtttttgcaaggtccagtggagcaaccacgccgaagaagaagctacctgggagcgtgaagacgagctgaaggcagcccatcccgatctcttcgccagttcttccgaatctcggggtcgagattccgtttaaggggggtaggtttgtcgcgtcccaaaacgactctaaaatacatcctcgaaattatgcatataataagtaaaatccatgtgaaagcctccaacaattaaaatgtgctaagttaaaagtcaaataaggcttggaggatttttgtatatttcctaaaagcctaaaatgcgtaaataaattttagtggaattttcagagcacaaatattaattaagaagaaaaaaacaaagttaaaatggttttgtaaaaagaaaaaccctaaaagtcttttccccccctctccccctcttgggccggctcggcctcctccccgcgcgcgtgccgctgacggacgggcccgcccgccaccctcgctgacgggtggggcccacccgtcatccccttcctcccgccgctcctgccgcctcgcccgtgccctagcgccgccgccgccgcgaatcccgccgctcccgtccgccccgcgcgcaatcaagaggggggaaacactccccgtgattccctccctctttccccccacttttctctctctctccctcggatttgttcggaaacgtttccccctaaacctcgccggcgcatcaatggcggccggatcttccgcggccgattccccctcatccggccgctctctccccctcccaaccctatataaacactccccgtgcctccctccaccgtttccgccactcgccgctctctctctccgccggaatcgagctcgcgccgtcgctctctctctccgccgtcaccgccgagctccggtccgccgccgtagtcgccccggaccttctcccgcttcggcgtcgccttctccgggttcgccgcaacctcgccgacctcgtccacccctccgtttcgcccgccaaccgccggaacgccgccgtccccgtcgacccgagccgcgccgccgccttcctccgctccggtcgccgttcccgtcgtcgctgtcgacccggggtgagccgtggaccgccgtttcgcttcccccttccctcatctctctcgggcgccgctccgccgcgctggtggtcgccggcggcgaccatcggggcgcgggtgcgccacctcccgtcggctgtgccggcgtggccgccttcgggcgcgccccgcggctgccatgtggggcccggtcgtcagccgcccgcgccctcgggtgcggctgacgcgtgggacccacggcgccggccggtgtgagccgggtgcacccggtccaccgtggaccgtgaggctgccgcgtaggccccactcccgtggacccggtccgcgcgctcctcccctcggctgacgcaataaatccgattttaaattaaaatttaaataaagaaattcgcaaatatccatttaaagagcatataaacttcaaatggccataacttgaccatttgaactcggaattggaccgttcaagtctctaatttctccttaagaagtcaagaacccatttttgtgctttgtttctgcttgttatatggagtttattagagtataagccttttcttttccgttggtcgtgtagacgctgcagcttcggaagatccgctcttcgtggaggttgaagccgacgtttgggaaagcgagcaaggcaagtcacatcatccttgaacatattgaatcccagtttataaaattatgttgatttaaattattgcattatcgctttatttaaattcccgcgttatcactgttttatctagccatgcctatttacctttgttatgaccttattattgtattgttattattaccttgttcaccctagaataaacaaaaccccaactagtggacactctactcatggtatcactagtatgattttagttagatgcttcgctttttaattaggtaacattaggtggtttttcaactctagactttgggaatatttatatcacccggatactatggaatggtttggttattgtggaattggcttcacaccgctccttctattcaaaatccccaaaatggttttaggctgggctcggggtgcatggttttgatagtagcacctcggccatataaggaccggtcttcgggcctctgttgcaaagcactaccgtacttccacatgtctagtgggtaaggcttagtttgtggctcagtctggttataaacaaaagtacacggatggagatggaagaagtcgggggtcgatggacatctccagggcaaatgaaggctacacgagctgcggcccagtagtcgagatgtcatggcacagggccggtgtcctgctgctaggggctcagtcctgcctgcctgtcccgggggttccggccgtaggtgggattgggtcggtactcttgtctatggctaggatgggttggaaactatgtcacgtcttctgtctgtataccgtggtggtatgtggcacgtggttacacgtgaggaagatgtgtcttgtgggtaaagatgtacacctctgatcagagtataatctattcgaatagccgcgccctcggttatgggcaagccgagcaatgtacccaagttagtgttttaattcttaaaacctgcttaacaactaaaatgtggaatggttagcctgggttggcttgggacgagctgggacccagggtcgggttgccagttcggtctgaatcatcgtaggccttgggttaaggcaggttcgtgtgggttcacggccttgataaataatattgtttagttctagaatcgtgtttaccaaatagctttgagcaactaaagatctttaaatgctgtttactgcaaccctaaccctttatagtgtaactcctttgtactcccttgcatttattctgcacttgtgggtgtgtcttgttgagtacggtggttgtactcagtcttgctcaatttttcccaaacccagaagaggagcccctagaagatgaaggctttggtgtctagctcgtgcctgccgtcaagcgcctgtggtcgtcgccctagtcttccgctgtttctcgattgtctttgtgtgtgctgggccttcgctgcccatgtaataaattaactatttacgctaccgcttgttaaactctgaattgtatcaacttctggtgtaccttgcctcctgggacaaggaataatacacgcacgtaaggaacgcccgttgggttatttccggtcgtgacagcatctaaatcagatcctagaagatatgctccgtgcctgtgttctagatttcgggaagacctgggataagagtctcccctatgccgagttctcctacaataacagctaccaagccagcctacaaatggcaccctatgaagcgttgtatggccgcaaatgccggacaccgctattgtgggaccaagttggggaaagccaagtgttcgggactgatatcctgagagaagctgaagctaaagtcaaaaccattcgggataatctaaaggtggcacagtctcggcagaaaagttatgcagacaaccgacgccgtaacctagaatttgcagtggatgattttgtgtaccttcgggtcacgccattgcggggcgtacacaggtttcagacgaaagggaagctcgcacctcggtttgtgggtcctttccgtatcgttgctcgacgcggagaagtcgcttaccagttggagctgcccgcatccttgggcaacgtgcatgatgtgttccatgtgtcgcaactcaagaaatgtcttcgagtgccatccgagcaggccgattcagagcaaattgacgttcgcgaagacttgacctatgtagagagaccagtaaaaatcctggacaccatggagcgcaggaccaagaaccgggtaatccgtttttgcaaggtctaatggagcaaccacgctgaggaagaaggtacttgggaacgtgaagacgagctgaaggcagcccatcccgatctcttcgccagttcttccgaatcctggggtcaagattccgtttaaggggggtaggtttgtcacgtcccaaaatgaccctaaaatatatcctttaaattatgcctagaataattaaaatccatgtgaaagcctccaaaaattaaaatgtgcaaagtaaaagtcaaacaaggcttagaggatttttgtatatttcctaaaagcctaaaatgtgtaaataaattttagtggaattttcagagcacaaataataattaagaagaaataaacaaagttaaaatgattttataaaaagaaaaaccttaaaatttcccccctccccctcttgggccggctcggcccatctccccccctctctctctcctctcccccgcggcccattcggcccctccccgcgctcacgccgctgacgggcgggcccgcccaccaccctcgctgacgggtggggcccacccgtcatccccgacctcccgccgctcccgccgtctcgcccgcgcctagccccgccgccgccgcgaatcccgccgcctcccgtcgtccccgcgtgcaataaagtggggggaatcattccccgtgatcccctctccctttccccccatttttccctctctctctcgcgttcaaacgggcggatttgcccccgcaaatctcgccggcaccattgatggcggccggacctcccgtgccggtttccttcccctctggccgctctctcccccttccaaccctatttaaaccctccccgcacttcatccgaccgttttcgcctctcgccgcccttccttctcgccggattcgagctcgcgacgtcgctctctctctccgccgtcgccgccgagctctggtccgccgccgtcgtcgccccggaccgcctcccacctcggcgccgcctcctttggcttcaccgcatcctcgccgacctcgtccacctctccgtttcggtcgccaaccgccggagcgccgtcgtccccgtcgacccgatccgcgccaccgcctccctccgctccggccgcctcccccgtcgccgccgtcgccccgggatgagctgtggaccgtcgcctcctttccccttcccttccctctctcggccgccgctccgccgcgccggtggtcgccggctccgaccatcggagcgtgggcgcgccgcctcccgccgaccgcgcaagcatggccgccctcgggcgtgccgagtggctaccgcgtggggcctggctgtcagccgcccgcgcccttgggtgcggctgacgtgtggggcccacagcgccgaccggtgtgagcccgggtccttaagaagtcaagaacccatttttgtgctttgttcctgcttgttatatggagtttattagagtaaaagcctttttcttgtttccattggtcgtgtagacgctgcagcttcggaagatccgctcttcgtggaggttgaagccgacgtttgggaaagcgagcaaggacatattgaacatattgaatcccattttataaaattattttgatttaaattattgcattatcgctttatttaaattcccgcgttatcactgttttattcagccatgcctatttacctttgttatgaccttattattatggctattgttattattattaccttgttcaccctagactaaacaaaaccccaactagtgggcactccactcatggtgctactagtatgaatttaggtagatgcttcgctggttaattaggcaacattaggtggttttacaactttagactttgggaatattcatatcacctggacattatggaatggttggattattgcggaattggattcacacctccccctctattcaaaaccctcaaaatggttttaggctgggctcggggtgcatggttttgatggtagcacctcggccatatatggaccggtcttcgggcctctgttgcaaagcactaccgtacttccacatgtctagtgggtaaggcttagtttctggctcagtctggttataaacaaaagtacacggatggggatggacgaagtcgggagtcgatggacatctctagggcaaatgaaggctacacgagctgcggcccggtagtcgagatgtcatggcacagggctggtgtcctgctgctaggggctcagtcctgcccacctgtcccgaaggttccggccgtaggtggggttgggtcggtactcttgtctatggctaggatgggttggaaactatgtcacgtctttcgtccgtatgccgtggtggtatgtggcacgtggttacacgtgaggaagatgtgtcttgtgggtaaagatgtacacctttgatcagagtataatctattcgaatagccgcgccctcggttatgggcaagccgagcaatgtacccaagttaatattttaatccttataacctgcttaacaactaaaatgtggaatggttggcctgggttggcttgggacgagctgggacccagggtcgggttgccagtttggtttgaatcatcgtaggccttgggttaaggcaggttcgtgtgggttcacggccttgattaataatcttgtatagctctaggatcgtatttacaaaatagctttgagcaactaagtgtcttttaatgctgtttactgcaaaccctaaccccttatatgataacccgcttgtactcccttacatttattctgcacttgtgggtgtgtcttgttgagtacggtggttgtactcagtcttgctcaatttttcccaaacccagaagaggagttcctagaagatgaaggctttagtgtttagcttgtgcctgccgtcaagcgcctgtggtcgtcgccctagtcttccgctgtttcacatttgtctttgtgtgtgctgggccttcgacgcccatgtaataaattaattatttacgcttctgcttgttaaactctgaattgtatcgacttttggtgtgccttgcctcctgggacaaggaataatgcacgcacgtaaggaacgcccgttgggttatttctggtcgtgacactgctgatcggcaagagcagaagcctctacaacaagcatgcaatgcaaactcaattccaccgtgcaacagatcaactcctatctaccggtgtcttttctttctaatattaaatttttccggcgagattcagttatcagtttgaagcggccggggtcgacgtggactcggactccaaaccaaaaccattaagcaactgctcgtcatcaagcgatcaaggaggaatagatggaataatttactgtagtcatgtatgctcttgatggtgcataacttggcctacagctgtatattacatgtttccagtcacgaagctatctaccggccaaacagttttttatttttctacaaagcgcaagcattcatcaaggcacacagcttggtgtcgaggttatcaagattgcgatctggctattccaagtcgatttatatttttcgccaaaattccggctattagacctttgaaacaagagcttctggatcacaaaccactaccaggtttatcgttttaaattttcttgcataaattagattaattcgcagatcactaattgtaatttgatctattattttatgcatgtgctgccggccgccttcgtataccgccgactggtgttctcgcctgcacggctggcgtattatgccgtcgttgttgggcatctacgtcttcaccaccggccgcctcgattgccgccgactggtgtttctgcctacacggttggatgatcacaccaccgttgttgggcgtctacaacttcaccaaccggccgcctccttcgctgccgactggtgttttcgcctgcacggctggcctattatgccgccgttgttgggtgtctacgtcttcaccgaccggccgcctcgtcgatccgccgccgattggtgtctccgcctacacggttcgatggtcacaccaccgttgttgggcgtctacgtcttcaccgaccggctgcctcgtttgctgccgactagtgtttttgcctgtacggctggcctattatgccgccgttgttaggcgtctacgtcttcaccaaccgaccgcctcgtcgatccgccgccgattggtgtctccgcctacacggttggatggtcacaccaccgttgtggggcgtctacgtcttcaccgaccgaacgcctcgtcgatccgccgccgactggtgtttccgccttccggctgcctcgtccgccgccgactggcgtttttgcctgcacggctggcctattatgccgttgttgttgggcgtctacgtcttcaccgaccggccgcctcgtccgccgccaactggtgtttttgcctgcacagctggcctattatgccgccgttgttgggcgtctacgtcttcaccgaccggccgcctcgtctgctgccgactggtgtttttgcctgcacggctagcctattatgccgccgttgttgggtgtctacgtcttcaccgaccgatcgcctcattgatctgccgccgactagtgtctccgcctacacggttggatggtcacaccaccgttgttgggcgtctacgtcttcatcgaccggctttccttcgccaccaccgattggtgtttccacctatacggttagttggtcacaccactattcatgggcgtccatgtcttcaccgaccggcttgccttcgccgccgccgactggtgtccccgccttcatggctgacctattatgccgtcgtcgttgggcgtctacgacttcaccgaccggcttgccttcgccgccgccgactggtgtccccaccttcatggctgacctaatatgccgccatcgttgggcgtctacgacttcaccgccggcctgccttcgccgccgccgactggtgtccccgccttcacggctgacctattatgccgccgtcgttgggcgtctacgacttcaccgccggcctgcctccgtcgccgctgactggtgtcctcgcctatgcggttggcgggctcctccaccgttgatgggcctcgttatctacatcaccggcttgcttccactgtcaccgactggtgtcttccttgttattgatggacgactttgttcctacattggttacctctgccattaccaaggggaatattacaaagctaaatcatcattaattttcttctttatatgatatttttctttttctctaagtcactacatcaattggttcgccattgactagtgagtcgggggctatagatgttatgtcatattttttgaacaattttcataatatttatattgattgctcacgacataatctgagtataaaagtgcctatcgagttatggagttctatcttcctatgcttcccgtttgatttgtcgatggacagttgcctttgggccgattcctaccacccgggggctcactggatggaccgagtaacgcaagatgctaagtgttattcggaataaatcaaaagcatagagataagataaatttattttctgctctttacaattgcaaaagtacccgagtagtaaattctgattcgtgaaactttgttccattaatgacgaactcatatcactcatatgcatgtttgggaagtgcctaggccgactcccgatgtttgggggctatgactagtcggacagagtgtttaaacgtacggagtcatctgctcggggaaatcaaaattgacaagaggagaaatacatatttataaatattttaaaatacttgaatttttctcgagtattatatttacatcagatactactcatcctatatgtttgttctgtaggatccatatccagatatgcataaaagggattcatggctttaagcttatctcctacgcttcaggaatggatcagtcagaacatcaccaccggcttgccttcgccgccgccgactggtgtctccgcctgcacggctggtctattatgccgctgttgtcgggcgtctacgtcttcaccgtcggcttgccttcgccgcagccgattggtgtctccgcttgcacggctggtctattatgccgctgttgtcgggcgtctacgtcttcaccgatcggcttgccttcgccactgccgactggtgtcttcgcctacacggctggcttattatgccgccgttgttgggcgtctacgtcttctccgaccggccacctcgtatgacaccaactggtgctatcgtcttcacggctggccacgtcgccgccaccgcaaataggcgtcattaccttcaacgcaagctgtctacgtctgctgccgactggtttcttcacttcgatggctgcatgattctgccagtgttaattggtcttatcgtctttaccgccggtcatctcgtctgctgttgactagtgccctcgcctctacggctggtttatactgctaccactactgatggacatcatcgttttcattgctggccgccttgtctgacgccgactggcttgttcacctccacggctgcgcgccttcgtcatcattgactggcgtcatcgtcatcatcagtttgccttcgccgccgcccatggtgtcttcgttttcatggttagtctattttgccgccgttcaaggacgtcttcattttcgtcatcattctacttcttccgtcgccgactggttatgccgccgtcgactgggtggagcaacttcatcttaattatcttcggaacaggcaagctctattgcctcaacttcgcaagttttgctacttcaccaaccacaacgtccacaagatcttcgacatctcagcatgcacttccagattcgacaccgcgctattccactacaacaagtggttcttcaattttcaagaattctagtcggacattttcaacatgtatcttcactcaagcaatgactactcgacgacaagaagctataattctcgactctatgttcagatgtttcccaactaaccaaagagtcgggggctacacaaatacaggactctcaaaattcgacaagctgaagcaatcaattaatcagccaacgagtcaactccaggagtcatcagttttgtcttcgcttcagagctggcgttctacttgagcaactccaattatttcactggaaattttggcttctccacgctgccacaatttactccaaaattttcaagtatcaagtttgagattttatctatatgtctgggcgtttggagttatcaaccaattaacacagattcaacgagttggacaacatcatctactttccttcaagtgaagcatctacaacagctacaattccaagttctactgccatctttacagatcaaggggtgttgcatcaatcttcgttatgcacacatcaaaaaaattacttgagcttcgatatcttctcaacagtttgatggattattgtcattgacttcatcaccagcacctctacttcatcggccctgacatctctgccgttgctaatggatgactatgtcttcgcctccggttgcttccgtcattgccgacttgttatttcgccttcacggttgacctactatgaaaacgctgatgagcgtcttcgtcattatcatcggttgctacactgctattgactggatcaccgacatcgtcatcttcatcaatatcctgtcaagcctcttcaacatagcatattctactgctgtttgatgggtaacttcgtcatcataatcgatcatctatgattgctgcttatcatcattactgtcggttgcgtttgtcgtcgccgactatttttttcatcttcatgattggtggatttcgtcatcgcctttgatgcgtgtctacatcttcaccgtcggcttgctttcgtcaccaccgactggtatcctcaccttcacggatggctaattatgtcgccgctaatgggcattttcatcttcttcaccagctgcctcgtctgtcatcgactgattatttcgctaccatggctacacaactttatcgctgggcaccttcatcttcattgctggttgacctgactgctgccgactggattcttcgcctccacggttgtgcaacttcatcacttttgattggtatcactatcttcactaccaccaatatttttgccacctctggtgagcaatattatctctatattggtcgccttgtttctatgccaactgcatcagctaccatcaatggaccattgcgactacggcagaaggacaagctatatgatcaggggcttactagctcaaacacaagtatcataccttcaatttggacttgttccggatacatgcaacatgaattcatgatcatgagtctattttctatgctcaaagactggactatttattattccccgtaagggttatcaatcgaatacttgcgcaagtcaggattcaattattatatctattttggagtatcccataagggataatcactctgatcagaagctattcatataagctacacttggtctatatcacccggaagatttattactcgggagcatgttacatgcgtcatcctttaaagggtgtcgaaggcatattttttagcctaggcctaatatgtctgcagcctatattttcaggtgtagcctgtcacgttcttttagggacttagatactttttgcttaggccaaagtgcacgtgatcaagtgcccaataccttaaaatccttttataccgcagttactcaactttttaggagttggtacaatgcatcttaaaaggtgtcaaacagtaaagctttatatagctgccccgctgacttttttatataagtgaaggtgctgtttgggtttttaagcaattgattgaatacaatattgttgctttttgccacgtaagtgtgcatttttatttgaccaatattatggcttaggctgattatatatcttggtcattttccaagcggttggtaaatcctttatgagtttatttactcggattttgcaccatatatgccgtatatttccgggtgtggtgaaaccatgtgtcttttagagagttaagtacatctgttaaagcagtgtgcgcatggcgtatgcccaatactttcaaaatttctttattcacagcattcaagttttttttatagctgttttgctatgtgaattttcaatgatgtagtcaactttaggttgctcacatcaatttttaccaagcagtcggtatatcacttggatcatgttatttgggggattcacaccgcatatgctatatattgatatcaagtcacttggttgattacaattatcaaaaccactcggttggttggattatttattcgttgactatatgcttagtttgttcagctaaccacgtagtcgggggtacacctattaggtgcatctagtcgatgcacctgactttatttttcagccctccacagtcttcatatttggtaaaagtactcgggagaccatggcaaaaatgattgaagaacttggctttggagtaatctggttcgagagaagattatctttttgactgtgaaggtctcaggggctactgtgcagattatgggtaccccatacccacacggcatggttatccgactagttataggggataacttatatctatggaatatgtaacagatcatgacttgggtattacgtttccttgtatattacggaatggcctaaagtcctggtttggtaatattgtaaagtagatttaggaaaccgataccgtattggttaaggtttctatcttgtaatcctgccccacgtcttatataaggtgggcaggaggccctctagggggcatgagcacatatgatcatcagatccgcctcagggaagccaccgacgccgccgttgggagggtgtagtcgccgagagggagggacaactgtcaaggtcgacggggagtggaagaagaagaggcggagggacggtcgtcactgccgttgggagggcgctgtcgccgagaaagagggatagccgtcaaggccgacggggagagatagatggagagggagagggggagggacggccgttgccgcgtcgtgccggcgagacggaagggagagggggagatggagagggagcagtgccactggaggggagagggtagaggaggggaagcgatgccgctggaggggagaggggataggaggggaagcggcgccgctagaggggagaggggagagacggcgcctgtggagggaggaggacggggagaggcggtgtcgggcagggggagggggctggtggtgggagaggggaggaggggtgaattaatctagggttagggttttgattgatttggaactaattcgaaccatccataaaatcaaaacgaatggctcagattgatagagcgtcgagctggcctgcatcaccgaaccgcaccacttaatctcacacgggccggcgacccaacacattttcggttacggcccacacgataagtaagatgaggagcatggggatgttaattaaactttggtcgcttacggcgtgagaaaagtgggccggctcagttgtaggctaaagaagaaaatgggctaaaaaatagcccatatagaaatgaggatttttatttaaataaatactgaaatgatgtttgtattatcaaaattagcaattaagcactataaattccagaaaattttgaagagtataattaatatggagaatttaatacaaattaaattcaaccatatcattttatttctcacacttactttactagtaaattaatttaattatatacctacctacttagaaaatacccaaatatttcaaaaaattcgtatttcacttaattagaatttaacatgttttaattcaattttctcgttttttctttgcaactttccgttgcaatgcacggagtctagaaaatacccaaatatttcaaaaaattcgtatttcacttaattagaatttaacatgttttaattcaattttctcgttttttctttccgttgcaatgcacggactattttgctagtaatgaaataatccactagcaaataaccacattttaaaaatgtctttcctcaaaaattcacttcaatggtgtccaccaactataatcacaaaatttgtcgccctagagttatcagtaatgtttgtacaatgtttgatacgtcataagcgaacatgtcataagtgaaactagtcatagccatttctacttggctgacagatgttgaatcctagccacccaaattccaaatcatccacgaggctccatcagaaaaaacggtgcatacgcatttcaggctttcaacagtgtcatatttaccctaacatccagaaacgaatctcactatacacgatagacagcgtacctataattatttctgaggccgagaacgaaaacaccgcacatccctatactgaacaagcaaaacaaaaggtaaagaaacaatggagaattaattgggtagcgaccaacagaaactgctacgctttgtgcctccctcagattcagagggaaagatgcacctctcgagctcaactgcctcctcacctttacaaatgactagtcaccagcaaaaaagattaaaaaaaaaaaagaatgtgcaatgaattaacttgtctcaagtcagtcaatcgtcaatatcctgcacccattgcagacctgcaacaggacaaattaaaggtgtcaagcactcataaaataaagttcaacaatatgggtgccataatctcgctaaagtatgcgagaaaaaaaatgccagattgaaaaatgacgagaacaatttttcaaagtaaagaaaaatacgtgggtaaaccttcagcccagtataagaatattgaatttctcatagtataaggttctaaaagatactaacaatttctacagagatggtgctgttttccagtgttgttcgcgcacagacacaagacagttcacactagaaatatggaggacataataaagctgctaggagctatgtgagggtggaactgaccttctaatactgattccacagctgaatttggaatcataagtccaacaatccgctcattatcatttgtctccaagcgagcgacacgtatcctcttgtgaatttgtcgaacctgtttgatcatgtcagcaaaaaaagaaaataccaaagagagaagctcagataaaacatggacgacatgtacaagcagcgaacctgcttagctagggccttttctactatgccccagacaggaagtattagaccacccaaaatattgatttcctgtaaccttctgcctactgtacaatagcttccaagtttgcatttgggtccatgcatacactgaaacaagtcacaggacacgatttaatgaagtaactggctgaagtacagaaataggcaattaattaatcatgtatgttctcgaaacaaaattgttgtgctcagataaaagtcacaaagtaaatcatgatcctgcaactataaattacttgcacaaaataaggggatgatagttgaagagtaaacagataattcagtgttggattactaaaacatatttcatacaccttacaataacttttggaaatttgtcgttcaaagagagatccttttgataatagaggaaaacaagttcctcaaccttttgactcagtttatttttcatccctcaactccaaaatcaggtaacctatccctcaactcttaaaaccggagagaattagtctattcaactgtttggcaattgtttcacgcacataagcacattgcacacaggatctgagggggtcaaaacctatttttagcaggatgagaatggaaccatgctaagagttgagggatgagagtgagactttttgtacagataatgatacaacagctttaaaaagagcaaactcatactggc

SEQ ID NO: 9285 - DNA, 19552 bp, Oryza sativa
tccaaatgctagcgggtcatgtaaatagcctaaacccttagcactcagtgctgttcacactcatttactaatagtttatttgttttgctgtaggaaatgatcggaagtttcttgaaaaatggccccttgtgttatatggcttatcgcaatatattcccaatatgggctcttggagagtatcagaaattagtatttcagaactatcagacctctagcatcaagcaaacaaatatagctccatctgctggcaatgctgctctgaagaattcagcaagtacaacagcgccaacttgatttcttggcagaatcaagcaaacagtccagtgtattgtaggtcatgtgaaagagtacaaaactctaaatctagaatctgctgtattgttttggtcgattttatgagatccttatgaattttttgtacattctttagatctgtgcaagaacatgtacatcacatttcacatttaggtactttgaaaaaggataacaaactttgccccaacttcctggtccataaacctaattcataaactgttatagtgatgatactgttaacataaactttggtactaaatgtatgctaacacacctctttttgctccaacagcagaaaggcagcacagaatttaacagaaacccacaaactattctagtaataccaaaaatatgtgttcaatacaatgcatgaaagtgaattctgaaggtgaaaaaacacatataatgtgttgggcgtggcctgtggggttagaggaaagcaaagagtggtgcactccataatacatctcgcgttgctatggtgtagagggatcagggccagaccgtggcctctgacatggaaagtggagttggaggccacaaccataacagaaaccagacttctccggtgcatttaaagttttaaacagaaacaatttagggaaaattaaactcagatgcaattataacagaaactcatcatagatggcaaaataaatctctagcaggaatatagcttgacagtcacagatagacttttccttcggtgactaatcacacatttctgagaaatgaatgaaacttcattacaaggcaacaaatacaggtttaagataaatcaagaaatggacaggtaagtaaaacatttcccatctataatgaaatacgtaactaagtaattcaacttactgaagaacattctggatgtgatggagtaattttccgatatgttttcttgtcaattgttatttggggaacatgggaaatgagatggaagtcttcccctgatttaacagcacatcttctgctcaactcaggacagccattgatcacaattttcttgagagaagtgaaactttgaatgaaatctggcagtttcattaatccattgcaatttccaataccaaaatattgaagagaggtagcagcagaaataaagctccctggaaaacagactagcttcggaagcccaacaagctggagcacatcaaggcaagccaggccacccatggcttctgaaggttccaacaaatccagctcatggcaattattaatcgataatgtttgaagtgtggagagttgattcatggtcgagggtagagtagccaactttggacagttgaagatgtagagctttcggagggaagttagactaccaaatccatttgtcaatgatgataactcagcacatgaatttaagaacagaaatgtcagtgaagtcaaactacaaaatccatcatgttctgataaatacttattcttcagtgtgaggcacaagaatctaaggcttataagtctatgcacgtcctttggcatcttctctaattggtcgcaccgactaagttgcagtgtttgcaagttcaccaacttacatagggaattcggtaagaacttaattttcccattccattgtagatccaggtaccttaagtgcttaagatttccaattgaactcggtagctcatcaaaatcaacgtcagaaaaaataagaacacgcaggagtgtaaaggttgacaagaagttgtcaagaaaagctttagtcatggtcccattgttatcaatgcttgcaaatgtccttgccttgtttgcctttctcaggtgcttaggaaattcaatctctgttgagaagtccttgcgatcccacacaaggtgcctaaccttttcagataaatctttactttcacaattaacaatagcatgctccttatggcacacaaacatcgcaagattatgaacaagatcatgcattttacaactttgaattgagccattataaataacataatggtcttggaaaagagatctttgatccagttcattaaagtattgtcctccaatagtttctatttcatctccttctctggttttatgcaataaccctagtgccatccagaacataattaaaagctctctcaaaatcacgtagtcttttggaaaaacagataggcaagagaagcatgccttaagatgaggtggaagtgcatcataactcaattttaaggctggcaatatatcgcatttattttgctcaatattccacagatttgcatccttaatacgcaaccactccttaacatcctgtttaccaaacagtacagaccccaatgtcttagctgccaagggaacaccgtggcatttctccacaatacatttgccaatttctaacaagagtgtgtcctttttttcctcatctctgaatgcatagcgaataaatacctgcatacattcatcaaatgaaagctctggcacatagtatggctccaacgtcttcaccaccgacgcaacattcatattacgtgtggtaactacaacaacacttcctcttccaccactagataggaggtttttaagttgttcccagtcattaacattatcactccatatgtcatcgagaactagtaaatatttgttttcctgtaaaaacccacgaagcttgttttgtagcgtttgcaggctcagttgtttgttgctttcacctgtatctgactggattatgtcatccagtatcttctttagatcaaatacattagatacgcaagcccataagttcttctcaaacattttctttatcctcatatcattgtacactagtttggccagtgcagttttccctatgcctcctaaaccaacaataggaagcacagaaaaagcatatgcatccgcagcactcagtatgatttcaacaatcttgtttttcgcttcgtctctaccaacaatgtctaactcattgatgaaggaatgtgtttccctggtattgctactgaaaaattgcgtatctatgatctcctctgttaatgcaaactcccttctgttagctgctatctcatcaagcttttgacgaactactgttatcttatggctcaattcgaatgggtaaacaagctgccgactgaccccagcatagaaaccattatgaaccttttgctccaaatctttggtggccacatcatccagaacatcatcaatgtcgtagacgacatcctttaaatcttccagccacactttaagagcacaagaagtagactgcttgcgctctgcatctttaagaacaccacagatggacttcagagatctttccaacttcctcacttctttcttgaaattccacgctgatttaatctcgctggcagcacaaaaggccgcttttccaagaacggagattgcaaaactcgatagatgcacctcagccatattttgcttggcaactgcacgatagcaagagcatcaaaacaaacatccatgagaggaaatctgatgtcataatactattacttttttttaattaaaaagaaaagaaccccacattacaatacattaatcagtaaaacctagcatgatttaagatttaagatcctggtaaaatcagactcacggaactaatcacataaatggatgccagatgaagacggctgcaagccctacattgcaatcaatccaatccacctgtggggattggagtggatctaagctcaaaattaaccttaacaaacaagcaaagtccaggacacgcaccaaaacccaccgcttcctttgcccccctcccgttcaagacggacgcgtcagatcaccgagcaccgccgcgtggcaggaagacgacgagaggggcggcctgcagtgacgccctcgggtttttggctccgcacagcttcttcggcctcacgcggtgggtggggggtgcggtgggcggtgagcggcggcgacgtcagctaggtcaaaccgcagcggccagcggcggttttttttcctttcccctttggcttcgctggcgtagagcaccggcgtccggctggtcgccggcgaggttgccaatgccggtattcgtcttctccgagtgtgggtggtagcaaaatgggcaagattaactttgtttttcactttaaatatcttggttgagctacagttgaaagcttgaattattttaagaaaataaatagaacaaccaaaaataatttatagatgctgtaatttaaaaatccaaaattaacctaatacatttttgtttttgcaagacttagtttaaatttaatatttagactttggttgtggctaacaagccaacttatatagtaatcggagataaacctattgtacgagagggatatgagtgatggtctgagagtatgagccaagtagatttttttttctcccatcggatagcctattaagccaaagaaaaagccaaattttgaattttcaaaattaagattgattttaagatatttttttaacgtagtttctttttcagcattggcttttatatcaccgagaacacatatataaaagttttacctacaaattcatttttattttctaataaattgttttggcttattagaaaaaagccaaacaatggggccctttgtgaatggaagaaagaagagagatcgtttgacttaaatttggagttgattcttgctttaaaatttatttagttatttttttagggtgagtttagtttatttagcaccttactaatttgggcaataattttctcttgataatgtatgacctcgattagtaatgtatgaaacatcttcgtatgtccccacaaatagggcaacaaaattcatctaagtctttcaagctaaaatcttagtcatcttagacattattttttatttactaacaaggtataagaaacaaataaatacaaatgatgaaggtataaatacaaatgatgaaggtgaaaacaactgtaaaatatatatatatatatatataattttattattggagtatgtatcaaatatgttttcctttccagtaactcattgcatcaattgcttatatgtatatagccacattattgtaaaatgtacaacaactcttaaatatattatcggatgtgaactaggttttataaactcaaaaatataaaccatatagacataaaagtcttatatttgttgaatgtaaaaaaaattcctacataacgtgttaacataaaagtcgatgtagcattgtcattaaacttacatcaactagcacgtgaaaccaaacccgtcggtctcttcctcctcttattcctcagtcatcactatttgaagtcggcatttcgattctcatcctcagtctctccggtcatcatcatcggccgcacagcaaaaccaccgtatcatgaccttgcaggcgccatgtccaaccggtcagaagagagagggggttctcttccatcatagccgatatgggagacgattttgttcagattcttcaaggcatcctcgaacgcttcgcggatctcgtgttcgcttcctactcttctccgacgagctaccgattgtgctgggcttctttgccgatcatgatcgacactgctgctacaaaaattcaaaaaggtaaaattccattttctaaaaaaaatagtagatgaacacctattcttttatgagcattagctacaacttacacctatcacaaaacaactcgttgcaaaaaggggagagaccaaaacttgattgctcaatgcaagagggaaggattgcaatgctcccatttgtacgtaatcctaataaaaataagaaaacacaagaaaggaaattttcaagttctccttttctttttctttggagcaatataattctctctctctctctctctttttttggcaccgctttctacctcctctactcctcttctttttagcgaagcaaaccctcacctcttctctactctctctctctctctctctctctcaagctcggcggaggcggaggcaagcaaagccttctcccctcgcctcacctcgcaatccaccttgggcgggccgtccggcgagctgagcgcggcggcgccctccttactcctccctccccacgtgcggccccgtcggagcacggcggcgacgaagaaccaggggggtgggggggcgaggaggagggcatcattccaccggctgattcattcttcttggctcgagtcgaattggagaggtatatcggctcttctctcgtaccgccgcgccactggagatggatggatgggcgctttgcatggctcggattagggatccgttcggacatggcttcatttctttcccaaattgacccgtccagttaattccgtcccggtttccttcttttttttttctttttttctttttttgatgtgtgggtggtgggtgcagcagtggtagctgtttttgtttccaaaaggtgattttttttttgggtggggggtgttgttcagatgaacacccaaatgccccgcgtttgggcgagcgagttgtagtgcttgttggaaccaaatctgtgatctttgcggtttatgctggtactatgtttggtgtgatctcagaaaatcgaattttatttgggttgcttttatggttggtaccgatgattttggcgaagaatcgtggtgtgattgtaggaatgggaagctttgatccgttcggtttgctgtaggagcatgcatgcttatgatctctcttggggttcctcctttgcaggtaattgcttgccttctgaggaactgcgggagggagcgaggagtcgtggagcgactcttgaaggatggcggaaggtgccaaattccatgggatcgttggcgctgttggcgcgcatgatgttggcgggaacttctgtgacatggggtactaccagaagctaggggagggctccaacatgtcgatcgatagccttaacagcatgcagacaagcatatacggtggttcggttgcaatgtcagtggacaacagtagtgttgcatctagtgactctcgtaccgggatgcttaagcatcctggcctcaggggtccagtcattgtgtctagctattctgtcgggaacagcattttccgtccagggcgtgtgtcgcatgccttgagtgatgatgcattggcacaggctttgatggactctaggttccccactgagacactcaaggattacgaggagtggaccattgatttgggtaagctgcacatagggatgccatttgcacaaggtgcctttgggaagctctataggggaacctacaatggaggcgatgtcgcaattaagcttttggagaggccagaggctgaccctgagaaagctcagttgttggagcagcaatttgtgcaagaagtcatgatgctcgcaacgttgaggcactcaaatattgtcaagtttgttggtgcatgcaggaagccaatggtttggtgtattgtgactgagtatgcgaagggcggatccgttaggaattttttgaatagaaggcagaataggtctgtcccactgaagcttgcagtgaaacaggcattggatgttgcacgtggcatggcatatgttcatggccttggatttattcacagagatcttaagtcagacaacctattgatttctggagacaaatctatcaagattgctgactttggagtggctaggattgaagtgaagactgagggaatgacacctgaaacaggaacttaccgctggatggctccgtaagttggcatacatgctctttatcttgcttattttaatcagtaattatctcaaattcgtattaagacaatgctgttttatttttcttcactcggcattacccaaggccacagtatttctcaaatggtaaatgcaacacatttgcagtccttgtatgataaaatgcagtaacctattcatgtgaattagtagctaggtatgcacatgtgttctaattacatgcaatggcactgtgccagtcctgttatccataatttatccttttttttttgctaaggctggttattatcttgaatgattcatgcatcgaatacttgagttatgtgaaaatgcatggtcatttgcatgtaaaacttttctactggtgctgcccataactgtaatattttactttttttgttctctgtttttcttattctcctctgaaatctagtttggcagatcaaattttataatatgtgaaacaagcatatgctgtgacaggagatgtcttgtaaattcttgtgtgtagcttcatgggttgaaatatatgaatgctatttagacatagtccaagagatctcattctaaaattttcattacatacctatatacgcttataattggttcgtgggtgctaatatttaataaattattgctgtttaaggtattggattgcattaaccgtgccctatgaaagcatttatgcactaaaccctcattctttgctgatagatgcacaaggtgttcatcttaagagcattgaaattgcagcttgaatcttctagtttagatgcttgttcaagatatatttgttgctaattctcggctacaaagaaaagatggcagcatcggttaactcaggcctatccttggcattaggcacaccaactatttattaggtgaagatggatcaattatgaataggattatttggatagggtttctggatttaacagacaatcaatactcattcaatgttgactaaccgggtagtctggatatcagtgccacataaggataatttggacaaaaactattaaccgtacaacctagtaacgcaaaaaccctagcccttagaaataatatgtctcctggcttccgtagctaacctaaccttaggtaaggcatgctaccagctagaatgttgaagacctgttttgccgataaagggtgatttcatgggtaatgaaagcatctgcacccccaagagagccttgtgtaggtaggaaagctttagagcaagagcagcatgtcaacatgatacactccatgcgattatccacaatcatcaattcccgtccatgggatctatgagtaatcctatcaaagatcttgcccctgccagccagatgacctgcgttggtcagccattggtatgatttgactggaaaaattgaaatgtgctccatgattgtaccatcacgatctgtgctgcttggataattaactattttcagtttaaggacccctttggtttgtaggaataacatagcctaggaaagcttttgaaacaaaggattaagttctatcatcttcctatagaaattgaaccatgttgcttgattcctgtgttattagtttctgcgttccataggggggctgagtcctctgctgacccatcacagcaaagcccttggcagtttccacgttctctaggtcatgatgctgtccagtagctttgccttctttcttgttcctaatagaattgtttatgttctaagacaagattaactaaaaagttgtgtttgaagtgtttgcgcaaaacaaacttgtgctttaccctttttaagggtaagcaactgcacaaatagtttcacctctcttaactatagcttaaatgcacaagtgtgttcctagctaagctaaggtgcaaaagatcaaaatgttcatgtataatgtaatgttgcttaaacagtaaggtaattgcatgcatgtaactacctggcaaaatgtgttatttgaagcaaaaaagttcctatgatgaactttctgctgtgcatgatgcatgaatagcgagtgttttgtgttacaatattagcaaattagcacaaagtggtgggttttatttaaaactttgcagagaggaaaagtatgctatttggttcttggtgcaaaatgctgtttatatctggcagatttactaactacaattataactagcacttcaaaaaagtcaagcttgagcttttattcactagtcttggcctgttatggagcattttctctcatagaaatagagcatcaagtttattcctttcttatccattagattggaccagcatattttcttataaagtatgaattagtgtttgggattatagtgcctatcctggaacctggataggtggataaattattggatctctatgatgttcatgttcaaatatagtgcagtatgctagaattggatcaattattgctcattgtgtttttttttcattggttctagtcatgataactttttattttgacttgcagtgaggtgatccagcacagaccatatgaccaaaaagtcgatgtctacagttttggcatcgtcctgtgggagctagtaactgggaaccttccttttgcaaacatgacagcagtgcaagctgcatttgcggtggtgaacaagggtgtccgcccagccataccccatgactgcctccctgccctcgcagagatcatgaccaggtgctgggatgcaaatcctgatgcccgtcccccgttcaccgaggtggtcaggatgctggagcaagtggagatggaggtcgttaacactgtccggagggcccgcttccggtgttgcatctcccagccaatgaccctagactgagtcacagccaggatccagggtggaaaaaggcaacctggagaaaagttaagtcctgtgtacctatcatattaataggcctgttctgcagagaagatgaaagcccaagctgagtgtacttggcgtcgcgcgttctcttcgtttaccctagacaatacctagtatctatcgtcagactggaatgtattagcggtagctttttatctttgacaacaaaaaaacaccatgcagggctcttgttgcaacaaccgcatgttcctgctgtatgttatctgttgtaatcatcctgcttggaacatgtgcaaggctgcaaggcttgatgcctaatagtatatatagcatatgtataattacctggcatgtgtcatacctgtttttatagttctggcatgtgttttttaacctgcttccatagttctgaacttcttattgatgcagctttcatggttaatgttatataccatgtactattaactagcatgtgtttttccctgttcccatagttctgaatgatacacctacatgcttaatggtatatatagcatgtacagttatctggcatgtgtgtttcatagtttagaatgatgccaagtaaatctgtcatggcatcacgccaatttcctccttgtgggttcttgagcatatcatggtatatcctgtgatgtgttcactagtttgattgctataataaccgtaccaaatgctttcaggtttgttcagtggatcagctgggttttcagttctgaatgcttcccaattaggttccccttgtatcacaagttgaatatttcagtcatgaagtaccgcgtgaccaaaggagctttgctacagaattgtgctacatgagagcttaagaagctccaagttcacaagaaaagaatggcgctctgcaaatatacaaaggatggaaccagagagacatgagactggaaagctaccggcagcataattatgcagcttcttatggctaaacaccaccactcacattgaacagcattcatgacgcaacacaagtaaaagcgaaagggaacacattgagacaggaaagaagattgacagcaagaatttcggaactatgaaattggaattataacctaaagggaggtgaaacaaagcctataatgttgtacaactgaagcagcagcaacacctgacataaccaacctgctcttttaacccttctcacctccataagagcatcatatgatccaactgctgctccaaattagtaaatgatatgggggagaaaatcgactgctttactccacagggctagcgttcgtgctcgccgttccatcttcagccttggtggttgcggtggacgcttcatcagctgaagaaacaccctcaactgcaggcttgctttcgccattctcagtttcttttagctggacagtctgaccaaatgtgtctgagatgtgggccataagttctcctagggccttattctctgctggtttctgcagctctgggctggcaggctgctgctgacgtctattctcctgcaaggctttctcccgctgctcatagaagtcaaagtcttcaagaatgttcgtctccgattcatggttcttgaagatagttaacatctgcagaccatgttccagcttcacctgcatgttttgtctctcaagttagccattttcagaaaaagctacattcactagatgtttcagaaaagcagagatctctacggaaagattaggattaaatcaacagaagctggcaaaaagacagcttttttacctcctgggtgtccctgctattagttacaggtttgttgtcattgttctcaagaatgatgtgccgcagcaggttgttcgggacatccttaataatgtgccacttcacagggaactggccactccacttgtcctgctgccaataatcgacacttttgtcaaaatcgacgggtccaatcatctcagctacaccacagaactgaccactgccattaacctgcaaaaaacgaggttatggatcaatttaaataaaatctttaaaaaatcaggacatagatcaaaagtagtcttatagaaaatcagctttttgttacttgctttttcccgtagtacagagaataaaataataaaaaaagaggggcttgtcttaccgagaaaaatagaaaaatagggcaatagtcttctttttctttggccaagcgataagcagaatccagctttctattcccactagctgtactggcccaaacattgtacttaatgctcctatgtacatggtcctcagtgtaggactttattacaaaaaattttgcatccttgtattcagtgacaaaatcagggcgattatacagttcactatcaaccagaggaacatttttctcatttttgtcatctattgaagagttctctgtgtcttgtttctttggttttgtagcacgtggcccacggttttgctcattcaggaactcaagagcaccattctgaataccaaatggcatgctccctttctgttgattggcgcttaagtcaaaagtaccaaatctgcgaccagaactccaacttggagtagtgcctccaaacttaccaccttgttggcgtggcttataggatccaggggcatacattgacccatgatgctgcaaaaacatacaccgtcagtgctggacaatgaagagcacaataaacattaggactgacaattttagttcaaccagtatttgccaaagcccaattgcaagaaagcataccattccaaaagccagcggtgtgttcccttgaccaaacaaaccaggagtgctgcttggttgggtggatgctgcaaaagaaattcatgatatgttaagcattggcctaatcaattattacaacagaaataacttgcaatcatcaaaagttcgacttgaagaacagcaaagattgaaaaggagaaatattacctctgtcaaaagacccgaatggttgatgataacctggtgttggcgagtagagaaggccgtcaggaaggaagtactcctgctgcagcataggatctccttgagacattccagtggcggaattagagtatcccatgctaggagaggctggtggctggtagtaaggacttgagaagggaaagtgcaatgggaggtatggctggccatctccaacgccaggagaataagctccatacatcatttgagggttgtttgcatatccaggagataacatgattgactggttgtcgttgtaaattcccttcagcaaaacaagattaagaaaactaaactatgaaaaatggaaaataacttcagtagtcatagtacttacaggtgatacagaatggagtccttccatattgacataatgggggtattcttcccattggcccaaatggttcaggtatcctacaggggaaaaaaaagcaaagaatattaaataataacacttccaaaggagttaccttgttaaagaacaagatacgcagattgaataatatgttcgcctctctctctcaagatttcaatagaggcagttaaacaatagtgagatcaaaatagtaaggactgatgaacacttaaaactgatagcaacaatcaatcatgttagtacagagaaaaccaaatttagagttaaatatctgaaactttatcttctaataccatggttgtgtacatttggggattaaattgtccaacagagttcaatcgtcaataataacacataaaaatgaatgtaacctaacctccagaatagattgtttgtggctgaggtgcgtacacattgggttggtagaaaggttgttctccacctttacccaaaaaactagccttctcctgtgcaccctttggtgattttgaggagctagcaccctggggaacactagtagtcattttctcatttgtactagaaagaatctgatgcagagaaaatcaaccattagtaaatagcgcgacacctattgtagggaaaaaaaactgataagacaattacctgctctttagcagcactcttggatgcgttgttctcacctacaatttctgattgtggtggaatcatgcaatctacataacaagcagagttacaaagattgtaacatcctcatagcggttatcaaaacttaaaaaatgagcgaagtaactccacagatatataaatatatatagaaagtaactatatcctacaaaccataaatgcatattatggtttttactccaccaaaactatcaactcgttctacatgagcaagcatttaataaacgctttacaattgcacatgtcctttcatcaacactgcaaatcagccttttgcatacacagcgcataaccaacatgctcaaatcaacactgcagcagcagcagcagcgacctattcaaatacctcctccgattacccagagtcgagaggacgctttagtcctttttaaccgcactagaattagtgaattaccacctacccgctcgtactcctaccggcgtaaatttccaaactacggaattattacttaattctcccaacttttcccccctcgatagcaaactgtcctgtacgcgttagctcccaggggcggggaggggaggatcaaacatgtgacaatattagtaccaaatttaacgcaaactaagagagaaaaaaaaaccttcccagatctagaacagaagctagggttcacgcgaattcgaggggagaaaaacagaaagagcgcgtgggtagagagagagatgaggaagaggacgatggaagcttaccggcggaagcagccgggcggacggcggcgcctcgccggatggagatcggcgcaggcggcgggcgaactcgcgcgaggagacggagtttgggggggagtcgacgccgaggggaacgggaagactttggtttttgacaatctagccccttttagaaaacttattttgtaaatagaccctcctaaaagctcgttttcgtggataaggcctttcagcggtctatctatacattaagctttttctaaaagggccagattgtcaaaaatccaggaacagctatagaccatgtgggccgcccggcacggcacggcccaggcccggccgtgcctgggccgaggcttgtcgggccggcacggcccgaccgacgcaccgggccgtccgtgccagcccacgtgccgcactcacggcccaggcacggcccaacacgcctcgggccgtgccgggccggcccgaaggcacgatgggccgtcgtgcttttcctcagaataagtctaaatttactccctcctattgggctgtgacatatgtacagctacaaaaagtctattttttctccctcttctttgggctggggtatataaatagctaaaataagtctatttaaggtccctattctttagacagttacatttatatgtctatttttagtcccccatactttatgtaccgggcctggcctgccggcccatcgtgccgggccggcccgaccgtgccgggccagcccagcgtgccggtggggaggcccaggcacggcccgacggtcgggccgggccagcacgggcccgacccaagtcgggccgtgccgtgcttgggccgggccaaaaaggcgtgccgtgggccgggccttcgggcctcgggccttatggccaactataggaacagcggaacgtggacgggagatacttgaccagtttgaccaggctaaacaatgattttggatacaattatgcttattactccgttcggttttttaattttctaacgtttgaggatgatcttactcctacttttctattttatctatactagcaaaagacccgtgcgttacaacgggaagtgtaaagatcagaaaatcaaggaaaagttaaaaaagacttatattatgtaattagttgaagtacaaatttccttaaaaatttggatattatttaagttggtaggtgtataattaaattaatttacaagtaaaataagtgtgaaaaaagttatatggttggatttaatttttcaaaattcttcataattaattacactctttgaaattttattgaaattttcaaaacttaattgctaattttgataatataaacataatttcagcatttattcttcaacccgcgaattgaaatttcccgttcgttctcttctgggtaaccgaaggtggagtgttatttgatgcggactctggatgatttgttgtgtgttggacttgggatattgcaggacaaaaattggttgaggacggacggaaatttcactggaaacctacattagattagagatagagaatatataaacgatgaaatcggatagaaattggaccttttttccggacttttttctgccctttttatatacaatcggacttttttcactctttttttcattttagacgaacaacggaaacattttcaaattttttaagtagtagagataaagattagccattttcgttttcttagggagtgctgtcacgaaaaacgtgttttttaaaacaacttttgtatagatattttttgcgaaaaaatgcatcgtttagtagtattagaaggaaagaactcaaccttaagggacctaaactgaacttattccatgcccatgaggcggcctgggaaccgcggcctgatgtgggagaagccgcagccgtccgatctgatcgacggtctagattgatccggatctatataaaagttcagcatcccaaccctaaccctgaaatcttttcccctccccctcactctctctctaaatgacggcgccaacggtgcctctccccctccgccatggcggcggcgccattccccctccccttcccccaccgccacgacgctgctcccctccccctcccaaggtggcgggcaggggcagcgccctcccctctatcggatccagcgggaggggaggaagcggcagcccgatgtccctgcgacgatggcaccctccccttccggcgtcggtgtttttgtgcttgtgatgttcttgtgttgtcgttgttgttgatgaaatatgttcttgtgttcttgtaacagtgttttctctaggatttggccaaatttgattcggactcgcattaagtgtcaaatcgaattggactttctttttttttatgttattttcgcccttttttttgttattacggacgatggaagcaaattgaatcggatttttttttaaaaaattttttttcaccctttttggttattaaggatgatgacacctcttattttttttaagtagtagagattagaaaaaatgcccgtgtgttgtaacgggtgaagtctatttttaatcttattattgttatatggtttagttaagatgaagttcactctggaagtttgcttggatatatatatatatatatatatatatatatatatatagaaaatcatgagctgcagttagcaatctgatcatctcaagttagcatgtaagtttttttaaacatatttcttatatggtttcttctatatcaccaaaagtgaacgatcttaaaaactgactcaaatatggatatgtatttccaaaagcaaacgaacttaaaaaccaatttatacacggatgacgtatcaaaatatcgacaaaaacatctttaatttttataatagtagagattaaatataatcttatcgtattttcaatcggtacttgtatgcagcttgtgtggttatagccatttatctcaaagcttgatatagccggttcaactcttggcacctcaatttatgcttcttttttttttattttttttggtgtgttgcgcgagctgcttggtgacgcctgtcatcacgtcgtcttctagcgcatggctcgacgtttatctcaccatgttgcacgagctgtttggtgatgctttgttttcacgtcatattctagcacaacctgacccggcccatggttatgacgctggcattctggcaatcacatcgtcctcctacgtgacgccatcacacaacttcttgggctccatgacgtcagcgagcggctagaggcaagccaaggtgagcatgcagccgcacttgcaattaaaatgcacacaggagtttatgcgttgttggctggttgtctaggaactcgttggagttgatgcactgttggagacgaaagcattcgagtgtatgcaagggtatagaagtccaaagtaatcattcaaatgccaaaacatcaagaattctcatgcaaaggacccaagcgtcaaacatcaagaaatatagtacctagggagtagatttttttgacagtatggtggtgtttgaaaatcctgaagataaagattaagtgtttcacgcaaaacgagatggtagtagcgtgtgattaattgagttttaattattagaaacttgaaaaatggattaatctggtattttagagcaactttcatatagaaagtttttacgggaaacacactgtttagcagtttgaaatgcgtgtcacgagaatctaaaatttcattcaacaattgttggacattcgaacgcagcctatggcttttcataacacgttgattatttgatcaagctgaaataagaacactcaattacatagtcactttcattttgcggtcaagcacggattggaataagcgccggtttgacatgaagttcttgaaaacacagggcatcgagataaaataaaaatttatatgcttgttattcatacatctggttaggttagagggtcaacctagattttcacgagcataagcagatcctagattgcacatcaagggtgctagccacatcctcgcgcgagagagagagagatcgaggtgctagcgcatagtgtaaccatcaccatgcgcaccttgcatctcagcacaatgaaatgtgtaacctatcttttatccaaaatcaatcatttcatttcgtttaattcgtagcacaccagagataaccatttctcaaattcctctttcttatatcgattaatgtgtatagctgttcttttca

SEQ ID NO: 9286 - DNA, 22708 bp, Oryza sativa
atgaccaaaaatgaaaaaaaaaaggttctagtgtgaaactttcatacttctatttattgcggttgaaaagcaagttaaatgataaaaagtgaaaaagaaaacgcaaactagttcaaagttttaatctgggatttatatttaaaatcagggcagctcatcagccaatattgctatttgcgacggcttggatacccgacactgtacggcacaaactataaattgtgacaaaaatcgtgtaatttgctgttattccattcacatcaggtcgcgttcgagagcgacacgaaacattacaaacggatacccacgtgctgcacacgagacactgcgagttagcagcgtcttagcgaataaataaagcaatgatgggactgtaacgttccgattttcgttcgggattaaaaatcaattaataatgcatttcaagaaattatattaaaagttaaatcaatttattcaagtgaattaatgggagaattaaaattttcccttaaaaatcattggccgggaatattttgcaatattctttgtgccctaaaatactctctgaaatttcccgtgaattttcggagctcaagaaataattttaatagcacaaatttcatttaaatcaattaaaataaaaagaaaacaaataaaatttcccctctttgtctttgggccgctttcggcccaagatcttttccccctccttggcccgctcgcccctctctccttcccttctccctctcgggccgacccctcccttctcggcccgatcaatttcccctcgcgcaaagtctaaataaccccctggctctcctccctcactccctccccgacaggtgggcccgacgaccccacctgtcaggtccttcctctaccttcggcctccagagccgaaaccgccattgccacccacgtcgccgccgattccgactcctcccgctcgcgccctcgcgcccaaaccgcataaaatcggttcccctccacctcctccaccaaatcccccacttttccccaatttttggcgccaaatcgagccccacttcgcccacgatgtcgcccacgtcgccggccgttgccgcttcaaattcgccacgtccggccacgatttctcctccccgagcctataaaaagcaccctcgtgctctcctcttccgtttccctctcctccccaagctcctcgttacctctcccgtgtttcccgcgcgagcccgcgctccgccgctttccgacgagctccggctgcacgccgccgtcgccgtagccaccgccgcgctgcgccgcttacaccgccggcttcaccatgcctcgccgcacactggccaccgctccatttgcacaaacctccgccgaaactccccttccaccatgcagccgagtcgccaccaccctaaaccgcctccagccgcatgtcgtcgccgcctgagccgctcccgcgccctgccaccaccgcagccggcttcgccgccgcgcgggcaagcccggccaccgatccgtttatcccctccaccaccaaaaaaccacccccaccgctaacctgaggccgacgctgcatttgccgcctccggccgcctcctgctgccgtcccagaccaccttaatatgcgttgtcgcctccatcggcttctccgtctggtgccgccccttcgccctcgccattcaccgccggagtcctctccttcccgtcgaggtcatcccggcctccgtccgccgtttcccgcccgtggagtcaccgcgggagcgccatcccgcagtcgtcccgaggagctcgccgccgcgctcatcgcccctcgccgcccggcgcacggtgaggcctccttcctctcttttcccttctgcctcccttgtccggcgccgcgtcgtgctgccatcgccggcggccgtccgcgcgtgtgccgccgccttgtcgggctggccggcgagcccgccccttgccgctctgttcgccgcccgtggaccactcccgtggtccgggtccacggtgccgccaggccgcggtggaccgagtccaccgtgcgcccgcccccttgtgccgctgacgtgcggggcctgcgtgtcggcgccggcgccccttgctgacgtcagcgaatgccttttcctttgagaaaataattgataattgcgcaataaatcattaataattatagaaatccatttaaatggctcaaaacttctaaaattcatatctaattcattcgaactccgaattgggccattcaaattgcaaaattcatctaaaattgagttctacatgtttgtttacttttttatgtactgtttgcttggtttttattagggtttttcctcgttttgcgtgccagcgtgtagaatccgtcgtttcggaagatcgcggttgcgaggaaaagagttcagaaaatccaagtgaagaagcaaggcaagtcacacattccccttgagcatgttgttcccaatttataaatgttttaccgtttgcaaataaatatgcatgttttgctaattacatgggatcagggtttacctatctgctcgcttgtgccatgtttacttgatatctgtcctttgtcaaccatgggtgataaatcgcttagcttgtgttactttgatgacctagctagaactatatgcttagccatgcttaattaccactagctcagtcgatgggataattacagtattagacattctagtatcttgttgagctgcgtgctcgagacatctggccatgtttcatagtcgtaattatccaactaaaatgcgactgaatggtgggctgtgggtgcatggttttgtgagtcgcacctatggcaattaaggaccggttcacgagaaaccctggaagacttacagcgcttgccacaagcgggagtgggtaactgcttgatctgaagtatagctcgaccctttcctaggcatcggtggcgagggtgggcgtgatggagttgggtcggccggggtgtccggttgtccagctgccggattcaccgcggcgcaagaggggaccgcccactgccttttgaggggtgggggtgaaaccttagcgtggtgtggatggttaggggagggttatgcgaagggtcttgtcacaatcactcgacatggtgacgtgtgcatcatgggcacatgatgacgcggtgacatgtcggtgggttgtgtcttgtgggtacagttgtgcacctctggccagagtaaaactattcgaatagccatgcccgcggttatgggcgatcgaccagattcaccgtgattagtctcacccttaataaatcgactcaatgcactgtagtacaggtgggttggttgggcctgttcaacgtggtgtagcgttgatcagtggagatctaatttttcttaattattcaacagttttactgtttgctaaataaaatgttttacaaccgtctttatgcaaatagccacaaaccgtccttgtatccctttgcacgtctgcatcattggtgtggcttgctgagtacggtggttgtactcagccttgctattattcccccttttcagaagtgtagtgcttctgagctgaagacgaagttggaagaccaaggctcagaccccagttgagttttgcctgtggagtggagctgaagccccgctaggatcgcctttttccgctgctgtcgttctgtttcggtgtgaggactaagtgcctcttccgtaagtattttacgctttatttacgtttggaactgtatattacttgtcgttttgtgtaccctagctggtcctggacagggatttaatacgtaaaatagtctggaaatttgggttaaatttctgggcgtgacaaggaccccccaaattgaaacgaaaattcgcgatgacacgcatccaattccagactccaatacaaatcttgatcgaactcctcttttgcaggtgaaatattttactctggtgactaataccaacaatttttccacacactaaaccagtaaatcaatggaaagaatcaattcataagctttgtgaaagaaacatttgattccatcatggctaccaagttagaaacaaacagtacaagtgtttagccctgggatcatcaagggatcacgaggtgtactcaaatggctggggtggcaggggctcctcgtcgacggccatggcggcggcgcctgagccttgctggccagcggtggcggctgcggcgttcgtcgcctgagttgccggggcgtcggtgaggactagttcctccgtctcggtgggcttgaggtcccgtaggaggacaaatccggagggcgccagcttcacaggctcgtacctgccgccctccaggaattttatgaacttctcctgggccgggacaacccgggccgggttagtcaggatctggaaggtcggttcgggctcaggggctttcttctccgccacaccatcgacctgaattcatggattgagaccagcatgagtaatttggagactataacatgtcattgtgtagcaaagacatgaacaaggtggcaaaaaaggaacaaggtaggtagttagcactgtagctcttacctgcattgaagtagaagcatcttcacttggtggtgcttctgctttctcctgagctttgctttcggcttccttctttgccctagattttgccttggcatatgttgataggatggccgtaggcagcttaactgaagcagtcgtggtttgttgggttgtcggctttgggtaatcaaagagcgatggtttagtgtttgacaggaactcaaacttcggcactttcaagtcagagttgaggccaataaaagccgtcggagagaaggccaggctgatgaaatatgtcagcgggtaccaataccagaactgggtgaagacggcaaggccaacaacagcagtcagcttgtcatgctttgacctggactgaagcctgatggtaacgttcctaccaccagcatcaaggataccagtagccattatggcacccattttgctcatggtgtcctcatgcttgtcgagaatgatcttttccaactgacgcctgaatgttccaacacgagagtcatatgattcattagtttggatcatgaccattgccattgcaatgagagcaccttgccgcacgaagtcaacaacatcagatgtaagaggctccaacaaggagatggcatcacttaatcctgttcctgcacaggatattccaacagctaaagcggcaccataacggacatgcggattatatgattcagagagcagagacacaattcttggagtctgcattgaaaataattctaggcaagtcaggctcaaattaagtgactcaaatcaaacaagaatcttgacaataaaaagaatcaataaggtaaagctaacctgctcaggctcattgtacaggacaaaaccaagagccaatactgcagtcctccggacatcgtcgctcacatctgacaccgcaaaatgaagaagctggtggatagctttgttatttgcagttcccctgtacgctagagccaatgcgtacataccaccataacggagtatgggatcttgatctctagtcatttgttcaatcaaggtgtcagcttcctcttccctgccataaactgtcaatgcaattccaagtgacaagcccctggagaaaagaggagtcagtgtatcagaacatgaacatatttaccgtcttgagaaacaaattcctagtactagattacagtgggaacttgcttgccaagagtttaaaaaatagttaccgaataattttctcatgctgtgtatcatgtgcataggcaagcatctctccagccttctcactggctgttccagccataagcaagcccatgccaatgccagcagcctcaccagccacagcactgtcagtgtaaagaatattctttacatcctcaaatatttcctcgtcggctgtgcctaaagctgcaagtccaagtcccagacaagcaccatgctgaacgacctgtacaataatatttgaaagtttagaatattttttcatgacagtgatagggactgtctaaacaaaataagagaccatgaccctgaaaaaatacctcagaactagtgttgcgaaggctctcacgaagaaattgtttgattccttcaccatggtttgcatggatcagacccagagcataaagggcaccaccttcagaatatggactaccaccacttgcagcaccactctgaggaaggtatggggccattaaagctctgccttgtgtgagatggcctctatgaatgacacctaatccagcagttgcactgaacttagcccagttggttgccctacttagccattcctgtaacagatggttatatgcaaatgaagatcagaaagggagaaaaatgcatgagcatagaactgcattaacaaataggtaaactatgaaatgtaccaagttttctcttaggaaggtatcaactgttgttcctgcatgcatgattgcattggaacatatagttgcactatgacaaacactattcctcatttccagagcttgttttatagtcttcaaaatcagaagatcagacctgtcaaatcaattaccaaaatcaacataagattcaaaacttaaatgcatgaccagctgcaataattttgtcagatattatcacattacttcctccgtgccaaagtgtaaagcatttttgaggttggcacggatattaagaaagtaggtgggaatgatggagaaaatgtgtgattggttgagaggaggtagttggagaaataactttattttgagacaaggtactattctagaaatggctatattttgggacagaggtagtacctattatgactgtataaaaactgcaatgtcaactgaatagacgtctcccctgacagtatccccttaattttggtcagcctatcagcgtgcgctacttcatttggatctacagtgtgcgcatttccatttggtgtgatagcatcatccgtcatttgggcatctccagatggttctgtagcagcagtttgatcgctaggtaaagtctgggcagaagtctgcaaactcagcgtgtcaaggtgatttttcacattcaggaggaaggcctggttttcattttcaacaagatcaaaagcaatttggaatgcaaggagagcatcatcctgtagagcaaaagcacatgttaggacaaataaacacactaagcagcagttaaacaactaaaaaaaaacacaagatatttccagcataccttgcttccagaaagcagcttgcccaagatgtttccaacagtttcaggctcacccaagaacataagacactggcaaatgcttaagtaatccggatttggcagtgtctggtatatttttacaagacatcggagaatctgaatagatcaaacataagttcttggtcattttatggcattccaaaatttatgaagaatgctgtatataccaataagaaatctaagagacagactttacaattgaaatctgccatgatgtaatcttacctcacagcgatattcacggtgactaacatattgatgagatagaatgatggaataagaaagagatccattaagattatcggatcgagatatcgcttcctctagcttatcaagtctcttgcattcaagagacatacccatggcctgttgatattttccatcaagtatacacctgaaacagtttccgcatcaatgagatgagaactgcatttaattacagatgagctactagaagatataagaggattctatcatacttatccagcattctctctacaattgcctccaatcttgggtccattttttcatccccttcacctgctgctttcaaggacttcgatcggatgctggcatattcatctaaagcttttgctgaagaaaggaacaaacaaattttaaaactatgtcaatattgtttctttggaacatgaaaataagaagattgcaatgaatttagtcaattcctcacctaaaagtgtttgagcatagtctgaaccctcggagggatcaaatagtggtccagcaccgagtgcgtaagacagagaatcatctaattcaccaaggtagtaaaacaccttggaaacaaccaatgctgccaactgcctctggtcgaattcctcatcttcatataagctctcactgtaacaagtatataacattataaaataagtaaccagaaacacttcatgcttaatagagaagtccttgaaaatattaagttctaccaagttattaagtgacaatgaataaagaacataatttccagaaactataataccaaattgcaactgccaaaacatttaatggacatgcctcttccaatgtatctagctcccattaaatcccatgaacaaatcataaacaagaaacgagacgacacatgtcttagctcaatgtttttacttgacaggacaagcgctaaagatcaaacaaaatgttcctgcgtatagtcttgcaattcagacacttcaaagtcaaggattatgcatattcctcaaaccaaccataataaacagaaaaaaagaagtctcaacctaggctccacctgctcgttttcagattaaaattatgcttcattagaacccttcaaacaaaagccttggcaatccgagcctaaacgcaaattatttttaaaaaattaatattttttctcgaccacagcaactcctcgaagaataatacatgaatgaaccacaacagttagggaagtttgagttatctataatccatacacaaagcctaggttttctagtaccagtgaaactaaccgcccattataatcccctcccgaaatctccagcctaacagatcaaaccaacctagggttcatccaaaaaaatcgccagatcgaatctaaccaggccaaacgacactaatcgcatgaatcctccctccacacggcaccttcctagccgaaccccacctctcatccaaatcatcatcatcacatacatagagcaccaaaccccaaccccccactccacgaatcgaaccgaatcgcgcgaaacgccgcatcgggcgcagcgggccggcggggagggaaaactacagctgaaggtgggtgggggtggagcaactcacatggcggggacgctggtggagatctcgggccagaagacgtggacgagggagttgaggttggcgagcgcgtgcagcttgagctccgccgccggctcctgcagcatcgccagcagcccgctcgccgagctcaccatcaccgccgccgccgccatctcccgcctccgccgccgctggattcgacgatttggatgctcgtctcgtcggcgctgcttcggctttttttgccttttgcttggaggaggggaagaagaagagctctcgccttcgatgggaggggcggagatgtaaatatagcaggttttggaggggctcaatggtgaaatccgagtagggcgtatttctccgatttttttttggatcgggaaaaccaatgattgaattggcacccggatacgtatacggatacgatgcactccgtatttggtggagtactgttcgtactcaggcctcggcccattgtccagagcaaaaccaaaggcccaatgccctaccgttttcacccgtgcatttaggcgcagaataagttcactttgactccctcaaaagtgacccgaatctaattcatggccctgaaccccaaaaccagatatcttaaccccctaaactgttaaaaccggtgcaatttgactccctcaacggttttggaggacgattttgctgctgtggcgcctaagtggcgacattgaccgagtattcgtttcacgtggtgttgacgtggcattagaattaaaaaatatgcgtgggacccattagtcattcacacaaagaaatgtgggcccactgacatgcgggcccacatgtcagtcctccgtgtctccttccttcctcctccttctctcccttctctctctccccttccaagccggacatgcgcaagggcgtggcggctcaccaggatccttgccgccgcgaccacatcgttctgccggcgccgccctgatgtcgcccaccctgctcctcgcagtgagccgcgccgaccacctcctcccccgctcgctacttgatgccgacgtcggcctgctcctgcccgccgccatccccattgacgcatcagtcgggaccaaatgcgtgagacaggagacaaagaaaggcagtggcgcagtgccctgatggttcggagaactcaatggtatcgtgagctaccgctactgcctttggctgagaagaggatgaggaatcagcaatcatagacgatgcctccagcagattttgtgcagatgttgcttgccccttctctacacacctgaagtggaagaagcaagctcaatgagtagaagaacaatttatatgaggagatgcacaatccatattaccaccgtgaggtgtaagttagctcacgaatgtgattaagcgttacatgatatagcggtataatttgcaaaagagatggatatcacagccgaacaagtaacatacagattaacaaacaagtaaaactagtacaggccaaaaatttatctgtaacttgcaacatgaatccaactgaaatacatagggaactatacttgaggcttctgttcccaaccacccaaaaatcatagatagccccatcgacaatcacttggaacatagcgagcgtagcatggagatggcggagagtaagaagcgcgggattagggattggattggtgactcccagcggaagcggaaccgcaagccaggccgactgttcttcctcctcccgctctcctcccgccctccgcggcttcgccttcgcggccgtgaaaccgacggaggcttcgggatgcggccgcggcggcgagaaatgaactccggcgaggggaaaaactcgaagcacttatcggtcagatccccgcaatgcgcgcaaggttgttgcggttcgccaggatccccccgccacaaccacatcgctctgccggcaccaccctgatgtcgcccaccctgctcctcgcggtgagccgcgccacccacctccttccccactcgctgcttgatgccgccgcttcctctaccaccgccgccaccggccgaagagaaagaagaaggggaaagagagagagagaagggagacatggaggaagaaggaatgagacagggaggactaacatgtgagccccacatggcagtgggcccacatttctttttgtgtgaatgactaatggatcccacgcataatttttaattctaatgccacgtaagtgccacgtcaacgccacatggaacgaagactcggtcaatatcgccacgtaggcgccacgtcagcaaaaccgttgagggagtcaaattgcaccggttttaacagtttaggggtcaagatatctggttttgcagttcagggtcatgaattagatttgggtcacttttaagggagtcaaagtgaacttattcctttaggcgctctttgtttagacttataagccaatttataagtcgaaaagtctaaagccaacgtggaggattactaggacgggattcagggctatcaccacctgccgcctacatttgacaaatctatgggatacacaacaaacaaatgtagtctctaacctaggcaccacgtctaagttattaattattactctaatacttgcgcaggaacttccttctttattcagagtcctagtcctatagcacttagtacgaaatactaaataatgaacccacaaagatggaaatctatcttactcagactaagtaattaaataatggatatcatgttttatttcattatatgcaggtattgacggtcaaatattatgatttaaggaccgtcaagagtactccgttttcagccccggttggacgaccataacaggttgttgtaaagaactcggcaacccggagtggtctttcgaagtaccaggaggacactattagggggtattggccacacgattgtatactagtatatgtaaattaggaattgagtgcatactagaagtatatgaattaattgctttctatttcttctcccacttagttataaaattaattatcatgaatgatttgaatgggaaaaacgataacctatcatgataattagaggaaagggcagagccaatttcatttgtcatgataatggcattttaattaaaaatcctcatttcgttatttgtgcgtgcaacatgcgtgggaggcgcgcacggagtccaggcatgagatggcaacgtgtggttcatcggacgaccagaaaatttggctgagataatttttttttcagccggctgttatctagtcccttgttgataaatttaccttcggaaatttaacaaatataattataatacaatcataatataattattttataacttgcacgtaactacaacttgttgtaacttttcaaaaatctcaatgcaacatgctattttcataaaaagagatcatgggactccaggtaaaaaaaaaagtcataggaccgaatcctctctcatgtacatgtgctgtgattttttttcttcctcacttgtaaaaattttaaaacaaatctaactactgtgattggtacgcggggagcacgtccgataatatttgaatgcaggatgcgaggcgataaacaagataaacaaaaacaactatttttcgtgtttaaattaaattaaacaagagataaatacatgatgattaagaggataagctaaggatgttggagccattcagaacacgggcaccaccaagtgtatgaacacggcgaggatggcagccatgacgccggcgaccctaactgttgccgccatggcgacgccgttggcggtgggcgcaatctcgatgatgaagcggcatgacccggcagaggggtcgacagtggtggtggtggcgatgcccttgaagtcgcaggcacggtcgtcctggtcgttcacctggtagtagctgttgaacgcgtacgacacgttccccttggcgtcgaggccgccgcacgacgtcttgtacccgaggcttgtgcagtcggcgagcccgcacgcgtagctcacgccgtcgccgaccttctggtcgacgaggctcgccgacggcttcatcacgcaccaccgccgctgcaggtaggtcacacccttcgccggcatcagcgtgctgccattgccattgccgttgccgccgccgcgaaggctgagagggtacttgggctggccgtcgtagtagaagacgccccagtggcgctcgaagttgcccggctcgatgctcttctggtcctcgtcgatgaggctgaagaggtaggcgtcgacggggccaggccggagtggcgtgccctggccggaggcgatgtgggtgaggaacccctggttgaactgtcgtgcgtactgcgggttcgcgttggcgtcgccgtcggtcggccacccgacctcgccgacgatgatggacacgttcgggtacccgttccgccgcagcgccgccaccagcgtgtcgtggttggcgtcgaacgtgttctggtacgtcacgccaccatccaccaccggcgccgacgagccctgaatcaaagtagggatgaaaacggttcagaaatggtcggaaacggtaccatttttctattagttcttaaaagaactatatcaaatttctattagttttttcttgaaaatgataagaataattactatatttatgaatttaactatttagtgtatcaacgtcaaatcgatactgaaaaaactatattttaagaatgctaacgttagtacgatcgaaaaattttcatactattttcacccctacctgaaagaaggcgtagtcgagcgggaagttggggtccttgtagaggctgatgaacgggtacacgttggcgacgaacggcgcgccggtgtcggcgaggaactggacgatggtgagcatcaggccgtggatgtcggcgcggaagtcgccgtcggagggcttccccgtcggcgactggtacacgtcggcgttgagcggcaccgtcaccttcaccttgtcggcgagcccggccttcttcagcgctgcctgcacgctctgcatcgccgggaacgtcgtgttcaggtacgtcccgttgaacgtctccaggaacggctcgttcccgacggctacgtacctgccaaccacaatccgtcaggaaaattaaaaaaaaagcatcattttttcatcgagtaaattctctctatatatggccctattcttttctccaacaaaacttagattaaattttggatactcgtgaaacgcttttcaaactgctaaacggtgcgttttgtgcaaaaactacatgaaagttgttctaaaatatcatattaatccatttttcaaatttgtaataattaaaactcaattaatcacacgttattacaacctcgttttgcgtgaaacacttaatctttattttcatcttcatctttaggacatccaaacactaccgtaagtacttaaaattctactcttacgaacaagatctcaagcgttgaatttaattagctggtagctataaaagttcaatttttttaaagattctagtaaagctttttactagtatcgtattcattttcatcaaacaaaaaaaacattattacagcagaatattttcagagaattttttttgaaggtaattgatagaaatccggtttctatatctattcatggatatacacagttaaattttcagagaactaaaagagattttaagatgaagaggtggaagattatttgaggcaaggatcacttcagcacggttagacatctgcatcagacagggaagcatgaccatgctgcgaagaactgaaaatctccatataccatatgaatgcctctgtgccaggcattttccactgaaattcatgacgctagaacgagaaaaattgtggcatggtcccaagttcttgtgaccatcacaattaattatagccccacaataattttgttaaatcttcaaacaaattggctctagtaataaagttgaatgattgaaacatatcaggttttaataacctatgaaattcttttgttggaattggtcagaatttagaggcttctaggttccaagcaacccaaaatttcagggctataaaatatatttttttaaagataaggtgaaaagagattactttcagtaataagaaacagtgtggatgaaatttcaagacaagattaatgcagatgtggctactggcagcagctgcatgatctttctggatggctggacaagatggtctagaaaggcacaagagagattgtgatttgtgagagactattcctaaaccaaaacgtgtcaaaacctctcaaaatagttgctgtgtccttcggtttcttgagctttagcctttttcccctgaatctgatttcatcactgcccatacatgtcccaatcacagaagtggcaaatcatgaacaccagagataatggttttctcaaagctatgtgtgatgtgtgtgtgcagtagcactgagcaaaagagaaagagcaaaaaggaaaaaaaaaacaaaaaaaggcatgcatccctgactttgattttgatatgccatgcaggattattgcaattgaactgttggaacaacagaaagaattttcagttgcttgtggctatggtcttgccaataaagagaagggaaccttaactttttgtgactgctagatgtcctgtgaagcttctacaccagtgatgtcaaagaagacatgctcattttggttttggtttcaggaactctacagtgtgacagtaacactttgctagttgctattgcaggcttgcagtgtcttgagagtgaagtaaagtactaatgccttagcctaaatgtgatgttaaagtttttatttgtagtgttcagtttctcaaattagttaacctttgtttttttaacttctacaacaaacaccaagattccaccaaaaatatgtttgcaccacaatatatatgatactcttagaaaatatgttgtctaaaaaaatgataatctctccttccaaaaaaatacaaagatttatgtagttctacttgggtattaaaaaaataggttaaactaaataaaagttcgttatgattggttaaaatgagaaaatatgtatggtgttattggttcagataagtgagtttatagggaaattgttatatttcgagatagattttgaacgctataggttgctatattttcggatacaaactaggccgagttatttcccccactttcccaactcacatcgcacgtttttcaagctgctaaatggtccgtttttttgcaaaaattttctatacaaaagttgcttaaaaattaaattaatctattttttaaaaaaaatattaatacttaattaatcacacgctaatgaactgctccgtttttcgtgaggaggagttgggttcccaacccgaaggaacacagcctaagagcctatctttactgttcgtagaagccatctggagcgtccgtttccaatccaacggccaagcgtttcatcgaaacaccttgcaattggcatcacgaaaacgagatatatatatatatatatttttttggcgagctggggtactgatcgagtgtctgacctgatgtcgacgccgttgttgacgtggttggagacgttcgtggcgacccagtcgtcggcggccttggcgccggcggcgaggtcggcgagcatgtcgttggggatgccgaccatcacctgtatgcccgaccccttgagcgccgccaggatgccgtcctcggcgtcgaacagcttcaccctgtcgaacccgttgtccttgagcagctgcaccaccgtgctcgccggcagcgggtggctcagctgcgtgccccagttcacgccgatcccctccgaccaccgcgccatgcacgccgccgccaccaccaccaccagcaccagcctgccgccggcgagcggcgccggcgccattttgcttctgcagagtgtagttctgatcaagaaatgaggtgtttcttgggatacttttggggattttgtggattgtgtgtggtgttaatcttggatcaggaatcggtcagaaaaggctgggagagtgggtatgtttgattcttggagatgatcatcaacagcctcaaaccttgtgacacaccaaaaggttagaggaaagattgatcgatcaagaaagaacttatatatatgtggaatctgatttgttcttggtacacagccaagtgccaagtgtaccaagaacagctgaaatggaacaagagaagtgaggaaaatacacagcaatcagcaggcaaattcagagacctcaaactaactgaaattcagagaaaatttccttgtgccaaaaaaaaacaggaatcaaacaccagcaatcaggaaacaaaaagggagctcagaaatgagaccacaaaatggtggccgatctcttctttgaggaagcttgtggggggtagcagaagaagctgtctgcactgatcacagcctcacaggaacaagagcatgacatgacagggacaggaggaggaggaggcattaataggtcaccacaagtggaggttgtgctgcaagcaagaatcctcaaaaaagggggaaaccaggtgactactagtattaaaaattgcagagatgaacagcaggggtgtacttacatgccctaggttgagatcaggtgagtgccaggttagtaggtagtagtaacctacaggaagatcacagcaataagtaatggacagttgactcatcaccagcatttccaggaggagaggcttgccaggtgtaggagaaacaaaacaaaaaaaaaaggctatggaagtatggatagcttaagagcaaggctaataatacaaccgacctgttggtaaggttattagtagccttctcttagagcacccgcaatggtaaagtaaggtgctatctataaaacatgtacatctcagcaatagactcgattaatagtaaaccaccttaatagtatgtctacattggtatctatagctctctcatgcattgcctcgtttttctctatagactatctctaagttagtagatagctttgctctctctcttcatttaatacattccaagtaggaaaatatgctgacatggatctcttgtagagagcctatagataaccattgtgggtgcccttaggctacccatataatagttagctctttacaattaatacatggtccacttgtctctctcacagagcttcttggttcttgtgtccaagccgactgtaagtttacagccggcttctcctctctctcctttcttctctcctccacctcagtatttagccggcttatagcctactattatacttgctctaagaggagatgaagttgtatccacagtggagcaacgtgtggcagagccgcagagatcacacaatcatacaaaggagtttggcatgatatctctactatggtaaaagctcagtcgcctccttccatctcctcctcccatcgcgtgatgatccaatgctttatcttcaatcaccctctagctcatccctaattgtaatgtgggtctgttactagtataaaactatatatatgaaaaggaaaaagaaaggatgaagccttaggctgtgtttgcaagagcaagttcccaacactcccctctcgtttttcgcgcgcacgttttttaaactgttaaacgatgcttttttttacaaaaagtttctatatgaaagttgcttaaaaaaattatattgatccatttttgaaaaaaaattaactaatccttaattaatcacgcactaatggactgttccgttttccacacgcactaacgcgcactgttccggatggtaaccaccagcaaccaacacagctttagtgctgcatatgtgcaacctcctcagattttcagctgtgtttcatgtaagcccttttgaaagggaaaaacaattgctcaaaataggggtaaggttgtagggttttttttgggggtgactgaagggtatggcaataatttcagtgtcaaaacaccatagaacatttgatcatataaattagcaaggtgtgtattgattattgaagggcagatttttactttggagttatttgactggggatgttaaatcatgagttcaatttgaatggccatcgatcagttaacatcagaaaacgaggcagcccttctgaaattcttgaatttgtgtagtgatgatgagcatataaagcatatgagcaggaaaaggcagccagcaatatcaaataaatatagtatgaacaaaagtgaagtttgttgtgcctttttttttccttatctgtttcttacctttctctcatcaggtaaaataaaatagaaaaacaaaaagagaagagggcaggagatatgagcagagcaaccggctttgcttcttccacttctactttatcctgttttcttagcattagtgcattgttcaccttcatcgccatttgacaacagcgcttagttttttttttaaaaaaaaagaaactgacaataactctccagtacattacttaactcatcgacaataggaaaaaaaaagaaatgtatatggtgattaatcaaacactcaaaatcacaattatattttcttctagctaggagaagctcagatatatttgtttcataacaaaggtgaggttgtcaagatgataggtgacaacagggagtgatttgtatgaggaaaagggatctggttctggagtggcaagggagcttagtatctgtctaacttttttcaaaactatatatatactaaacaaattagaaagcaaagagagcatctccaatctgtccatgaaattcttgccttgaacaagggagaggagcatcaaggtgtttggggcagtgcggggagtaggatctaatggctcgactagcagctgtcttaaatctggaaagtgtgtggttatatattgtgtttaaaagcactactactatgtactacctccgtcctaaaatataaaaatctaaaatttgatatgttaagatacgttgtactaggaaatgtctcatccaattctaggtttttatattttaggacggagggagcagtagtattagtaactattcgcatgtgaaatcttctgtactcctcttttccaaattacctgttgttccagttttgtcctaagtcagtatttgtatctttgatcattagttttccgagaagagttcgtataatttaacatcataaggtttgtaattttaaatttaccatgagaaatacttataagtttatatgttgttaaaatatatgaatttatagaaattaatggataaagatattatttgacttacaagaaagctaaaaataaaaggtatgatgaaaaaaataattttgtttttgggcatttgcaggtaatgcctcttaagctgtgtttgatatagctgttgttcttagctaattagtggcacgaaaaacgagacgatccattagttcaagattaattaagtactaaatattataaactttaaaaatatatttgttgatttataaagaaatttcaatatagtaagtttttctataagatgtaccatctaatagtttattaagtatgctcatcccagcactaccttagtgcagtctcaatcctctacctcagttagtttccatagtattaaaatactaccatataagaaaaaaaaaagccaaggtagtaagagagttaacgaggagagaggggaaaaaaatatgaagaaacagctctacgcaaaaattaaaaatgaaaatgaggagatatgtggatgaaagaagagagaagacatgtgatagaagataatttattgtgaaaaaaatcatccattgaatatatagtttctatatataatgtctatatgacatggtgaatatgaaaactattttatagcttctatattgcgattgcccttggaatgcatacttagttatatactgtgcatatcttacggaaaatataaagtaaatcaattttacctgaggtaaaatatcgtagatgtagagcatgctatatcaagtgtgcatgcaaaaacgtatttatgcaccgtgaaaaacttgttcctttaaaataaaagagagtgaattgcactttgggccggctattattgcatgagttatattttagactaggttatttctaatgttatcactttggtccaggatttcttaccctctattgtacattgaaccactttttttgtctgccactccttgatttcattagcaatcttatcagcaacacaataaaccaatcaatatttcatctaaccttgatttctttactccttgatttagctgcttgacttctagtttttcccttaaaaaatcatgtgagcttagaacaaatcactctattgagcttgcattcggcagctacaacagccagcgatcatgaggcttggtttttgttggctcctcaagctcgggaagacgggaacagagcagagagagaagggatcccagtgctatgcttgatcatctattcatccttcagatccatggcgcaggtgcttaatagaaaaaaaaggaggaaagagaagagatggagaagaagggtggtccaatttaaaactattgtaaatttatatagtccaaaatgataagataactttaccccttgtccaaagtaaaattttggtaaaattttatagcctaaagtgcaattaactcaaaaaaaatatatagatcaggtatgacgatcacaattcatgttgaagaataaacaaaaagtaaacaagaagataaatatgaaatcaacagtaaaggcttatctttgttatcaaactagatgatgccccgcgctttgctgcgggatgtatgttacatattggagaaatgatgaaatgatttggattgaaatattatgaaaataatttgagaatgatgatttagcatgtgtatgcatgtttagttttagaatgaaataaattgcagatataattactatatacttgtatgttgagttttgtgtgtttaatgggttggtgtggcatgcttgcatgtaggttttagacatgctaataaatactatgcttgcatgttgagctttaggtatttagtgggcagtagctttatagaaaaaagggattaaatcattcactctagctacaaatcatatgattctccatggagggagtaatttcacataacattgtttcttttgttttgcactcacctttagctagtgaaaatgatagtatttaagaaagggagaaatattttttccaggaagaggaatcacattttttttttgacgagaggaatcactgatttagtccctcaagttccttgcagcaaaatttttccacctgggaccctaaattttttgttttgcttccatattgttgattctttcttttacatagttccatattgtcaattcacattaaagaaaaggaggaaaaaggagaaagggtgcacattgagtttcatatgtaggggacccactgctacctaagagcatctccagcaataggctttattttaaagcccctaaaagttaaatgagggctacccccatcttccaaggatccaaaaaatacctctaactctagcaatagcccctatttcttagtccctactcatgtttctcttttattttaacatgcaatccttgtttacacaatgtttaacaccacaataattaaacataaatatttctaacgcgtataattgaaccatagttaaatttacaatttcaaacgccacaattcaaatccaaaatcaaaattttcaaacatgtaaatatggtgtgggcagaatgccatatacaacaacatgcaaccaaaatttatagttcaccaatgaaaacgaaaattgctcaccaacatgtcattgtctgtctccatatcaccacaataggctatgtgaacccagtgatgcattatttttttttgcggagatgcactatataatttaaaaataacacaccctacaagaatgaat

SEQ ID NO: 9287 - DNA, 32354 bp, Oryza sativa
  unsure (1)..(32354): unsure at all n locations
ttgggtgatcatacttgcatgcaactccatatctgcaatacccattttgggcatagtatgcacaaggctgagccccctgcaagttgagataacacaagcagcttagcaagaaaccaaggagcattttctctacaaaaaagcaaagacaaaaacataggtctatgtgcaatcaccaatcaacttcttccaaacatactatgcaagcctgacactatagatgattaatgcacgaatgtgctgtctcctagcataaattttaagaactgtgtaaaccttttgggcagtgcaaactaattcaggatatcacactgaaaaacaattagtatgagtttgcaactaaagaaggggatcttacaagacctccaaactaattatagaaaagaaagtaatatcaccaatggatatttttaacaatataggacatatttccctacaaagcaagttaaatcagacactagcatttgaaattatgcgtattaggctatttaaagtccatgtatctgttgaagtttgcgcttcactcagatagtgatctctgatttatgggaatatttgggagcccctgtttctataacttgctgagttacactgacgtgtgggccaaacatggctcatcctcacattcaatgttattttcaatttatacatgctcagtgttattgagtaagttttccctctgaaatattataaatgcttattaagtcaaaaaaaaacattatgaatgcttcatccaataacaatttaagctgcaaatagcttcaaaactcaggagctaagtttgaacaatgtatcttacttgatacattcaagtttcaaccaatctttggcccataaaagttatatactagtagatgacaatataacacagttaatatttatcagctaaccaaaattattaagtaatcaactatgttccatgatctcataatccctaaatactcagcataagaaagcttacaatgcctaattgcccaataatctgcttcttctttttgtgatacaaagaaagatgcacatgtgcacacacacagaaacatgagcacatgcataagtgcgcctccttttaacacatactcaaacacacaggccaaggatanatccatgaacctcaataaatttcctagtgaaagtgcacatagagaacattatcgttaggaggcttcaacgagtagtggacataatcatatgactagttcctacaacctgtttttcaaaacaaaaatatatgtgcagcttttttttttaaaaaaaaaagaaaaaacatggacattaggactatggaagttcaaccccactcccaaggacattgatgctacggtacgtattagaggtttcagggtactcaccggacgaagtggaagacaaagggagttgaccatatagcctgatttaggtgcactcaactctcgggggtgatgatatttacatgtagctccaaatttgcaatctcctgttctcatataatattgacaatcaggctgccctggccgctcagggaatccatgttcttgttgattgttgcttgattgtccagttgaggaagcatatggaacgtaaggaccaccataagcaattgtagaggaagatccatggtgccccatgccgtacacaggtccagcttgaacattttgttgagctccacctgacactacagggtttaccgaagcctgtataaaatagaagagttaaaaccacaatgagaagactccatcatggcatgtgtcaattattttgtcccatctgattgtttgcttaacacttaaacactggctggttattcaggcagcacatcagtgagtgccttccagctcttgcctaaaagacaataagcacattctacatctttcgtctagattacaaagaacctgcttcacaaatcatgacacaagtatgctgtcgtgcctcatttgttgattcactttgcatttcatagtataagttggctgtcatgtccaatttgtttatcagttttgcatttataggtatgctgtttatttttccacaatagaacatgtaattcaaatcaattaccggataagggctccatccttgcaatgggatcattccagatgagagcatcattggggtgtatgagcctggtatatatgatccaggaactacaggtggtctccccatttgccaatttgcaagagaagcatatggatgaggggaagctatagatggagactgtaatggtgggtatattccaggggtcatcggaacaccaccgaattccggatgatggaatttacatgtagttccaaatttacattgcccagttttcatgtagtaggagcactccttctcaccctgcattttatttgtaccaacatctctttttcaaaacaggaaaaacaagtgtatgaataagcaatattttacgagagatttcacaccaggcgtatagggaatccactgttgtttaacataacaggtagcacagctccatcttgcttaggatggtgatatttgcaattggtaccaaatttgcaagtcccagtcttcatgtaatactgtaaaacaaggaaaaagaattaggaccaacatttacatgtcatatgacatgacattaaaattgttatgtgcttaacaatctcagccaattattatttgagtattatgttgcatgccctgcctgcctgccagttagcaagcaaagaacacatggtgttaatgcaagcttaagtgatggcgggtgcctttttcgttgcataaaagataattgaattcaagcaccaagctgtttagtttgagtacctcgcatataggttgacccgccctttctggataatccaatgctgctgcattccttgcacctccaccaaactacattttgaaaaaatagcaactacttaattttgatgttccaaaatcaagcgaagctttactacctatagactagcataggcaaatatggcatcccatgcgcacagacaaactaatcaatttcttaacgaaaacagaaacatggaaagtagataggctatcaatagacatgagtttcataaatcatttagaaagatcacagttgcaacagaagaatgtaaacttataacaagaactactgaatagttgctatatcttttgcaaacccaacaagtgagaaattcacaaaatcaggatagagggtaaactatcagccaaaagccaaatatgctaaacaaaggactttgctaaccaacggtaagaaaacaggcaagaaagattttcatgtcaataatcattgatcctagatgtctttgttgacacatttgatttaatcaaccaaattaatgacaacggaatgggaaaagaaggatattttttattatgttatcagaatcaacaactgatcttacttaaagaaagattgagcacagaagtttgccatctgcagatgcatgtagtctgacccagtacaatacaatccaattaagcaaaattagcaaacacaaaacacccaaaaaagcagaataagtaaacatgaagcggccaataaagcaggcaacctacagctttctgctttcaaagggatatccaagtgctttaacttgcagaggtgcacctccaccgcgaacccaaactctaatgctgctacccgatgagtgctaccgatgcgccggacaagatctaggcagtggcatgcccaattttcaagctacagaagaactacatttacattggccgaatcaatgttccccatggcacgatcctcacttgggcactaagctgatcacatggttaatccatccaccctagagctgcctcatccacgcacgcgcgcgcgcgcaagccgcaacgaaccagatcgggaagggaagcgcgaattaggagactcacctcagtgccgccgcgatcgcgcgggtggttgtagcggcagcggtcaccgaagccgcacgcgccggtgcggaggtagtagacacagtcctcctccccgggccgctccggcagcctccccgccgcgtccccatcccctcctcctccacctccacctcccccgcctcctcctcccagccccatcctccacatcggccctgcaaccacaaccaacaaaaccaaaaccaaaacgcagctgctcatccaccacccccgccacacagatcccgcgccacccccgtacggacgccgagatctacatcctcgagctccaaacacaaaaaagcacacaacgagcacgcacgcacgcaccttccaggccggtgtcggggctagccccgccctccccctcccctccaccagctgcggcggcggcggcgtgcggctgctccatgccttcgtcggcgtcagcggcggcgatcggggcggggagcgatcggagtgggaggaggaggagatcgggggtgaggttttgtttcctcttattctctctcctctctctctctctctttctcgcgtttcctttccttccaccaccactctggtgtggtgtggctactgctcttttctctctctctcctcgttttttttcctccctttccttgcctttttttccgctggttttttgcagcacctgtccgggtttcacacggggttggtttcttctgtttttctctttttctttctaaaaaaaagaattcactttttattagtatatatactactctctccttttaaggttaaaaaacgttttaactttggtcaaagttaaactattttaagtttaactaattttatatacaaatataataatatttataataccttaaattaataattgaatatattttcataataaatttatcttagattgaaaatgttattgtttttattttttaaactgagttaaacttaaaatagttcaaaacgtcttataacctgaaatggtgagtatctttttttgtttttcttttaaatttaatgggagttgggatgggggtgcaaaggaccacgcctgatcaaggggtggatctatcactcacttcacatgtggggattgatggtgattttttttttcctctttcttcgttgcataaatgtggggggatggaggcggtaacggttggagttatattaagcttcatttgctttttgctaggatgttttatggtaattgagtgtggggtgtggaggaggtgagttatgtgataattacttcgaggtatccataatccatgtcatgtgtttgggactatcctattcgcgtgaccgaaagagtgatatatgtgtgatgcatgtcgctggcgtcatggaaatagtggacacgagcaagcgggctgtgtgtttgtgtgtagtagaggccatgtgttgtttttatgtgcattgttttttgcttattcgtgtgaccaaaaaggtgatatatgtgtaatgtgtgtcgctgacgtcacgaaatggtgtaaatgggcgtgctttatgtatttgggtgtacgagcgatgtgttgttttttttgtcatgtcatctattgtttcgcgtgttatctctgggtcttgattgtgtcctaattaaattttctttttttattgttatgtattttcttcgtaaccataaaaggttaatttgcacgtcataaatagatatatgttatgttgagttttggttatctcgttgccgcatggaccccgcattcctatggtaacctttaatagccgtcatcggaactacgacacggttgatcacatccttgtgctagtcatgacgttactagcctacacgtggacaaaaggatatattaacagggacgacacgactaccgtgtactccatacatctctaattcgatttatatagtttatactacataactacccgcgtgttgttgtgagagtttagtataatagcaataaatacaaataatatgtgagaactagatgacataagtttatataagtcgatgtaatttacaataatttaaaaagtatatagaatggtgttcaaatgtaaaagtaaagtgacgtggctttacgagaaaaaaaaaagagaacggtagtttggactatagattaatcatctaagagctaaaaataattgtgatgatatggttttatgagatgagaaaatgatgaagataatttagaccacagattaattatttaagggctaaaacaattgagatgatatgtcttaataagagaagaaaaaagagagataatttggaccatagattaatcatctaagggctaaaaataattaatatgatatggtttaatgggagaagagagaaatatcattaactaagtgataatgaaaagatatattgacatattgtgtgaattatgtgtgatgatgatttaacatgcttgtattttaaagctctgaaatttaacaaattatagaattataaataatatatcatgcttgtataatgtttaaaatataataattgttaatgaattatgatgtggtattttgagttttagaatttagtggcttataactttattgtaaaatatgatactcaataaaaaaattcgcaatcctgcggtaggtgttgtttttacatatgcgtagaatgagatgtaatttagcgctaaaattagtttaaaaattaataattattaagcacatggtacggcatgactctttactgtagtacatggcccaaccaaccccaagtctcttattcgcttgtgatcaaatcaactatactcacatgtggaaagcacgcttgttttctagcacaacgaactaaggaataattatttccctacgtctcaacggcaaatctaccacgatcgattctcttccaagaaaaattaactagtctaatccactagtttagccataaactttggtcctgttattttctcataaagattaagattttacctcggtttccattactactaaacggtatatttcgtgcgaaaactttctataaaaaaagttattttaaaatatcaaatatatctatttataataattaaaacttaattaataataagttcataactttttctcgttttaactttatctttatcgtcatgagtttcgaacccaaccaaaatatcaccggcctggggaagttgtatactcgtataggccaccttcggcaaccgattttcatttcccttagaggatatttttttccaaactatgccatctgtgtcgatttattaatcaaaaagaaaaaaaatcaccggccaagattactacagctaaaatgccaataggtagcttgcactttctgtatgtcaatcaaaagcatcattctgctgcattgccctgaaagcatcacacacaaacacatatatactcctactgttcttgatactggcaaaaagtcaactaatctcatcatgccaccacaaatccaccatccatacatgcactcgctcactaggccccgttcagatctcacctcaaatttttcaccatatcacatcgaacgtataaacacctacataaaatatttaatataggctaaaaaataactaattacacagattacaagtaatttacgagacgaatcttttaagcctaattgctccataatttgataatgtgatgctaccgtaaacatgtgctaataacagattaattaggcttgataaattcgtcttgctatttactaacggaatatgtaactagttttttttttattaatggccgaacaccccatacagcatcctatataatacctgatgtgacacgctaaaattttacaccgttgcatctaaacccctcactaacccccggccagcatcacctactctactctacctcaacgcaccaaccaaccgccgaaaagaaagaaagaaaagaatccgtcaagaaaaggagcgtgacgtgagaagcaaggaagcaaacggggtatgtaccgttacgatagtttgtgtgtgtgtgtgtgtgagagagagagagagagggggggggagagggagagtgagatgtggcgcacgtgcacggggggcgtgggggcattttatttatttgtttattttgttgatgattgacacgtatagtaccccaagtactcctacgggggcccgtgggcggccgcatcctatgcccgaattttcatcgagccaggcgtgcgggtttgtcctcgttaactaattcattaattaattactccctcagtccccttaaaagggatacttgtactgattgatcattcgtcttatttaaaaaaaattagaattatttttttttatttgtgacttactttattatctaatgtactttaagcttaacttttcgggttttatacttacacaaatttttaaaataagataagtgatcaaacagtgcaaacaaaatgtcaaaatcccttatattaagggatagagggagtagcttattatcttatttggtttcatgggctgatccaaacaggtgggctaattcattagcccatacaagaggtactaatgggctaattttctatagggacttaaaaaaagcagttatctctctcctatctctctaatctctcgccacattttagtcctgaattagcctatggttccaaacatgtcactctaagctaatgtttagcctaccgattcaagactaaacattagctctcaaaattagtcctgggctaatcttccaaatagggccaatttggatgttgtatagaggagcgcatgtgcatgccgttggttagtcgatacgttgttgaggtggtggtagtactttctcctccgtgaagacttagagcctgtttatgagagtttcgggtagtttgcagcttctctcggaattaaaaatttctcaaacagtataactttttttttatactatgagaagttctatttgtaaaatttagaaaaataaactagaaacctgaagctgtttcttcatattctcaaaagctgagtaccaaccagctgcttctcaaaatcttaagctaataaatccttaacagtgtttgagagaaggagaaagaaaaatgttgatataatacgtaaaacgagatgggtcattagcatatcattatttaagtattagttatttaaaacttaaaaatggattaatattattttttaaaacaactttcctataatttattttggaaaagtacaaattacctcccgaactattgcggtcgaccgaattaccccctaaaacccgaaaatcagacaacgttcaccccctcgacccaatctagaacagttttgtcctacgtggcgtacccgtggcagtccagttagaattctatttgtataaaagcaggactcacctgtcatactcctcttccactcttcctctctctctcgtgggtcggcggcaggtgggggacacggagcggcggcggcaggggacacggagcggcggcggcgggggacgaggaggcggcggcggcggctgcggccacgatgagcagctgtcgccttggcgcggggacggacggaggcaggggcgggcggggggcgggcgaggacggaggacacggaggcaacatgctcagtgcgcggagaccctcctgcgccagagggagttcgccgctccctcctctgtgtcccgcgtcaactgccgccgcctcctcgtaccccgcctgccgccgacccgtgagagagagaaggaagagtgagagagagaggaagagtggaagaggagtatgacaggtgggtcccacattttttaaaaaataaaatactgactgaactgccacacgtacaccatgtaggacaaaactgttctggattggatcgaggggggtaatttgcccggtattaaaagttcagggtgaacgatgtctggttttcgggtttaggagggtaattcggtcgaccgtgatagttcgggggtaatttgtactttttctttttttagaaaaaaaggcacaccgtttaacaattcggaaacgtatgcacggagaacagcagaaatctaatatgtttagccccgtttgaacctaaataagatacgtattttactgattttttgttagaatattttttaaactactaaatgctaatcttgcttgcactactagaaaaaaacattttttaggcggccaaaagcaatttttccagacggaggagaggaccggctgcagaccaacgacacgattttcgcagccagggcaatggcccgcctgcgaaaatccaatgaaaaaacaaaaaaaatggcctcgtcgccgccgccctcccctggcctccctccggccggatctgggaggggaggagaggggagccgctgacgtcgccgtccacgcgcgcgcctcgtcgcagccgccctcccccggcctccctctggccggatctgggaggagaggggaggggagctgccaacgtcgtcgtccacgccgccgccgccctcccccggcctccctccggccggatctgggaggggaggggaggggagccgtcgccgctgcaacaggagccgccgacgtcgccgccgcaacgggagccgccgacgtcgccgccgcaacgggagccgccgacgtcgccgtccacgccgccaccgtgtctgcgccaccggtggagggatggaggggaggggaggggagggggagagagctgagaagccggtggagggagagagagagagagttgagaagattagtgttgagggaaatgagtggtggggagggggttggagtagataagtatcaaagtttttttttggtaggtaccatttttgcaggcggaccacataaggttcgcctgcgaaaataggtggtccgtttgcgaaaatgattttcgcaggtgccgcttaagtggtccgtctgcgaaaatctattttcgcaggtggatagcgaacttcaccccgatttatatttttataggcgattatttggttccaagggtcatgttcgcctgtgaaaaaaaagacccccatatcaggaaaaatgttttttctaagtgtgttggcttcgatttgatctaaagaggcatgcattggagtgttatttaggccggtgagtgatatttgtttcttttgttacggtcattgatctccggggtttcttcggacttcttttttgttcgatttagaaaaatcgaatgaatgctataacaaattatatattgggatagaactatagattgtgggaggactgtttcgagggggagagggctacatagatggaacggtcgcgtggccaacagtgaacagttaatgagacaacgggttagtggtagcaccatctaagggcaagtacaaaggtagagaccggtatggtctctacgttaattagaggctattacgttacaataattaagacaatactgtctctaacattaatgcactaaaatactttcttactagtgatctttcctttattagactcaatgcaacgaaaaatttcctaataaatactaagagtcgactctatgctgttgtcatgcgtagcaaccatctttctttttccttctccctctctcttccacgtcaccaaatatgcttgcatgataataaagagagaccgctaataaagaccattgtacatgccctaagcctgcatggaagagtatagagagtaagtttgtcttctttcgaacatttccctagctaacttctatcttccgtttttacacgtacgtttcctaaattatatttgatccatttccaaagttttttaagctaatatttaattaattatacgctaatttattgttccgttttacgtgctgaagtgagggttccaaatccgtagtagcgaatgcagcttaattaaatgggggtgtgcgattggagtgagcccttttgaattggaggaaaaatataggaattttggaggattttaatcatataggaaaattttctatgaagccctttgaaacaaaggattaagtcatatctaattctttgaaattcttatggaatggacaatcctatagaggttttagaggaaatttagcaagagcttcaacctcttggtaactttcctttgagtctatctctctcatccaattcctgtgtttttcctgcggttcaatcaaacagtcatttctgtgtttttcctgcgttttgcaattctttgttttacacttacattcctatcaaaatcctatgtttttttcaatcccgcgattcaaaggggccctaagtaagaagtggaagaattacctctccctccattttatattataagattctctttaatttatctatcataagtttaatttatccacgtttgtccaagtttttatgaaaatgtagcagcatttcaacataaaatgaatatattaaaaaatatatttagtgaaatcaattcggtgttctacgtattgcaatttttttatataaagttagttaaattcaaacaagcttgactttaaactgaaaattttttcaatgtctaagtatctggacaacataatttttttctcataatatacaggcaaaccttctagaagcgtggtagtcttcacaagttcacattggggaaaaaacgaaatatggatatatatatggtatcttttgaaatattaaactaacaaccgttattatctcgcagagtacggctaaatatggagtaccgggcgtgatggaaaacggaaaaaacatactgtattttgtcttaaagacacgacaggagtataggaccatagtttcactgaatgcttatcggttttgtaatattgatgtcaatttttgatgtgacatttatctattcatcttattaaaaatataaaatattatttacttattgttaacttattttatcatcaaagaaactataaccttaacctatatttttcatatttatactgaagttttaataagacgagtaagacgaatatttaaacaattatatgaaaaattaacggtgtcgtatataagaaaaactgcggtagtatcatttataaatgtaaatccatttctttttcccttgattgcacgctagatccggttcagacagaattgattgggcaggtggcgagaggccgtactacgccacattgtcctccccctggaaaaaaaaggcaaaaggacaagaggaccaacagaaaagggtgagagagagagagcagggcactgcacggtgcacagccacagcctgcactgcagtagtgcagtttgcagcaaaggcagcaaagggcatgtttagatccatttgaaatggcaaatggtaaatggtaaaagttttattattgtaaaagtattagttggtgtttagatgtattttaaatttttgccattctagcactaaagtgagagagagaaagagatagggagtggtcccaaagcatttttttggcacaatttgctactatggactagcaaatgccaaatgtcaaattgccaagttttaatactagtgtttagatccaaaatgacaaaatgtacttcaaaatggcaaaatttttgctattttggaggatctaaacagggctaaaggctagggtagtaccaggtactggagcactgtagtgtacttcctgtagtagcccaaaggcaaaatttgctacaggacacgcaaaaaacgtgtaattagctgggagacaccgcgaaaacgtgacacggctgatggacactacaaaatttgtgtaattggctataggacactggtcgcattattttattatttccgagtcaaaacaagtgatatatttttctgaatgtctagattgccctttctctttccttccttttctcctacgccgggaacctgcgtgatgggacgaggtcggcgaggtcaccgggaacccgcgcgatgggacgaggtcggcgcaggcgcgagcttgatggcggcagcggggcggcagacggagaggcccgcctcggcgatgcgcagcgcaacggcgaggccggcggggccgctgacgacgacggcgaggtcgacgggcctagagcaggcacccggggggaggggtcgccgaccgctgccgcgcgggtggggggaggcgtcggcgagctcggcgcgagtgggcgggcatgagctcggcggcagcggggcggcagggcgagaaggcgctcggtgttctcggcgaaggcgctgagtgtccgcggcgaagacgacgactacggcgagggcgagagcagcggcgcatcgccgccaactccctctccggtagcagctcacggcgcccacctccatctcgccggacaagaggaagaccggccagctagcagctagcagcagccaagcatgcgccggcgagctcgctccaccagcaagaagatggctagctagctccttcaattcagacttgagagcttgagcaggcagcaatggcgagctccttcagacttcaggcttgagagcttgagcaggcagccaggaggcagctgcagccggtcaggggctcgatctggtctctgatttgcaagtcggagcatgcacaggcgtcctcttgtgccgacctcgccaacctcaccccactgcgcgcgatcccggcgaaggagaaaaccaaggaaagagaaggggcaatctgggcatttagaaaaatatctcacctcttttgatccgaaaataataaaataatacgacaagtgtcctatagctaattacacaatttttgtagtgtccgttagccgtatcacgttttcgcggtgtcttccagctaattacacgttttttgcgtgtcctgtagcaaattttgcctagcccaaatgccacagttttgggcctaattggaatataatcaagctgagctgccatgggccacggccactgcacgctgaacagctcagcgctttaacgtgccaggccatctgtttacagggttgttttcttaattaagtgccacatttttttctaaacaaaggcaagagatacacatgacccaagaaaaagttctcactttaaacaccataatattacaaacactaaaaacacctcaaaatcattccccaaagctacattaaacacctaaaagaaaaccaaaaaatgccacattttacccaaacatagtcaattggtttttagtcacagactacgctcatcacatttgaccctgtttagatgggactaaaacttttaagtccctatcacatcggatgtttagacactaattataaatattaaacgtagactattaataaaaactcatacataatcttagactaattcgcgagataaatctattgagcctaattaatccatgattagcctatgtgatgctacagtaaacattctctaattatggattaattaggcttaaaaaatttgtcttgcaaattagctttcatttatgtaattagttttgtaagtagtctatatttaatactttaaattagtgtctaaatatagagactaaaattaagtccctgtatccaaacaccaccttatattttttcttcttacctagccacagactccactcgccatatttaatttttccccttaccttgcctaaggtgtgaacaatagatcttggccacaccttagcaaagggttgactaggtggtgttgcattttttttaaaacaacagatgctcatataaatgtgcacgcaatcactctatccctttgagcacctttgaagattgtataagtatatcttgagattcacgaagtcacctatccctataaaaacccgggtggatagattgcaccacgaagaaactaaccaattaagttatactcacttcacgccaatatgtgttatatctttctcttgagcaaatactgttacctttttttgtttgataattcatgtgtttccatggccaaatttagggctccttggaacgcatgaatcttataagattttgacaggaaatattttagctcctcctaagtttttccaaaaaatcatatgcttcaagggaagcctcattgatcctcagtagagtcttaaaaatcaacacaacgctatatatcggggtatttaactttttgccactttgaaatgtggcaattaaagatttaccactcgcaatctatgacatgtgtgcctagtggcaaatccttaattatcacttgtaagagcggcaaatagttaattattccctatatatataaagtttgtttggtttagtagcccaccaaaataactctagagtattataaatgaatttgttcgaattgatattaattggaagccaaaatttatataatagcaaagaaagttctagaattgtttcaaactgagcatgtgcattacccatcatttggcatcaaaccaaaccatcgtatttactgctcaaactaccaaaacaattggtatgacacgttttagcattgatccaaaatgacccattgttgcctagcagtttcatccataacctccataactaactggctgccaatcaaatttgatcaaaatttatcaaacaattgaatttacttcatccatcccataaccacacaagggattaaaccttttctttttccaaaattaaggaagtagcaaagtcgtgatacaaaagtgatagttataggaatataactacaaaagttagtagatagggaataaatagtagaaaagttagaaattgaggaataaaatatcttatattttaggataaaatagaagagtaaaatattttatctcgtagaacagagagagtatgagcttaattaattttatcaagtggtttccaggtggtcgatttataaggccgataatgttcctcgctgactatactcttcatatagccccaagctagttgcatgaatcatataatactataaagttgatatttattgactcttaaaagtttaacatgcaagtgtaccacataaacccactagcaattattatctacaatattttaaatatcatgtaaacataatatatcatttacaattttattgtatttctagaactcaatatgcaagtaatatcaaatcattatatctacatcattttcacattatttaaacatatacatatctcgcaacaaagtatactaattcgaatactttgactactaatacatactgatggcatccgtggattacaccgttggtttgtcaaggaaaatacttctaatcttctatacaacattttcactcttttactattaatcttgaagtccataaatgttgcttcgagagaaaaaaataaccctgatgtccaaattaaaacaaatcagctcaccttatatctccagactcgatcacaaaactctgatggacgacgcgacaaagagagcttgggaagcaaaggcatcgagtagtacacatggctgatcagttggcatgcttcttgtcaagccgcgagatatggagggcttggttgacctagtttttagattctaacacgcggctgtttctgaaaatatggaaaaactctgaaacccagcttctccagtttctggcttcttaatttattcttcagaatatgtaactacagattctcaaaagctatagactgtttgggacagcttctaacagaagcagcttttgagaaaagctgcagctgggacaagctcccccggaatggtcttttgtagcgagagtgatgtggagtgaagcatacagggcaaaacatccgtgaaacggacgaactagtgtactgggtacaggagagataaggttaggttaaggttgaagtttatatgcaatgcatcaattaacgtctcgttcttttctaatctaattaagacaaattttatctcagttttcgtttacatacttttttaaactgctaaatggtttataaaaaatacagaataacaacatccgctcctcaaatcttaaatagacaccaccacagatgcttggactaaatccccccatcatgtgagaaagggcctatagcctagtggttataagagtctcagtaacaccataggtcttgggttcaactccacatgggagcaaatttttcaggatttaacggctttgtgctttcaatggtaggcgatgtacccgtcgacagcgaggcgcctatgatgacttcgttaatctccaggatggatttgccgacccagtattcaaagatgctcataggggtagcgtttgcgtgcgtgcgttcataggggtgagtgcgcgtatgttgtgagtgtctgcgttgtattgtataattctcaaaaaaaaaatccccccatcatgtagttcaccgctattttactccaaccttatcaagtgtcggcctacggtgacttcatcaatctccaggatgatttgctggcccagtcttcgaagatgctcataggggtagggtttacgtgcgtacgttcataggggtgagtgcgcgtatgttgtgagtgtctacgttgtactgtgtaattctccaaaaaaaaaaatccccccatcatgtagttcaccgctaatttactcctaccttatcaagtgtcgtaccagtacgaggtagtactactatctctctgcagctgctcctcctcaagaggcgcgcgtggcaattgcaacagcggcgacaacagtcatgcatggaggaggtggtagacatagacgagcacgacgaggaggcgatcgtcgtgggcgccagcgtggcgcagctgcctggaccgtgacggttgtgtcggctcgctgtggtggcgccgcgcctacgaccgcctccgtgtccacctccccaagcagtaccgcacgggtgatggtgtccgctcccgcctccgccgcaaggtccgggaggtgcggttcgacgccgtcgaccttgccaccagtaagtaacttagagcggtatgtggcgaggtaccgccgccgccagtgagaacgatgagcaggtggtccccatgaccgggatcgatggagacgttctcggggaagacgatgcacaccgccgactacatattttggttgtgtgtatatatatatatatatatatatatatatatatatatatatatatatatatatatatagaatgtatgtaacgttcttgtggtgttcggcttggatgtaatatggggtgttcagtgttcttgtgatgttcggattaagatctgagctgagtgggcttgatctgagcgtagtggggctaaacgtgatatggacctaaactaatataggaagagaattggaaattgtggagcgatctgggaggaattggaaaaaaaaaatcgtgcgcactacacggggagggaatcagacttttttttgcgtttttttcttccctttttaccatacaatcatgcttctttttttcgctctttttttaaaaaaatttagattgacgacataaacctcggaaacctttttaattttttaagtagtagagatagagatagagatagagatagtgatgcacatattaaaaaaaagaaaaataaaccaaaaataaactagaaatgaaaaaagaccatatgcaaggaggcaacagattgagatcctctgcaatcaaatgcatggtgactttgggaccacatgttaataataaagtcacttgacttcttcaagtgtagaggattatgatccgaggcgccgccccctcccttccggagatgaccggggagacacccccggagtgagggggaacgattagctttttcgcatgaagggtgattgactgctcgtccatcatccatgcaagggataagagcaggtacaatagcaggctattagccagctataaatatattttaataagataaaagatgaaagagaagagcagcgggctacagatctgtagccagttgcagcacggactctaaaacgcagtgtgtatatgacatgtgggaccatatattaatagtatagtaagcaactattgtataaattggctattagataaattggagtttgtaatgggctaagtttaagacgccgcggccgcgcgcaaattaaaaggggttaatttcgcggaggtcggtaggattattcgcgagtttgttggggatcgagatagatttcgatgaatgattggttcgatctgagactcccgccatcaatcaaaacccttataaaatccccccttctgttcatcctcctcctcatgttggtggtttgcattggcgacggtggagagagcagaagccactccatatgccaccctcttccgcagccgcagccgcagctgcttctgctcgtcgtctgctagctccgccgccgccgccgccgccgttgattttgccggctgctagcgagctagctgctcactctcgtcgagagcaaatggatatcgttggctatcgtcgtgcctcggtgaatcgagacgtgatgatcatcagtggtatgaagtactccctccatttcaaaatgtttggctgatcattcgtcttattaaaaaaatttaagtaattatttattcttttcataaaatttgatttattgttaaatatattttcatgtgcacgtatagttttacatatttcacaaattttttttgaaagacaaacggttaaagatgtgctaaaaaattaacggtgtcgaatattttgaaacggaggtagtatgatatcgttctaagggacacagcgacttgttgttgttgttcgtgcttcatcgactcatcgtcacggatcttattgattaacggctccgttggcacggtcgtgacttgtaagaaaaaaaaatttcgattccctttctttacatcagattcgtacgataaattttaagattttataagagtttatttatatctattccatattaaaaggtggtcaaagtggaaagtaaataaaaattgcactttacgcatgataaagtgtacattgtttcactttgcactaagtttaacacatatttttactttacaccagggttcactgatttaggtttcacttaactacatcatcaaatatataggattttcatgacatttcataaattttttgaatgaatcctcatcaaacatagtctaaattaaaaagtttatttaataatttttaatcatattttacaagatttatgatacaacacctagtgtaaagtgcaaagtgagagttatttcaatatactctggtgtaaagtgagtatatattaaacctggtgcaaagtgaaataagatacactttagttggtgtaatgtgtaatttactctttattatattgtcttccaaagtgtgtaatttggataattttaccatatcaaattactttatatcttttcatatacgggagtgttaaattcgtttaatttgggaatttatcttacttgagacatattttttcgcccaacataaacctcgttaaagacagtacaatctcgtatgaccgagacaaaaacttcgatacttcaaaccgggcggccaatatattccaattttaccttggcagtagaatagagcttaactaatttcaaaatggtttaccagtgtttgtctagtaaaggaaacattccggcacaatctatactcattaaaagagaaggtattagtgaatttgtcaccccacctcttgttaatcttaaaacttagttgaactttttatcattagaaaacaagctaattacatagctacgtataaaacaagcaaattcatgttgtgcaagaggattgataacacattgcacaacatgaattttaatttattttagacagtattataatatattttctattatctctgtaacaaaattacaactatccgttcatattgtattaggcgatattagtctccagttaaatactacctccgtcccctaatacaagggacattcactattttcttataacgtttgaccacccatcttattcaaaaatttgtgcaaatataaaaaacgaaaagttgtgcttaaagtactttagataataaagtaagtcacaaataaaataaataataattttaaatttttttaataagatgaatggtcaaacagagtaagtaaaatgttaaaatctcttatattagaggacggagagagtagttagttatattagaaaaaaagtaggtcatgaactcatgatggtttgttactttgtttggtcaatcgtatattgagatggattgctcagtctcagattatcccttaatctccatcatgttactttgttatcaccttgacgtgtcagcgtcattgtagtcgtctatcggacaaatcaccctctcttttttcttcatctctgattagaaaaacaaatcatacactttgaccaaataagcttttgagaccatgcgtgatgtgaaatcgttctagaaaatggtaattacggcactgatgggaacgaccgcacatttattgtcttgcacacgagaaactcttaaattccggtttgcccctggaaagtaagttcagtgatatctgcatccttaaaatagacgaaagggtacacatccaaatgaattcagatagaccaatgatggtgaaaggggtctttagtttatatgggataaaatgacgaaattgtaaagtgagatgattctcaaattttatgaaatatacatatatttttcgatatattaacgtttatccgctcatacatagatgttggcgtgtttttgtctcgatgtattatcgtacatcttagatcggagaaacactttcctttctaccagtttgtagaagacaaacaacctatcgctagcatgcgagatttctctagcttcaccaatactttatcaattgattcaaaatgtggacgcttcattgctttttaagtgattaagccatgtggctttatttctgcctcaccctacttttttgtcatgtccataaaccacataggcacaggcccaaccaaaacaggttgttagctagtcaagtttgtaagatcaagagtggcctccaagaggttcagtcaaaattagaaatagccagtttatccagggatgtgaatgcaattctcacctgaattaaattagacccctaatttaattctcaattaaccaggtactgtcctaataattttctcccaacatccccatcgatcctgactttgtctgatccccactgttttttcttttccttttggccactctttgatttcttttttcaattctattgcgggtggagactttttggtttggccgcaatccaccaccccattcctatccatcctccttcagcttcttctttcttctcctcctcctccttgactgtcctaacaaaaaaatcgattttttgttctcctcttgatggttgctgcgaccttcgatgtccctatgcggaatgaaatctcctgctggggcggctaaaaatcggagattttctgtctttttgatccgtctttagtggagctttttgagcctgatttatgcgatgggcttcttggcgtgcttgttcccatgtcctcaagaggtgagagatgaggatgaggaaccaagaagcggccagagagtcagctcaggtggatttaattattctttttgttggaattcgttcttatgttcttgcaatcttgcttaaaaattggagtagaaatgtttggtgctgattggttagtgtcacttgtagcagttcttgtggagctaaatatgctctcaggtataagaggggcttttctttcatgcagtggaaggaaaaaagaatcgagttatttgtgatctattgatcttaatgattgtgctgttgggttcgggatgattcaggctggggttgtacattaatttaattttttatttagatactagacttattgtagtcaaccatcaggatttttcaattgtttgctcatttccccttttggtttgtggtgggagcaattatttgtgcaattcatctgaagtcacacgagaggatccaaaattagaagtttgtttgtaagtttggactttggagtgcgtaatttcaccgggagaagaggatagaaagaacatgaattagtttaagcggaattaaaattatgaagaagacgaacactgtggtagaaaaggaaacagtctgggtggactcgaagaaaatcgctaattttctactattcttgttttcgatttccaactctgtttctctttcaggatgtatcgagtctatcttcattaacagtggacgtgttcttttcttcccttgaaatttctcaataacagtggaatattcaaagtcgtcagagagttgcccactgaagactgaagggtcgatagatatggttggaattcggcgaaataaggggcatggtgaagcaacgatcttcactttgcgcgagcttgctgatgctaccaacaacttcagcacggagtgccttttgggccgaggaggattcggcagtgtgtataaagcatttctcaatgatagacaggtttgtattttctactcaagcacccaactccttatgcacttcgagtcccaagctatgccgcgagcatgaaacaagctttttcaacaacactgctttgaatactttgtgatattgataaaagaaactgttcctttggtcaaaattgatgggaatgcttagactattgatgttaacagaaagtattgttatgctatataccctttgtataaatttctaatttggttccagcatttgctgcatcgcaggttgttgcagttaaacagcttgatctaaatgggcttcagggaaacagagaattccttgtggaggttctcatgctcagtctcttgcatcatcctaatttagtcaagttgtttggttactgtgtggatggagatcagcgcctgcttatttatgaatatatgccattgggatcactagaagaccgccttcacggttagtattttattggaaattgtataatatcctctgttagctcctagaaaaacctgaaagttccctaagaatctgtagttgtgttagaaaacattttatatttttcattgttacatcatcgtgatttaaagcacatctaaccacttgaacatggtgaaaagaactgtcttctaggtgagaagaaataaaaaaaaataaagagctgataatttggcacctctttcagcattttaaagatcagtagctgatagtacataataacttcaatatagaaagagttcacaacttctgtacttttggatttccctgaattcgaagtgtgttttctgcattctatcttggcaaagaaaacaattggttttcttcaatgttccatccatcatattttctaaatttgaatttctattataatctgttgtatctgaagatggcttgaagtaattcctttaaatgataaacatcgcaaccttttaccttcaaatggctattactatgccttgctaaaacatcatttgacctttttattatgtatgatgaaggtgctattgtttttggcattgaaaattattatccagtattttggtagacctgtctaggatccagattagttttgtttccattgtcttatgcatctgatcaaaagctaaagctagcatggaatgttcaactttaggcagatctgtctagaattcagtgaggattcgagggcataacttttcataaccatccataaccacttttttttttttggtttgacgagaggaccctgcagtgtatattcaataataaagagatagattcagcatgtcgctgtttatcacccttcatgtccgtttctaccattagaccacatggttcaaaaagaattaaattgttctttacattccagtaagctacttaatttccttaagtattattactggataccctgttaaaaatttgctgccgatgctttttacagatctcagacccggccaagaaccactagattggacaacacggatgaagattgctgctgatgcagctgctggtttggagtatctgcatgatgaggccattccagcagttatttaccgggatattaaaccgtcaaacattcttcttggcgaagggtataatgcaaagttgtctgactttggacttgctaaacttggtcctgttggtgataagactcatgtgacaactcgtgtcatggggacacatggttattgtgctcctgagtacctctcgactggaaagcttacgatcaaatctgacatttatagttttggtgtggtctttcttgagctaattactggacgaagagcgcttgacagcaatcggccacctgatgaacaagacttggttgcatgggtatgtttctatcaataccagaatgttacgaaaggtcacaatgatcatattttcacaaagaaaaacaaaatgaggataaaagatgtattgtttaaagggcaacattgaaacaataatggcgtactggaattatagaaaatgctacaatacattttcttctgtgattaatttttatactacagctatcattaacaacattgtgctgtgtggataaggatcaaaaatggtatttggtcgaagttagtaacatttaattaacggtgcaagggtgggggtactggtgctatgtacaccttttcaaatatatagtgtgagctatgttctgagaacaaagtaaattatattattaattaacctccctgtatgcatcctaatgcctatggaacaggaagtaaatgtctcaatcttgtgtgtccaggagtttcctcgttctaggaaatgaatcttatctgtttcttaacataccccctcagtaccagttaaatgaccgttcatctaacttattgggtgtcctactaaattggatctgtccctttttcatcatttgatcccttgaatactattatgtttttaatgttaaatgttctatttgtctgcaggctcgtccattgttcaaagaccaaaggaaatttccaaagatggcggacccctcattacacggccacttcccgaaaaggggtctgttccaggctttggctattgcagcaatgtgtctgcaggagaaagcgaagaaccgcccttccattagggaggttgctgttgctctctcttatttagcatcacaaacacatgaaagtcagaacactgctgctcgccataccctgcctggcccttctgtaccaagagtgctggataatcagattaaccaagacacttccttgcccagtcaacatggagttcatatgccaccgcttgccgggacggatcacatggtacaagaagtcaaggagaattgccggagcagttcgcatcgaccgggaaggggcagagttaccccgaacggcgctgatagagagcgtgcgcttgcagaggcaaatgtatgggtcgaggcttggagacgtcaagagaagacgagcaaaatgcggtaatcaacgaaaagcttctcgctgctagcttcatttgatcataggaacagaattgacaaggtatgccacagattgcatacgttttgaagaaaccgcggaccgaataataactgttagaagacgatagcgaataataatgatcagtgagttcttctgtggacctacaccagagtgagcgcttgggagatttcaccggtgaagtctactaaatttacatccagacttgtttcactacatacatggattcttatttctcatcatatagataatttagcttctataggttaaagtcgcaggaggggatatgtacatgtaaataaccccctcataacagaagtggcagatgcagagcatacatatatttcttttctgtagttggatgtctcttgtgaatccatgtacatgagctggtaccataagtgctacagcttatacatttttcagatgattcttggtgttaactctcccttgcaattctctgttctcatcatgcagcacaggtaaatgtgtgatagatttgtgaaaaaaaaacaaagagatgaggagagatgctgaatggtgatgctttgcataacaggcatgcagtgtggaaggagatctgttcctctgcagtgtttgtttcagagctgttgctattcatccttgtcatgcaaaaactttctataaacaaattcctttacaaactgttttaaatcaattttttcaactttataatagtcaatgaatttgtttgtagcctccaataattatcacaaaaccatttagctattaaagtaaaggaaaaaaaaaggtaggtgtaaccagcagaggctgtgaattagtcagggaatcgctgtaaaaacactggtttttcgcatgtggattgacgacggagcagtggacgattcttaatttgcttaatctgtcattacattatactcccgccgtttctaaatactacctctatattttaatgacgccgttgactttttgtccaacgtttgaccgttcgtcttatttaaaaaatttatgtaattatcatttattttattgtgacttgattcgttattaaatattctttaagcacgacataaatattttcatatttgcacaaaaattttaaataaaacgaatggtcaaacgttggttgaaaagtcaatggcatcatacattaaaatacggagggagtatttgacgccgttgacttttttaaatatgtttaaccgtttgtcttattcaaaaaatttaagtaattattaattattttcctatcatttgatttattgttaaatatacttatatgcatacatatagttttacatattttataaaaaaatttaaataagatgagcagtcaaacatgtgttaaaaagttaatggtatcaaatatttagaaatggaggtagtgttaaactacacgaattaatcaaattttgcaaaatttatgtggcatggttcaaattttcccattaattaatttaatcaattgctcgctcgtgaaaacgatgtggaaatctgtggtcggacttagctatgaaacttctccttttcttttgaacgaaaacttgctataaattcatcaaatgacaaaacctttttcaccaaacgatcattgtagagctagcagctctatggaacacatcaaaatgcattataccgttatgcaccaagagaaaaccgctcttaaaaaataacacatgaaccgtgtattacttctaggagatcacacaaacaactgttattcaataatactccatccatcccaaattataaaagatttcggataaatgtgacatattctaatactacggatatagatataaaatttatccagattcacagtagatgtgtcacattcatttaaaattgtttatattttggtacagaaggagaagtggtttatgttggtgttgatggaaaaaatcaaattttatcgttaacagttgggtcacataaaccactattattcaaagaaatcaatacaaagtaactaacccataagcctgtaagatgcaatgaatctcaaataaatatccgttgttactatatacaatatatattgatacaaattacacaacaattctacagagagaccaccgttgccacttgccaccaacaactcaacttttttttttaccaaaaaaaaaaagttatgaactgcaaactcctccaagacatgccctgatcaaacagaaaatccttcacatatatttctacacaagaacacgttaattaattactcccgaaaacatgaagaagaagaaatcacgagctagcttcatcgcacggacaaaagaaaaagaaaaaaaaaggagaaaaaaaaaacacaaattaaaagcttagaaatcaagctcgacctgcacctgcagtgttgttcatggtttcactcgccggccggtcagtcagtacacgcagaagccgcggcggcgcggcggcggcgcgccgccgccggcgagcagcatgaacatgatgacgacgatggcgacgaggaggatgccattgaagaggttctcgtcgatgacgagaaggcacaccttccccatgaagcccaagctgataatttgctaatgatctcctccgatttgattaattacttcgatggcgaagaagcagatcgaatgctaataatgatctctctctacactaatcatcttactctatttatatcgacttatcgaggtgtgtgtgagagaatggatgctttctgtctctctttctgggtcaacttccagaaccaagtccagttagttttaactaaattggtaatctcgattagcaataaaattatgtgattagcaaaagtaaaacacgttttttgcagttaggtgatgcgtggttagtgtatttttaatattttatggtgtgtgatcacatagtggttgtggtctaaccgtgtgacgaaatggtacggcgttttggttggtttttgctcgagtttggtggtatttcaattccgggctgaattgtgggaactgttcattgacatatcaagcctagatagtgggaagatttcattggagattatatgtagttggtagtttatacttttgaaagagttttttttttttttagtgtgtgtatggacaaaatcactcttgatagaggccagttcaccgaacataacaagtacaagtatatagtcatcaagaaaaaaaagttgattggtgtttgattcgatacaaatctaaacatacttccagctgttttttttaaaaaaaaaattttggagaggaaatctttccagctgtttattaaatttagagaaatggagaaaataaatttcttgtggatctttccacttgtaacctgtcagtctcatggaccacacgtctcttttatttatttacacctgtctaaataactgttcttttgtattcatggatcatatgaaatcaccaagaaaaatcactcccctagcaatttgacaaggacgtagctaattaattatcatgtattattatggagaaaaaggttggtgtggtacgattattattatcacaaatttcatagcacataggcaagttgcaacaacggcttgaagaaattaaatccggtggcatgtgcgtatacaatcctcattatgtcacaccgttgacatcataaaaaatgtaaaaaagaaaaatcctctaaaaaaagatgacatgagatcgagttgtaatattacaaaaatatatggtgcaaagcacgcttgaacaaacatataccctgcgtttgatcttgatcgatccctaccatagctaattaatcgtgattaacaaactaatttaatggacacgcgtgatccaacacaagcttgctgatataatacaataagaatctgtggttaatggacgattagtcaagtgatcagtccaaattaaggctcaacgtttgtataccaaatacacggcctggacttcactggcttaatttatgagtcaaattgtggacgaaatttcactaggcacggttactgaactaccgtggacaaagaagctctccctagattttattcatctttctcaatggccatttgtcactccggttcaaactaaatcaactaaaaatacaaatattttctactacaagtcgctctcagttgattctattcaactcttgtaaccacaggggcaggtcattctcaaggaccagttttgtgaagaaaaaaaatcagtcgaattgtggaaacaaacaaatgtgtggaagatgcagtgcaaatgagggagaaaagacctgcctatgtcaaaaagttatattctgggacggagacgagatcaactcaactgtgcactcgtcatctttgatcttgagatacacatatataataaagacctggaagatgcattatatggtcagatttcagagtcgccgtcttctgctgctccacacaccacacaccacacgtatgcagaacggcaaaaagaggtggacagggttcaaacatgaatgccaagttcttgtctgatctttgttgtcttaactttgttattagtactaacttttacacaaacgtgataagggagatgaggggaaaaatgcattagctatgttcttagaacattattattgtcgtgttatagaaagaggaatcatgtacgtcacggtcacatagcatattgttcaattccaggtaaataatcatctgaaaaaaaatggtatgatcaaaactcagaagagaaaaggttggccagtgatgattatataatcaccgtagattttcctaaccgagaacactggaattatctagtaaaagggaccattagacagcggcagctaggttgatagcaccatgctccaatatagtcctgttggttcacagattcacagagctttacaggcattcataacaataaatttccaccccgttgcttggtaaagtaaaagggagtgtacaaatatacatgattttaagggctatgaaactctacagcattacatggtgagaaactgaaaaccgatgaaacgccaaccaaaattggcacaggggaaatacaggaagggttttggccacaagctgcctctccagatttggccagaaatggtatactgaaagaacagcagctccacgttgcatatagataaatgatcacacagccaatcggatggttcatcagtcatcacttcggatggtgagaacccatgatcatagcttggtgcaagaaacggtgaagaaatacaaggctgaggccctctcttatgatccctatgaacatcacttgcacaatgccaaccaagccagcacctgaccaaacttcggctcaaccacagcgaggtaaacgctgcagttcagcgcccaaatatgaggcggcgtcagcaaggcagccatcatgtgaacccttgaatgccgacacgagtgcttctactcgcatcaaggctgacaaagatatcgacacgatcattccttgcgctagatattgcctgcaggagaaggccaggcaatacagcaggcgagtcagccttaggcaggtgccatgcttcagcaggtccagaacaacgctcagtttaggaagattggtcagcaagcccaccgtagcctcccgaggtgctgctttgagtaacagcaccaagcagtctgatgccaaatcgcttatatgtggatctgaacttccaactaggtcgaggaaaatgcccatgttgccaccaaagtcgcatatatccatgacgcatgattgttgatcgacagca

SEQ ID NO: 9288 - DNA, 9915 bp, Oryza sativa
gacaaggccaccagcaacatctgcactgcccaggtacacgcacgcaacgcacgccacccgttcaccaaattgccagatagcgacagagacgataagagatacgatgaatttagtaaacaagcactttttcgtagaggagtcagtagtgataaagatgcctgtggtttatactctgtaggccttgctcgccaacatggcagcgatgtatgctgtctaccatggtcccgaggggctaaaggcaattgccgaccgtgtacacggcctggctggtacctttgcccatggactgaagaagctcggaacagtgactgtgcaggaactgccgttctttgacactgtcaaggtcaaggtcgctgatgcgaatgcgattgcccaggaggcctgcaagaacgagatgaaccttcgtgttgttgatgcaaccacggttcgctttctgttgacattttccgttctattgcaaccgagttagttgatgttgagtgttgagcattaaattcaagctgtgatgttgcagataaccgtggcctttgatgagaccacaaccttagaggatgtcgacaagctgttcaaggtgttcaatggtggcaagccagtaagtaatcattcaatcggcgcaaaatttgtgtgcttgatgtgaaattggatcatgatattaaaacatcgtgtcgttataatcatttttaggtgaacttcactgctgaatccctcgcatcagaggtgtcaagctcaattccgagtagccttgtgcgcaagagcccctacttaacacacccgatctttaacatgtatgtgatgttaaaaggcatgctgcttttcttcactgatttcttgcggtgttaagattaaactgaacttatgttgtgggcttccaggtaccatacagagcacgagcttctccgatacctgcacaagttgcaatccaaggatctttcactgtgccacagtatgatccctcttggttcttgcactatgaaactaaatgctacagtggagatgatgcccgtcacctaccccagctttgcaaacatgcacccatttgcacctactgaacaagccgcaggatatcatgtgagggaattcaccatttatttagtttctaaatgcaaactgttcatcagatgatctgaaatggcttgttttgtcatgaaggaaatgtttgatgacttgggcgatctgctgtgcaagatcactggctttgattctttctctttgcaaccaaatgctggtgcatcaggggagtatgccggattgatggttatccgtgcttaccacagggtaagtcatcataaataagctggcatagctctcctgttttgtttcacattttatatttacaaaccatgttataaaaactgcaggcaagaggagactaccaccgggacgtctgtatcattcctgtgtcagcccatggtacaaatcctgcaagtgctgctatgtgtggaatgaagatcgttgctgttggaactgattccaaaggtaacattaacatcgaggagttgaggaaagctgctgaagcaaacaaggacaacttggctgctcttatggtactgttccttttgctctgtaaatgttatcatttatcaggtcttcaggtagtaatgtggaatgcctatggtctttctggtcaactattcactgttaaatttagagctagttttctaatactatactatcactgcatcaccttttcgctatatttagtgtgttgcttaaagtcataaggctatttctgtactttttgttgcttctaatatatattaagatagaaaccagatagctgctccataacatggtccctaaagtggctgtgtacattcaataatttgaagttaattgacatatataatagaaacaaatccccggttagtttagtttatctatttccatataggctagagcccgcaggtgatttgtgaataagatttttattatgggcatagaaacataatagttcactcaggatgatttgatttataaaacaagtttttgaaatatgttggccttgtgcgtagagtaacagaatgttgcgtggttgctctgttcgtcaggttacctatccttcgacccatggagtctatgaagaaggcattgatgagatatgcaggataattcatgagaacggtgggcaggtatacatggatggggctaacatgaatgctcaggttagttctttgcagtttatcatgtcatcagactagcacgctctttctgaaattgctctcttcaagtctttttacaattttgatggattggaacgcattgtggtgaggctatataaattgtatagatggctttttgacatggtgttgattaaaaaaaaccaattagttgtgcctatgaattatactaaacatgtttagtaacaagtctattttaattcagttccaaacacaagtataccttgttttgaaacaaacacataagtaccaactttcattttcatgtttatctttcaatgatggtgattgaatgacccttatccaattaattatgctgagctatgttatcttcaataaaatatgataagctttctccaagttcatctgatcccaattgagaacttctgttatagtaatttcaaacaaccccatctgtcgagccaaaaatattcaatacactccctaactaacagaagttgtctttttacaggtcggattgacaagccctggctttattggagcagatgtttgccaccttaaccttcacaagacattctgcattccacatggtgggggtggtcctggaatgggtcctattggtgttaagaagcacttagcaccatttttaccatctcatccagtggtaggtgctctgaattcaatctgctgataatctaaacagactaatgatcaatgcccaactcttaccttgaaatattagacaagattgatatagcacataatgccaggcgaccttagaaaatttccatctttactttcttacagaattaggcaaattatacgtaatcatgttacactcaacaacgagtcttttatatttttcagaggattccacacaaacatacatttccctatgtcatcaacaatgctgtgttgatctttaaaaactagtttctttgtaatcctaactcctgcaactcgagaactattgctggttttattttcttgctttcttggtgccacattagcttagatgggtatgctaagtgccaccttattttcatttcatattaacctaaactcctgaagcaagagttgcctgcatcatttttcatatcaaaagcatagtagggtgatattatgtaaaaactgctgtagaagtttttgttgatgataaaactacaaaaccacatttggtactaaaaccagaagagttcgttcataattccatcattctttttaaccaaaaaagcagatgctgcttcattaaccagactaattctgtaattatcagatcaccactggtggcttccctctccctgagaaaaccgaccctcttggtaccatttctgctgccccatggggatcagcgttgattctgccaatttcctacacatacatagccatgatgggttctaagggtctcactgatgcttcaaagattgcaatcttgaatgcaaactacatggcaaagcgtctggaggtatatttgttactcgtgatcacttacccattgctacctagtttgattgtgtttgaactagttttctaagttttaccatgttacttgtacagaaacactacccagttcttttccgtggagtcaatggaactgttgcccatgaattcatcattgatttaagaggatttaaggtatccaacataggtattttggcatttggacattgagttatgcatttccattttgttaattggatattggaactttttgcagacgactgctggtatagagccagaggatgttgcaaagcgtttgatggactatggattccatgcacctactatgtcatggcctgttccaggcacacttatgattgaacccactgaaagtgaaagcaaggtaaaacactaaaacacctactatattccttgccattgtaccaaccattcttttatatgaacttaatgtcacattatttatttcgcaggccgaactagacaggttctgtgatgctctaatctcaatcagggaagaaattgcagaaatcgaaagtggcaaagcagatgtgaacaacaatgtcctcaaggtaaaataccagtatattgctatctgttttcttatattagattgcaagttcgtaacacctatctatctatatacgggcaattgtattcttacccccaattcttataggttatataagatgttagtagaccctgttcaatcctagtcctcatgctgtttgcaattttggagatgcatacattagcatggtctaaactcaacttcaggtggctgcatagctcttgcatcaccaggatgttgacatgtgattcttgttttgtttcgttgttttgcagagtgctcctcacccgccccaacttctgatgagcgactcatggactaagccgtactccagggagtacgctgcgttccctgcagcgtggcttcggggcgccaagttctggccaacaacatgtacttgcttgcttctgtgtctccaaaagattgctctttgctcaacacaatttgacaccaacctaatctctattctgccgtgtctgtgctcttaccaggtcgcgtggacaatgtgtatggggatcgcaacctcatctgcactctgcaacagggatcccaagtcgcagaagaagctgcagctgctaccgcatgatcttccaataatcacccagatttgtaaaacagcaccaagaagtcataatgcttcctgtaggagggaagcatgctctcttctcgttcagcttctgaacttgtatatagctttgtgagttgtgacagctcctgattctctcctcagctgccaccttctcctgtaattctgtacttcattgcttccccattcccgttcaaaggtgaaattagctttattgactagcattgctacactgctgaatacaagaaaaaaagttatgatccatcttgcgcatgcgctctatccatatagggaaataaaaagaaaaataggaaagaaaatggtggctattactctattagcttttgtatccatccataagaatatttatgaatatttagggatgagtgatgacatttcctattgaacggagaatgagtggcaccagttgaggcagttctgtcatatgggcctacttatgcttcatctttacagaagaagcagaagtgttaaagtactaaacagcaggattgtattactcatcaagatgctactgaatagtcgtgttacagagatagtactgaatagttgtgttacagagatagcactagacgtctcctatcgcctcctacaatctgatttatgcacaactactcgtttgtacttgattccatctgtttcacagtataaatacaagtctaccaaaccagaaattaagaatacaagaatgactctcatttgatgatttctttaagatgttcatatgttttgagacttaaacttggtcatacttgaaaatcgatcagctctacgcattagtactgtttgatccttatttgaaaatattttcatggcagtttttttagacatactaactttgtactccttccaactaagaaaaaagtagttcttccgacatcaaatatatttgactagagggaatagttagtaccaacatattgagaaaacaacaacaacaacaaaaacaaacaaaccctccaaatttgaagtaggaatttctaacggcaatgtgatttatacaaacgctcaaatatttgaaaggaaagaaatatgattctccaaaacgaagtccggataggatgggatacattgggccattttggtttgctactttaccaaattattgatagcgataaatcttggacaaattttggtgctatcaaattttgataggataatgttgtcttatctcaattgatttggcaaatgttggctttaatccaaacaattagaagctattaaggcaagttttggtataaatccaaactggcttcatgtttatctccgggcctgttcactttgatgtcattttcaaccataccatttttcgataaagttgccaaaaaaatatctacgtttagtttgtagctaaatttggtcaatacataagaaattctgccaaaattttgataatattgctatgttgccaaaattttggcattgtcaaaacttggcaagatttattttggcagggccctccattttctcttagttttggccatttgccattgactctgtccttttctagtcttcttaatgcattgatcccctgtcctcttgccaaaaagatggcagtactcccagagtatatttccaaaaagatggcagtactcccagagtatatttattaagagtagatataatagcagactacaaaccagctataaacatattttaatgatataaaataggagagagaagagcaacatgatgtagatttgtagctagctatagcacagactccaagatacatgtgtatgacatgtgggaccagatactaattatgtagtacatgtgtataggtaactattgtataaattagctataaaattgactataaatgatttggagccggtagttggctatactattaaacttgttttaaggctgtgtttagttcacaccaaaattaaaagtttgtaagtagaaaagttttgatgtgatgaaaaagttgaaagtttgaagaaaaactttggaactaaacacggtgtaggcaggtcatgcgtagaccaaccaaccaaattaaaaccggtgagccaatcattttgcagcgaggccggcgtgttgccacggtggatctgtgaatgattgattggatgacgccaagcggcaaatcgtatcgaacccactcacgcatctgcccgaacttgatccatccacagcaatttcacggacaccccagacccgccaatccggaaattccccacttcgacggcattaccgcgcccgccgcgagctgcaacgacgtacgccgaggaggcaggcccccgccactcgatggttcgccgccggcggcacggccgatggactcctcccgctcctccaactctctcgtaagtcgtagtagcgcgccccccgcggcttgccgccgctgcatttcatctgggtcttctgttttcccctcttgtgggtctcgtgctcgttctgacttctgatctgtttacgtcgtcgtctgcggaattgcgggatttggtaggattcggggagctctctgacgctgggggagctcgcgtgcgcggcgctgattccggtgctcgccctggtggacgcggtcgtgttcgcggcggcgcaatgcttccagaagcgcccgccggggctgctgcccgctacactcgccgcccgcgcgcgccgccgcgccggtggccgcctcaccttccgtgagctcgccgacctcgccgacgagtcccgctgctgtaagtacagagccgcccacccctgttcagcttctgcgtttcgtccgtggccttaaatggtaatatggtatcatcgggttgtgatcgccggcagtctcggtgaacgaggtggaggcactgtacgagctctacaagaagatcagctgctccatcgtcgatgacggcctgatccataaggttaatgataaactattcttcttcttcttttacagcacatttggtgagacgtgtactcctttgattctttttagcccattggttcagtttggtcgatccatactgcagaattggaactatggttacgatgctagtagatttcggtttactaaactctgtaactcttctacttgcaaaaaggaaaaggacactggaattcttcattttagttattcaacaaggaaaaaaaataaactaacaagtcttttgaaccaattaggacgggttaaccaggttgcaatccagtagtttagtatggtgccctcatgcatgttgaaaaggacttgctagttagtaatttacggagagcagaaaaggaaaaaatgaccgaaatgtcaaatgtttacatggagagtagacatgtaaacatcagagatagaaagatatgctgcgactagccccaatagaatttctataattgtacgcttgtaactggatgatatcttccaggtgaagattttacagtggaaaatgttatagtgttacctttttttggtcactaactgtgaatgtttgtacttgttttttcaggaagagctgcaattagccttgtttagaacaccggctggaaagaatctttttctagatagagtaagtgaaaaaggcttattctcgaactcctctccgctcaaataccgccgttacctatttgggcatttggccactgaagcattttaagagttgttttgttttgagtttcctaggatgaccaactaattgacagactctcatagtttcatcattttacttgctttgaacacatactttgagctctacgtatgatgcaaagaattaaatagggaatgatgttccttgcaaagtaaagatcttaattcaaacccgttgttcttgttacctactgtattatttgttaggcaatgctttgtggtaatgtcaagacacaagctctgattacatattatgattaaaacaaattcaatttttgattttttttttgctaccatttgagttagcttttcttctccatttaggtttttgatctgtttgatgaaaagaaaaattctgttattgaatttgaagagtttattcacgcaataagtgtatttcatcctaatactcctcttgaagacaaaattgattgtaagtgtgcttcatctcggtgatcatcaagaatttctttatatgttgaattatatatcaaccattaattcttttgggggttttgtgcttctttcagtttcattcagattatatgatttgaggcaaaccggtttcattgaacgtgaagaggtatgctctattgttttgcaaatacatcagtttgacttttgaacagatatgttaagccattgattaatcttgtatgaagtttattgtgtgagaacttttggtactcaagactttgccatatcagtgtcagtctttctatcccccagcttcgaggcagcatcatttgatcatttctgttcgcatgtttgccaattgctaaataattggaatccttcgagtttcttattgaaccttttcacgaattactgaaactggtgacagcttttgtcatcttcaggaaccacgctatcatcttgtaattcttgtagtttccttgtgaaacttgatgagtaaactatataaagtcacgacatgaaataaatcataataagtcttgactcttaaatgtaaggaattctgaaatgtagacaagccagctctgcagcatatgcttccagtgtgaagttaaaactaaccacaaagctccttttttttttctcgttcaggtaaaacaaatggttgttgctaccttattggagtcagaggtgcagctgtctgatgatcttgtggaagccatactagacaaggtattaacattttcttctccttgagcccttttttgtttattcacctagcactaggaatctctaattgagttattctgcagacatttgaggatgctgacactgacaaggataacaggattagcaaagaggagtggaaagcttttgtactgaagcacccgtctgttataaagaagatgaccctgcccaccctgaagtaaggatactgtttttgattcctgctttttcatcaatttatcttattttcatgcaatatggtttgccttgcactattctaaaatagccaacgatgcatcgccatggtataaagaagcattctgatttagttttgcctggcagggacactacagcggcgttccccagcttcattttcaatacacaagttgaagactaggggtgaataaggtgacacacgttggttgttcagcaatactacctc

SEQ ID NO: 9289 - DNA, 5681 bp, Oryza sativa
cggtaatctaagtttaatactcataaatagtaagattttaaaggactatttaatagctcggaggatccaaataaggccatagatgtgttgcgagactgctggtgccggtggtggagcagtagagtaggagtagaaacgtgctgggggcggggacacggacagcaaaggtggtcgctgtcggcgacgacgacgtgacgctgcgagcctgcgtcgacgagagacccacccaaccgttggttatccatcggtcagccgaccggatcggcctgtcgcgttctcggctcgatcgttcgcccgcagccacagccccgcaggtgcccgtacgtggcccatcgcggctcgaatcctgcgcgcgaacagcggaacaacggaagttcatgcggtgctccgatgcgatcctgggcgcgtgacgatgatcggccggggcgcgtgcatatgcatgtgcgtcgcgcgctgccatcctgcctggcgcatcagacggaccgcggtcaggcgcgcggtccccgcgcaaggaagtgaggaacaacaccgtggccggtgtttagaatcccggaacgttattttgagcttcaaaccatttgatctggtgtgtgcgttggataccataattttttcccaagccaggagtagctaggaagttctaggaacaaacatggagaaatgggggatgtgaacatattccgaaaactatattttcttatggacaaaataatctgaacatgcaaaaaatcggtggtcttgggacggactattggtgccatgatgcctaacatcgacgtctagagcacgatgctgctccttcgacttcgagtgattattcaaaatcgagaattgacatatgcccaccaagtacgattttcaggtttggcacactgtctcatttcaagatttcagtcgccacgcgttcacgttgattttatttttttgacagccatttatatttgacttagaaaccataaaccttaggccttatatttagttaataggttagttaaataatttctcgctcgtcaaaggacatctataaatcttaatcattcattattcattatgtttcttccttttgatcataaccttcactcatttttctattccagtcccactcttcttaccccataatccaaataaacccttaggatgggttcgttagtgttggttgacaaccttcccctccaacatgaaaaacagagcagctcattaacatataattaattaaatattaattaaaataacttgaaaaatagattaatatattttttaaaacaacatttctatagattttttttttacaaaatacatcatttagtagtttcaaaagcgtacacgcggaaaacgaatgagaggagatgggaacacaaactgatgtgaccatcaagtatatgcatacaatcaagcatgataaatataaaacatcgctaaagaatacatcggatgaatggatgatctacaggatattaaagtccaatgagttttggaatcaagttcacctccgaagacagcagtgacttcaaacggacctagtgcattcatgccaactctgatttgagtggtcatggacttgatggaaagcttatctcgtcacctttcaaacgcatccggtctcatattcaaatttatcccgagtcaacaggaatcatcaaaataagacagtattgttgttgaaaccgaacttgggccttgggccttgtaatagactaagcccatatcggaagtgtctccctccacctccacaaattagcaattaaccctagatttattttcgtctttaaatgtctatgtacaccctctgtaacaatagggttttgtttagttgaattttgccaggtgtcattcaccttggagagaatcccttatttgccaccggaaattggtctggtcccttgtatgccattgaaaattggctcttcccttatatgccattgttccaaatttacgcaccctctcatgccactcccgtctgttgactgcgtgttggtagttaactctcaagtaaaaaagacatgtttgcccttctgagttgttaggcatgtcctaaacttagaagggcaaatatatcttttttacttgagagttaacggtcaacaggcgagagtggcatgagagggtgcataaatttggaccagtggcatataggggaagagccatttttcagtggcatacaagagatccgaccaattttcagtggtatataagagattctctcttcatgttgtctctagtcctcattagttggcgactattgattcagagcccccaatagttggcgtgttgatttgccggttcctcactcgattagtcagcgattattaattcagagccccaatagttggtgtgttgatttgttggttcgattagatctaccacttcaatcacaactatttctctgtgcttaatcacttttccgcaatatttagattgaatcttatcttattcttgcaatgttcactcgtttgcattgcagggatcatcaaccatatgtcacggttagtatgacatcgtttgtggtgtaccgatttgcacggcgtcctcgacttgctctggttgatagctacgtcacaaacgtcacactgatcaaagtgagagttatcctctcaccagaagatcaggccatgagagagagcgtcatcataaataaacaaacacaaccttagtacagatagcttatgctaccatctactacctccgtcccaaaatataagcatttttagctaagaacctgtgcttatattttaggacggagggagtactatcaatatcagttctatctcaagatatactggtttagtttttcggacgtgtttatatgatagctgtgagtgtatgccctgttcttttctccaacaacttttggattaaattttggatactcgtggcacgcttttcaaactgttaaacgatacgtttcgtgtgaaaaggttgttctaaaatatcaaatcaatccgttttttaagtttgtaataattaaaacttaattaatcacacattattaccactccattttgtgtgaaacacttaattttaatcttcatcttcatcttcaggagattcaaacaccacctttattttcttaaaaaaacccagttctatctaaccgacattttacgcccagatagaaatgggcctatcccacactattcatccgttggcccaatacaaatgggcccagcccacagcgccgcatttgtttcgaccgcttcaagccttggatgctctgctctgcccttgcattcgggcacaagaggggtggcatctctgagcgggagccacgcgcaagggtccagagcaaacgctcctcatacgacagagagagcgtgacagcgcgagggggttcggaggcgggagcgggcgacggcggcggcggcgggcgccagcgagcggcgaagggcgcgctggagatgaaggagaaggggtcgagggcggcggtggacgagcgctacgcgcagtggaagtcgctcatcccggtgctctacgactggttcgccaaccacaacctcgtctggccgtccctctcctgccggtaaaattccccgcatctcctcccttccttcctcccttccggcggtttcccgcgcgtctcgtagccatcgtcctccgtggagatccatttcgggctagggtttttgggggactgtatctagggttttagggcgtggctctgcttcggtgactccagatctgtcgcttgcatggtgatttggcggggatggcagtggggtgaggatgtcccggccccggttgggatgttagggtttttgggacggggaggttttgtgggatgcgactgtttgtttgagtttggtggtggtggtgtgtgtgttttttgggggggggggggtgtgggtcgattcttccgtgttcatgtaatgcttgctgatgcgagtctcccttcgagattttatggctagtgggttgctgttcgtccatttctgtctatatagtcgatataatagggtcgattcttccgtgttcatgtaatgcttgctgatgcgagtctaccttcgagattttatggctactgggttgctgctcgtccatttttgtctatatagtatatagtcgataatatgattacctgttatgttttagagttagattgtcatgctttatccgtgcctgttctgtgttgagttgtgacatatcatcttgtaattcggtttaaagctgtgcatgttggattctgtcgtgcttttgaccttcaatagtggttctgcaactaacgatttgatcttctcatcattaattgttaacaggtggggaccccagtttgagaaggctacctacaagaatcgtcagcgtctttacctttcagagcaggcaagtgctcccaaaataagttgttctttttctttcttttgctgtagggatgttttgaagctcaaatttatggtgaagtttgaattcagatatgcagatgggtcttcttagctagaaaatttatgtattcttagttggatattaaactttagcatttgctaaccatgtgattgttgcagacggatgggactgtccctaatactctggttattgcaaattgtgaagttgtcaaaccaagggttgcagctgctgaacatatatctcaggtttccacttttttcagtgacccatttgagtttgtaaaatgcagaatcatgctacgtttgagatgaatggacatagctggtcctttttgcagatttaattgacccgaggtgtcagcttcccatcttaatgtaatcattaatcagagatgtggacctgtagtaccaactgatagtttactatgcctaatctgtcttattaaattaataaaaatgtcataactcgaacatctagatttgcatgacttcagtcttgtgatagcggtgtatgagactgccttacattggccttaaaaagacctgaattaggaattccttgcactaacttgaagtctgtttacaatgaaactgaccggatgtctcttattttttgttgcagttcaatgaggaagcacgatcaccttttgtaaagaagtacaagactataattcatccaggcgaggtacaagctcattcaatcgtgattgttgatttctctttccttaacttgaggatcattgcctctgtatgagatcttccatgttgtgtggtgcatatattggctataaactttagtggtttagatggcttgcttttcttttggagatagtgcttgagatgtgtcttttatttgtttaaccccgtgtccccgtcaacatttatttaacccaatcgttgatgtattgtttctgttttaccatggacacaggtgaacaggattagggagcttccgcagaacagtaagatcattgccactcataccgacagcccagatgtatgcctagaactttgtagtgctgcccgtttcttgtgatcatcaatccctaagcatttctgtgatggatttgtagactgaaggcttttttgttcatttgcaggttctcatttgggatgtcgaggcccagccaaatagacaagctcaactggcacagatggagtctcgtcctgatttggtaccacctgactctcgccctgatttggtatcttttcttattttcattctcaacctatatcattttgagaagctgaaattgcagcttcatctggtgtatctgcacacaagtcctaagaaactgtgttatggaatcatagaatatatctgaaaggttttcatctttcatagtt

SEQ ID NO: 9290 - DNA, 17124 bp, Oryza sativa
cacaccttttgtatttattcacatattgttctggtgtcaagacttttttgtgtgcgcatgtgtgttatccttaacaattacccctaaattattttccggttgatattgttgacttttcatggtcttcacctcttcagtgttcgattttgatgtgtgcaagggtccttgaagttgagaactggctttgttttgttctgttggatcttgtacatgtgagtcaagataggtccatgcctaaactagcttgcagatggaggtgacagcaccattttaacgtgcagaataacaaaaagaatagaggccaatcactaaattaggcatattgattactatgtaaaccagctgctagctagcttgggtttgggcctaacttgaatcacttgctaaagtttatagacttggaagttttgttgccaagttcaggggacacgttttttctctcgactcaatgtgctgctgtgataacttggacttcaatacgaattgtaataggaaaagacaaatctgttgtatggtggagcatccaagaccacatatctgcactgggagattcctcgaaaactgaatcttctccaggggcatcaggaagcaagggaaaaactgcaaatgataaggatagtcctaaagttgatcctcgtggtatctttcttggccacgacagtactgttgaagatgtccagttctgcccttctaggtattgcaccttccccttcatgttattaaatgttgtctctctagcatgtgtatatgttgtttggactatgagcttcagtggtttgcatggcctaaagtttttgtcttggctaatagtcgttctttatgatgataaaacaatagcagctatcattattgtgaacatctgctgggaacttggaatgcatgctatattttgatattgtatgatctatacttctatcaatttatcttcacagtttatttttttttattttttgaagtgcacaggagttttgtagtgtaggcgatgattcttgtcttattctttgggatgcccggagtggtacaggcccagctgttaaggtggtgctcttctccattttaagcagattaatgatgctttacgtgaaaatgagcagctcaattctatgcaccatgttgaaactggtttattcttcatttccaggttgagaaagctcatggtggtgatgttcattgtgttgactggaacctccatgatgttaactatatcttaactgggtatgatggcatgaaatgtttctaaattctaaataatatgtaacatgttctttagtgttcatttggtacaagaagccgtggatacacttcttgatagtgggtttagctatttacacatttgagtaagatggtttcttttcgtattcagttctgcggataattctgtccgtatgtgggaccggagaaatctgggttctggaggagctggcattccagttcacaaatttgagggtcataaagctgctgttctttgtgttcaggcatgtacagatatttattgttactatattttttatgcacatttggttactgtcgtttattttttttgtgcctttatgctataattcaaaccttgtgtgtttcagtggtcacctgacaaggcatctgtatttggaagctctgcggaagacggcttcttaaatgtgtgggatcatgagaaggtatctttctatacaattcgttaccatttcagtcatctctgtcatggccctgcagaaagtttggaattgggatgggagttcatgctccatttgtccccttcatttcatgtactttttaatagctttagattcataaaattcttttgatgcaggttggaaataagaaaaatcccaacgcacctgctgggcttttctttcaacatgctggtcataggtatgctatcgtatgatgaaatgtaaaattttccttatgtgttgtaatatgcgtaactcaataccatattccttcaaatgcttaataccacatcagttggctttttattcctgtcacatttacgagacattcgtttttacgacaactttaggttgcatcactgtgcattgcttttctgtttctgcaatgagatatttttcctaagatattttcattaattagttttgcaaaattgaagatgggacttgaatcctctttgaactggtgtttgacttatgctgagagacacttgtgcaattgcaaatttgaacttaagaagcctaagacttagagggataaatcttgattatggtgtactctgtatcttagttggtaaggccattataaagtcagcctgtgctttctccacctttggaataactgttatggttcagaacaaatggataatcagtacatttgtaagtagatcatatttcagtttttcaatagatttatgctacagcatatgcatacaatgttagctctttttagtttccacatgaactgggcactataataaattgaggggaagatgtattagatcttaaggaatgatacaactgttatcaaagtgattgctgttgattttcattgtatgtattccataaataacgtattttgtgatatttttattggcagggataagattgtagacttccactggaattcttcggatccttggactattgtgagtgtgtctgatgatggtgagagtactggtggaggtggaacattgcaggtgtgtttctttatttttatagtgccagacacaaaatgggactgtactcatatttcattggaatagtgactgctaccatgttgtcttttatctgatattatacgtcagttgttcttatgcatattttatttgtgtagatatggcgcatgagtgacctgatataccgtccagaagatgaagttcttgcagagctggagaacttcaagactcacttggccagctgtgctccaaggagctgaatcgtgtgactatctgtgtaacccagtcctgtaataactctagtaggtttctaatttcttgtccatttagaatgttcctttcaaatattggttatatcctctggtgcggaacccaggcttgtacccttcaagtgcttgtgcgactcttttaccttactgtatcgactcaaatcggtaagctagtgcaaacacagcagagcagaatctctgtgggcagattatttggatgctaaacattgttctggagtctcgtattggacctagttgtattgttagcctgacttggtgacttaatcagatggttcttcagatagatctgtccaatagtaatgtagccttgaatacgtctgcttgggctattccttgcttgtggtatatcgttgcactggataccccagtggaagcagttttcccgcctctaaatcttgtcggatttgaacatttggtccaatgccgcgttgttcttgaggtcgtgcgttgtgcatctgagttcattggtatggtcacaaatccaaaatataagtgtgcttgaaagtcatgttacaacgtcacgtgggagctttaatttggactattatcctggttactcaattgtcaatcacggccgataattgcctcatcacctcatgtctcggatggatgcatttaaattgatgggagtcctgtgcccgacatgtgcctatgaatattatgctgggagctcatatgctgcgggacttcgtctcggcagctctactgacgttaataagtgcgcggttggttgagtcaggttgacctgcttaggttccgatctggccactggatggatcagagcaggtctcgcggcacaccggcacgtgacgtgaagcaaggcgcgcagagtctcgcaccaggtgggctgatatcactagctggacggtcaatccacgtggtttgttcattgcctcggaacggatgttcatccgactgtgcagacttggtggtggctcacctgcttctcctgctcgagcgtacgtttcaacgccaactcattgccgcggttgcgtcaaaatgatgaagcgaaatgtgcttgacgcattgttcatcagctcatcgcagtagtcggcaagagaaatctcagtactccaactccccgaaatgcttgttctatagtctagagtagtaatcttgtgatttgttcatgacacaacttgacacggtttgggtttgccacaggagaagtttctgttttggcagacttgagacgatcaaccactaaaatacaacagtaaagtattggataacggagtattactaaaatactagtacgctgtacacggcattatttccctggagatggagcaccgtggccggtgcaaccgacgcacgcacgcacggtgacgcccctccctgcgtcgcaatgaattgagggctcatgggcttggggatctccaacctgtcacggtgggtgacggggtggtcggtcgcgagcgcacgaggaggccctctcatacgcacgccgtttctcccatcccccgcaactccgcaagcattcctccctcccatccaccacccgcctccgcgcgccgcgtgccctcagcctccctgtatatttaccacgcaccagtgcaccacgccgagcaggccaacgcccagctacaccacgcagtcacatccgcctcaacgcaccaagctcttcccgtgcacgtgtggtaggcagaacgtgcgcggcgatctcgacgaaatggacgtcgcggcagacgcgacagcttggccgccggggtggtcgctggtccgcggctacttctccccggcgacgctcttcctcctgctcaacgtggtcatcggcaccatcgcgctcacctcccgcgcgtcccaccgccgccgccaacaccaccacgacgagcactacaaggcacagcaccaccatgaccaccatgatgagccgcagcgctgccatgatcagtacgctccaccgccacccgcgccgctcgagcgcacgtcgtcggtcatggagcggctgcgctccttcggcctctaccgcttccgctccggcgacttccctcccgagtacaacctctccgccgccggcgccaacgccatctgcgacgagagcgagaagcagcaggcgcagtacacccggagccggtcggagcctgctgctcggcccgcgccgccgccggtggagaagagaggcaaggcggagaacgctgccgccgccggcgccgccagagcgaaggtggcggtcaagaagtcgtcgagctcggaggtgaggaagctggagcgcgccccggcgcaggcacagcggcaggtactgcaagtgcaacgcgcgcagccgccgccgccgagggcgccggccccggcaccggcacgcgccgtgaagtcggcggcgagggaggaggtggagaccgcgcaggttgggctcgccaccgcgagcagcgtggacgcgagggcggacgacttcatcaacaagttccgggagcagctgcagctgcagcggctcaactcgctgctcaactacaacgagatgctcaaccgcggcacgtagctcgatcgcgcgcgcgcgctctcaaaccgcggcgccggtgcagatgcaaaaggcggctcggcgacccatgcgtttagagtggtcactgtgtacgcgttgtttgtaaacggcaattagttttcaattttgggtgtttttgaagttcatttatctcgtgtatgttcgactcaggtagtactcgaatttgcccgactcgagagtcgtggtaacgaggcgcccagcgtctgaatctgttccgtgtataattcaaagcggaaagtctagattaaagtctcactgaaacaatcaagtatgggatgtgtttggcagaacagcccgttcccctcttttggttaaggcttcagaacgtcgtcttctatctgtttgggccctttcaccgttttcacgtacgcttgatgtacctgggttcagaactcggatgactaaaaccgaaagcaaaaataaaaggctggaccatcctccataaactttggtagtgagttagtggctgcggccaatcgctggttaggcaggacaggaaagcaggcgagactcgagaggaaactgaagaggaaggttttcgttggggtcggagtagaaaactccgaatcccttgcacccagttccctagcctatccagttcaacaaacggcccaatcgttctcatggtccaaataacggcagcccatctttcgggctgcattgcttgtcaccgaaataaccgggccgcataaatagcttggattgggataatcgttcagctacaggcagagtgcagtttctcataaatcgcgggtaaacggaagccggaggagctccggcggatgaggcggcggggaacagatgctgcgacctgctggctgctgctatctggtgacccatggaagcgatccaactcggactaatcttgatacgggtccagagcttttccatgtcccggcttggtcgacgcgagcttttgccacggaaaggagttgtacgagctgttggatgaacggtttgtgttgcgtaggacattttttttccaaacagggagctgtatcatatatcatcattcaccagcgtgagcgcgactagtaaccaaggcccgctccggctgcttgcatgcaaattcagtgtacctgttcggatttgtcctttagaaccaaattgaaacgatcattatcgtctctcggtttccacttcgaatcttcaacacgagcttgctcaattgtatggttcgtgactagtacgatcgatgaacatccagtcacgaacgcatctgacatacggttcaaattcgcatctactcgccgggccggcgaaagccggcagagttttattaagaaagggagagtatatagtgcaaggcacagattacaacttaattagttagccacatctctgtccgaaacaacacaattcgcatctctactcgatcgagtatatatggtatgggctcgtctgaataattgttgaaatctctaccaactatacagtggctgctgagtgctgacgtcctcgttctcatatttccggtaccaatctcgccgtggcgacagcaagcaaattagcaaaagaccatcgtccttgatcaactccggcggtaggtacgggcctgcggccaattcagggaggcgagactcgagaggaatcgtaggctaggcagtcagacgagagaaagctcggaaatatggttttggcggagttcggagaataaaactccgaaccccctggaaccataccaattgttgttcctaacctccattggttgtctctgatataactgcaccggcataaaaagcctataatgctatcaaggatggtaattccggcacatctcgatcgcctggattggatcagtacagacggttcaattcccagaccctagagtctcactatggtgctctctactactactactggtagtagaaaaaaactcatcggttgatctcatttgatcaaaggatttaaatctatttgtactaccacccaattagcggtagaagaaatgtggagagatattattgtaaaaagaaaatgtgaaggggtataattgttatttagtagcgatggacattttctctcttttttaagctttttcgatggaatatgaccgatgccagtggaatggatgaccacaaattgatctagatgaaatgtaaatgacaaaaattacccctaatcactctattggtaaattactaatttatccttaataacaaacggttcagatcatttctacttgcagtataatactagcataatataattttattttgtttcagtagcatgtttgcctaaactatcctggaaacggaatgcagtcactatggggctagctctatcagctagtactgatttggaccaaagacctgaaggtagtatttttaagcagattcaggaggtgtataatcagtttgattcttgttcaatctcggtctacacaagatcatgtcacaaggtagcagattgttttgctgctttatggtgttaatgtgctgccggttaacgcacgggagttctggtgcaatacacaccaaagatttgtaacggtccaagtagttaattgaagcctcatttcaaaaaagaaagaaagaaagaagtttgcctaaaagatcttagagaaagaaaaaggaactcatccgaggagaaaaacttgaccaggaggctcaatgaaatgagtgatacaatgtgggagaaattggcggctcaccgattcgttaaaaaaaatatgggagaaatatcgtaatcacggcatcaccttttctatcttgctgtctttctttgcattggatcttacaccactagaaggcaaagtagtcaagaaaggaggtcacgcattcccttctttctcataaacaaacaaacatctctttttgtgcaggagtatatttttgtttatgtttcatcttccatctggactaacataaatttgctggaccaatggtcggtaggcctcgaaggctagacatgcataattgcatatcaagatctggatcttattagcaaagtgacgaaagatcagatcagtccaagatcttcccctgtcatctgctttctgcgtcgcaacagatttcctgtattattaatcgaaccaatgcatgcttcctgcatcgtcgcagaatgtgattcgaagcaaagttatggctgtcatggattggtcaatcaagggaaaggagatggctgtcgtcgaacctttggccggcccttccccggaccaactgcagcagccgaatcaaattgctgtcattcatgcactacaagtagtactaggcactactgctggtgtagggtatctcgtactgttttgtgccatgttgatgttcctagaatttcatcttctgatcaagtatagatagcaggaatcttgcagaaaattctccgcaatttcataattaacaaacagcccaaatctttgcaggaactagtagtaatctggatagcttcttgcatccacattatttgcagcttatagattattcgatcatgagcaacactggagcctgcacagcctgaagcccgaacagatcgaacattgtgtcatcgagtatcgatctcagcctgtggaatcatgaaacttcatccaggcagaacaaatctagcgtgttaattaggtgtactcgtttgcatcttatccccttcaagagaataagactaacattatgtcactcgactaatgtttggttattacttattagtgttagtaacgtcaccgatatcgacgtgcaagaaattgtcttgttaagccataggtccggccaaaggtggttcaatcgagtactatagactactagtacgatagacagctcttggggaggacggaggatactctgtcaaatgtcaatggagggatgatccatgttactatgtcgtggtcttacaactcaccggtttgacacgtgtcagaaacagacaaaggagatgacaatgagcaagcaacgctcaatgttgccatcgtgtcttctggcgccaaatgacgccgtaatacggcgggaaatttcaaagtagacactgttttgctgaactcaccagtctccctagaccaatacggacatggattgacaatttctctcgattcccgaagaggtgaagagagaacacgttttacacatgtactagaagaacacatcacctcctcatatctcaattttatctccatacctgaagcaacatggatcgccaaaccggcaaattaagccatatccaaccacgtgaatcacaccattgtttgagatgagcaacgcaaatcgtgatcacaagggaaaaaaattgctacgtggtgtgattcgctccgccgcggtagtgttgcagcagccggttagcctcgcgcacgccgctcaggtacgcggcgtgcgtcgttgagtagtgcgtgcggtgcgtcgcctcgccggcgaacagcagccgcggcgacggcggccgctcgtcggcggcggcgtctggcccacgtggcagcggttcggccatgcgatcgaggtcgtcgccgctcgatccgacggccacgtagctgtatgacccgaggaagagcgggtccgtggcccacccgctccgcttgatcctcctcaccctccaccgtggcgccgccgggaggaaggagtccagcgtggcgtgggccccgcggatgacgtcgtcgtcggggagggactcgaggtgcgccgcctcccggccggcgaaccacgccagcgccacggtggagcccgcgtggacggggcagatcgactccgtgccgcgcatccaccacgggatcttggacacgtgtccccggaacgccatgtgcaggaacgggaagcccgccgccgccggctgcacgccggcgacgtcctccggttccgatggcgccacggcctccacctccatgaacagcttgttcacgacgccgaagccgaggcgcgcgacggcctcgcgcttgaaaggcgggagcggcgggtcgaaggcgatggcggccgcgccaacgccggcggtgtccttgttgccgaggctggccttgaggacgcccagcgagaccgtgaggatgacgtggtcggcggtgagcggcggcgcgccatccgcgaagtggaggcggacaggggttccgccccacttgagacggcggagacggagtccgaggcggacggtgccgggcgggagcgcagcggcgaggcgctcgaccacgcgggagtagccgccgggaatcgtgacgtgttcgccggggaagtcgcggtactcgccctcggcggtgaggtcgaggtcgccgaggtcgtcggcggaggtgtcggtccgctcccggttgatgtgcatggcgagcagcgcctcgtccacctcctcaagctccttgccgccgccgccgccgccgccggcagaccgcgccgcctggtacgcccgtaggccacggcgcaggtactcctccacgccgcctccaccaccagcctcgccggcgcgcgcggcctccatcatgcccctgtacagctcctcgatcgggccagccaccgtgtccgcgtcgacgacctcgccgccctctgcgacggtcagcacgcggtcggggaagccgtccatgcgctcgtacgggagaccacgaccctcctcctccccgagcgcgccggcgtcgcgcgccagagcgtacacggggctcccgacgacgccctgcacccacgtggcgcccatctcgacccggtggccggcgaactcggacgtgaggatccggccgccgactcggtcgccggcctccaccaccgccacctcgaacctgtccccgcccgcgccgcacagccggtgcgccgccgcgaggcccgatatccccgcgcccaccaccacaaccctcggcttcttcgccaccatcgcgaacgaaaccgcgcgcacgggtgtgcggctacgccttcttcgtcgtagcaaaacccaaccgcctgcgcgcgtcgatgcagccagagccaaccaacactccagctgttataaacgaggagcagacagaagagtggagcaacgcaagcaagttgacacttgacatagcttaggtgcgcaacagccaacagcgcaagcaacgtgacggtccggctgcatttgagcgcaaagtgtcgtgttagcgcgcgcgtcgcgcacgagtcgtggcgtacgttcgtgcgcgcgcgcggttgggccatggaatcggatgcggttgtgttgatttcgaatgggatcttcattcttaagctgctgcgaatctgcgagttgtggtttcctgattagtgactgctacggcggatagcaatccgcataccggccggtttctctgttaaaatgctcaatgatgcatggttacgttagacacacatgcaccggggccctgtggcggctttaatttcgtcctagttgagtcgccgtgtaccgagccgggcaccgccgctcgtgcaaccacgactccacgaatccatggttggttggcgaccgggcggccggctggatgatcctagcggactcgcggtaatcgagctacaatgtgcaggtgcatagtgaagacctgctgtttagatccagtgacacaaggaccgaaggacggacggtttgtctacttgtcttcgtcatggtcatgcatgcttactttctcatcgacgtctagacttgcgtacgccagctataaaagactcagcctccgaggctccgagccttcggtcatgtttaaacttgctaagctacggagtggagtcctccgtatatatgtagactgttcttacatcttgtacgacatgagtaaatctgctgccaattattaagaacatgtcttattcttcacatgtcaccacagaacaaattactcctacttactgtaaggactaaatctgatgccgattctgaaaagaagaggggaaaagtaggaacatgtcgcactgttcacctcatcgcgttgtcactcgctgctgaaccagtgttgcatgatacttacagttatagctaagttattgacgttgtttgcatgtacaataagtatatgccgggcacggcggctgacaaagttgctaactctcggctctcgcatcaaaagaaacgacgtcgaccttctttgtcgtttaagaagcctacaacacccatctgtgtcggatgctctactcgatttacctactcgctgcttcttaacttgcttaattaccctgcaacaaattaattactccatagtctgtgatgataagtttgtttagttatagtataatcgtacgtaaacacattttaaattaagcagcttgaaatgcacaatgctttgtcttttatccaagtggcgcttctgattttttgaagaaaaaaaaacataatcgacatttgtaagtataggagccctatccaaaatgtggaactagcgcgtactagtacaaaagtagtactactcggtacaaaaaataagtactactgcctttgtacctaaataagtacagcttaggcagagtttagtttcaaatttttttctttaaacttctaacttttctgtcacatcgtttcaatttcattcaaactttcaattttagcgtgaactaaacacatttttattaacgttgtttacatgtacagtaagttatagctaagttattattgttactgttactttacattttttattatcatataagatcaagtaaattaaactcgaaacatccctgcaaggcatgcatatgtattacattgttcatactgtaaattacaagcattatagtaagagaaattttacaatccttgagaaaagtatcttaagatacctaaattttacataaaaaaattgttacattgaggtatttagtatctagatatatcaaattttgcactaaaaaaatatgatacctctatgtattttttcaaagatggtaaaattacccttatactaatgtactaaactttgttgaatgaacagcacaacaaactaatgctgcagtgtatgcagacctaaaaaaataatgggccatgcaagtttttaacttaaagcatgtcgcgttggctggcgctggtgggttggcacatatgagtggatctaacgtacgtgcagagaacctcaggtcctcgatagtccatactccactggatccctgtgaggaagtgaagaggtggaaggggaaagaagggaaaggtaaagaagagtaggggtttgaaggggaaagaagaaaatgagccttctctaacctgatgctactcctactgtactaaggctgtgtttagttcgtgtgtcaattttttttaaagtatacagatacacatttgaagtattaaacgtagactaataactaaacagattacatattctgcctgtaaactgcgagacgaatctattaagcctaattaatctatcattagcaaatatttactgtagcaccatattgtcaaatcatggcgtaattaggctaaaagatccgtctcacgatttacatgcaaactatgcaattgatttttttccgttcacatttaatgctccatgtatgtgtccaaacatttaatgtgacggaaaaattgaaagtttgaataaaagagtttgaatctaaacatggcctgattgtcagtggctcagtgtgacagtgtgtcctggtcaccgttttcgcagaagggaaaaaaaaaggaaagatgagacctgggtactgttccttcctgaagatccgaacaaatacttgctggcacgaattaagaaaaacacacgcatgtgtggtcgacagcgctgcaaatagcatagcagtggctcgcaacaaactagatttgacttgactcggctcagttagggaaacaagctaaaacttgagttcagctcagctcgttttctggctcgcgccagtctaagctggcttgcaagcctttctggttgaaatacttcttcatatatattttataatcattaaaaaaacaaaagtaaccccgcaaaaaaaacaaaagtaaaatttaaataagtttatacattcaattcttcaaaatcttaatgataaattgtaagttggcaaataataactctataaccaaataaaataatccatataaacacataatcgcctagacacatgagccaaacaagctgctcacgagccagctcggacttggtcaattcagcaatgagctgaaaaaaaggcttgcgcttaccagcccaccgagccaaccaagctcgagccaagcctgagttgagctcacgagcccaagcttttttccacccccagcagcaaacccccataaaaatcatgcctgccgtcccccagcatctctggttcgccttcggtccagtacataacactagcctaaaaaattgtggcacgcctaaggtttggtgtggcatgttagagttcgtctatgtcgtaggcagcagctttgtaggttctgaagatgtcgctcgttggcgaacgatgaacaacagcttcagcttgatcaaggcacaccagcggtgctgtcttcaaggagattcacgccctcgccgaggtgcacgagacggacggtggctctcctccaagatacaatgatctcgtatcctcagccgtgcactcgaccaagaacaaaccagcagactttcgtgggatgtaactctctctatgcaaaacaagccgatgaatgtgggcaaaaactttgtgtaacaaatatagcagcagtacgtggcttatatagccttgtatagaaacaagaaaatcttatctctaagccggataacaaacaatcaatagattgattttcgccggactgaatatctagaatgataaagactttatcttccacgtacagctcaaaccaacaagaccaaaactgaaaaccaaaatctgaagataaggcaaaagttcagatatcttatctgaaccaaactgacgaatcactggtacaaaatgaacagaaccaaagagataaaatctgaacaaccatcaaacatcatttgtgactttcattcagatataatcagaaggaaaaccacctaaattccaacatggcatactgaggccaccagccaaacagccccttactcccgcaatttggtcaaagtcaaattgctttttgtttgtagaaaaaagtagtactctctccatttacttttgatagtcatatttcaacttggcacacagaccaaagataaataattatacttatcatctatttaaacatgctactagtcattcctcgtaaacaaacgattcattaatatttacatttctcgatacccatgtagccaatcttgtgtggaagaatggagagtcacgcattaaatccgagaaagtcattaatatgataggttgttagattgaaatatacctatcaaaaataaaattttcagatttgataatatgactatcaaaagtagatggagggagtatcatttttaacccaagacaaatatattataaaaatatatttaattttagatttaatgaaacatgtttcgtgttataaatattggtatatttgtttacaaatttaatcaaatttaaagtagttttattttgaccaaatcaaattgactaataatttgaaaccgtgaaacggagggagtagtgtctgagtatgaaatgtcacttgacataaacgtgccacacatcttactcccctacatcaaaagaatcaacacatattacaagggagaaagcagaaaccacatgaaactcacacaaaagaaccatgaagcatcatttaactaatataaacacgcaaagttgctttaatatatattataatagaatacacacctaaatctaatagtcttctaaagaagacggtaactagcagtgccctatttctaaagagggcacaattatgataaactcaaagaaaccttcttcggtatactttaaattaaaattgataccttttcctatttcaattattttgtggagttcagatcaggatttgaaatgaattcactattggtgttgggtgtgggctaaactgtcccatgtgttcactgctaaccctatctcggaatataaggttattttggctatacgtctacttagaagggtggggggggggggatgctgcaattttttttacttggacttaaaaagaaatggcaatttttgcttgagcgttgtagttaatatattttaattccactttgtcttgagtattttctactgtcactgttctaactgcacgacattgtaaccccagactcaaatcatggcttgccgatttggcttgtcagcctatcggaactaggtggttgctgcaggagtttactatgataacaacaaataaaaataatatgtaagataacctaaataatataaacttacataagttgatgtgaattaaatttatatagcatgtagaatgatgattcaaatgtaaaagtaagatgattgtggatttatgagagaatagaagaatgaagataatttagactatacatctatgggctagaaaaaaagagatgacatggtttaatgagagaagaaaaatagcatgaactaagtgaggatggactatattaaaatattatgtgaattatgtggaatgatttgacatacttacattttaattctctaaaatttaataaattattaaattgtagataatatagcatgcttgtatgatgtttaaatataataattattagtggatgatgatgtaacatctttacatgttaagctttaggattaagaatagagaagccccgatggctggatacgtctgcaaaaatgcctctacgcatgtacaaatgtgttgcacaaataaataaaaagaacgggcggttttattctccaaaatcaaaataatcaacacatattacaatggagaaagcagaaaccatgaaactcgccacaaaagaaccatgaagcatcatataactaatataaacatacaaagtcgctgttaacatacagtggcgt

SEQ ID NO: 9291 - DNA, 33819 bp, Oryza sativa
  unsure (1)..(33819): unsure at all n locations
tctctctctttttaaggtattttaggcacaaaagtctctaaagtggcatttcatccggtaggcaatgtattgagtggcattttatccgatgcattgtattgagtgacattttatccgaaccaatcttagagagtggcatattttccgttttctcctacctttatgtataccacgggtattgccatggacacctcgtgtacctaatagaggacatcagcgtccttggatgactggacagaaagctcacgttcacaaatcacaataattctgtgtccttcagttgatcgcctgatcggtgattcggtgaaatcatcaaatgtatcatgtatgtagtatacatctaggatcgttagtgaccacgttgtgtgtggcatgtcgttgtcaatttgcccatatgcatggtccatcaagaggaaaagatgatgaataatggcggtccaaactccaaaggcgtgtgtgcggtggtggatagctgctctgagatttgggtcatgttttttctccaacaaaagttgaataaagattaaaattttcgtggcacgcttttcaaactgctacacagtgcgtttcgtacgaaaactttctatatgaaagttgttctaaaatatcatattaatctattttaaagtttataataatttaaacccaatcaattatacgttaataccaccttattttacgtaaaaaacttaatcttcatctttagaagaaaaaaacaccaccttgattgtaatccggtagtgcatcgtgctactattatcatacagttaattcatctagagaactattttactgtaattaaataatcagttgaataaatattatcatcaattttcaatacagcaagttaattgtattgtatattaaaaaaataaatatggcaataactaatgcttattgaaatacttagtattatgcatcagagtgtgactgtgaagcctatacaaatgacatgttgggctagttgttgtacagtgcagctactgttctaatttgttatagcacagctatggcgcaactgatgtgcaatactattactattatataactcaacaaagcacgctaaactttatgtcggttggtgctgcgaaatttcacatgtagatattggcttcctataggtttgcacttatggtttggaccaaattttcggtatcaccaatttattgcggtttttttggtatttttggtactcttttgcacacttttttttttaaaaaataataaatattgactgaatttgttttttttttaccaaattccaaaaagtttggaaaaatctgaaatttatgggcacgatagttgcttgccggggtttcaaaatttcaaaaaatttgaaccgagatttcaatcactgagtactaattgaccatgaacaattcgggacgatggataaaccaacatcagccaaaaagaagtctgaaaagctttaccattgctggaaaatgggcatcttactttcaccgtactgattgcacgtctagcttaaagttccaaagggtctaacgtgagtgtggcttgtccggttgccatcaaagacaatgcatcagtgacacgcaaggcacttcctccctggttcgctttctctgctaggttgccctcctggaaaaggaacggaaaatatacaggaatagataatctttggttttgtgggactgcgttaccactgatccgctgttgagtcattaatcctgcttttcaaaatgctccacacatggtaccgcaatatgtgtccttttttatcaatctcccgttctgtgtggagcattacagcaaaggatgatctcacactggacgtggcgtgacatcaaaccgtgtcagtttttttttaattattattgtggattgccagctctgagcgatcgagtacgtatactggaccagtccagatcattggctgccttgtcgtttttagccgcctaataaggtgcgtcttaaaatgcacattttgtttggaaaagaaataagtgtacaaaataaggtcttttagtggtctctagccgaggaatcttatttgcgaagcaatggtcatatgctagctatacaaacatagaaaaggatgagcaattcgtccgtgcttcaacacttcctcatatatttaaccttttcttatgattcaagggtatctttataatgctctatgccagtaatactgtactatcaaacgacagtagaaatgaccagatttataaattctactgccagtaaaaacattctactaccatgatccacaaacgaaccatacattgaatcaaccaatcattttttacagtggatcccagcaaaacagttcagtgcaaattatccttggagatgcccacgtgatttaaaacagacaaataaatcacattattgctagtataaatacttcaaccgatattgctagcacataaaagtgccatgccacacttggagaaaagtacagctacgcattacactagtttagggaaaagggctaggccacaatatgcacgaggtgaaacaatacactgtagagggaagtaggctacctggccttgcttcgtggagactccatggtcttgacaagttcaaatgaaaatgttaaatgattaatcaacgttagctcatttttgacgtgtgatgacattttctaacatgggattttctaatggtgatccattctgcgagacgtatgactactgactataatgactacaaacagtaagctagaagttttagggatgccaaatcgtcctgtccaaaccataagctaatatactttttaaattcatcagggtttgtacactggtaaaacgtcggtcaattacaagcgaccattgtttctgctgttgccactcgcaaagtcgcaagcatgagatggctggaggtaatcaaagtatagccatagctaactatagctccgggggccatagtaatctcactgattgccgctgtccccaaaaaaggacaggaaaaaagcccccacgcggccaccaccaccagcggcctggcctgcctggctggccagtctctcccacctaactacagtagtatggtcgctgaggtgagaccctaccgaacaacaacaaattcaacaattctcacgcgccgctactcccccgcacaacatcaaccagaaacgtctcctcgtcaccactcgccacaagtccaccgcagcacggcgccctctcctctcctctcctccgtctcccgcctgccgcgaaaccaaacctcgaaaataaaaccaacagtttccctcgcggccgcgcgcggagacgagtagacgacagcgaatcgctgccggtttggggcgcgcgcggatcgcggcggagggaggcaagcctttcggtttggtccgccaccaccaccacggccaccgcgcctccgcctcagcgtccgcgatttttttttttatcttttggttttggatttccccttgtcaaaactggcaggattcttctgcctgcccgagcctgactactgttgggttcgtgctcgctgctcccccacgttttgttttactagtcgccgccgcaccgaatatttttcccacctcgctcgccacgccgccgacacccgccgtccgcttccgcggctgccccgcgcgccggtgctgtgtcgccgggctgcggcggaggagtgccgaccttttcctccggggtgaatgagagagatgtgatcgtggcgaatcccgagctctgccgctgggctgggaggcggggaagggaggacaggagatggggcggcgtggaggaggaggacgagcgggaggcgcgtggattggtggctgtgtacttgcgctcgccgccaccttggtcgtctgcgtgctcgtgatccgtggagctggaggtatgtgcagtggtgtgctctgtgctgtgctggtctgctctgtgggagttttgggggcctccttgttggtctagtttggccaggatcatgcagttccgatcctgaatgctagagtggtttgcttgttagatttttgggttttgagctgccagaacccgagcctgcagcggaagtttcgtactattattaagttttttcacttgggtctctgattcttcgaattggatgggtgattgatgttgaggttgaggacgttgttgtgatttgatgggtgccctgattgtaacatctgctaggatcacagaatattgcagggtctgaagaacatcgccctcttaagcatacgagaaggaataagatggcacgtgtaaattagaaatacagatgcctcaattctatgcacctaaaatttgggggcaggggcgagtgttatgtccatttcgttagctaccttttttatttcctatgacaaatagagtgtttagctgcaaaataaactactgaagcttatttttcagaaggggcataagacagacaaattcaaatggacaaacttttagaacataaatctcggacaaatgctgtaactttgcatgcactatatatgtcaactgataatattttcagttttagttgccatcttattagtttttaacccaaaaatacaatgatcatggacatcactgatcatttttgaccagtcgtattttttgttagcaattcattgttaagttattgcccttgaacaaagctcttgccacttttatattacatttaagctccaaagacaacccattcgttctattatattttggtttctggattatggcttgctatgctgacaaattgttagctattctgttcatgttttgttttcaaaggtttgaagcaatatcatgctcctgccttcgctcgaaaaattcttctttccataacaagcggacatccacaagataacttgaatattgtacttcatccgtcacagttacaaaccccaagactccaaagcttaggtctgaaagttaatggacctataccctgagatgctttcatttttgtttatcatgtcatgtattctgaactatatgcaacttaccatatttattattttctaggactaaatgtaaaaccacctgcagcaactagcagacgtgttaacgtacagcaggaactatatgcaccaagcccaacgatcagccacagaggtacattcagaattatgatttggtttgttatcctatatatatctataaagttcatcgccactaagtgtagtcaatgctatttctctcctctcattaagtcacatcacctcaattatttctagcccttgatgattgatctatggtccaaattatcttcctccttttcttctcttatataaagtcatatcaccttagttttgcctttggatgactaatctatattaccttctttcttttccttctctcatcgagccacatcaccttagttttgtttttgaatgatcaatccatatatgattaaaatttttataaaccatatcatctcaattgtttgtagcttttttattagtcgatcaaagatgaaaattatacaaaatgtagctatattacatgttatttctactaatatcacacaaaactcccgcagcaatgcatagggtttcatctagtttcttgaaattatgttgagaaaaattgttacgttggttttccctgaaagtcgtgtattctaccctagtgggttgctttgcacagatggcttatctcactgtctagtgtctaagcaaactttttttttaaataaaggaagctttatagatctcaaacaattacattgatacaattaatctaggaccactcctggcctctgtataactaattaggatgcgcacgacctataattattgcaaaaaaaaaaagcttcattcaccaccatagcaacacttggaccgtgagaaaggccctccaaaagcgatgcctccaaaagggaatggcaaactaagcaaactgtgctgcctacaatacaacctagtgctccctgtcattcttattagtctccaatcagagaaatatccccatgtatcgagagtccaggccaattgttggttagcttgatgttgaattctatctgcatcaatgttactgtcaaatctaggttgaaaatgatgaaacctttttgcttattcataggccaatctaccctaccttcacatatgatttttccaagttacagtcaaatctaggttgaaatgttttatatctctatcctctccgtaaggcatgcaaccaataagtttgttgtagaaataataataaaaaaagagacataaggtgatgggggcaaaccagcaaacccccaactccctttattattgactagcgttaataatagaatcacatagattctagccaataatcctaaggttactatgccacccataatggaatgaaagacccttgcctactgattcctgctcccctgtggtagcctcatagaccaaaagtagagccagtaggaagtcatctgttatgaatatagcttatattgaataatagccctaaggaggcaatatataggagtacaagagagcgtatatagaaacctatatatgtacaagactatattccttaacaacatgaacaaaacctgtgtaggattagacacttttttgctctagctaatgaaatttcattgcaagattgttataagcaaacaatcatatctattaatgcattccaaaaatagttcttttatgatccactgaaggtaccttctagtgttaacttttgtacttcttgatactccccaaggacataaaaagaactcttacagacacatgatgtacattacctgttgcttgttcatctacttcacaaactttttttatagcgacacatcctatttataaccggcaggctcgtctacttaactttcatcgtgccttcgtccaccaatactcaaagcatctacccccattaatttatccatatatgagaagtatatcccacccattcagaattttatgaaacattaccttagttcatgctgaaattaattccatcaatgtatgacgcaggtcttgctattcctccacttccaacaacttcacccccagttttcccacctcccatcagatcttatcctccacttcctgcaaataagccataccccaatagtatgtctctgaagcaatttttatacaagaactatatattttttatctgcttaccattttcctgtactgaaatatgcaggaccagcagtgtctccagcatcaataatccatcccaccaaccatgggaaggcccatggagttccaattgcagcacattcaaaagaaaggcatcatcattccatgcttgtaaataatacacatggaaatacccatgcaggtccagttgtggcacctccaaagggaaggcatcaccattctttgcctgtaaataatacccgtgtaaaaggtattccaccgactgcacaactaccataatgaacctattgctggtaataaaatgattcatgaagttgtatcgagcaggacctgcctattctccttcaaattctcccagtatccatagaaaacatggcattccagttgctgcacctccaaagcaacattccagcaatttaccaccttcacatcataggccccacaaaggtatgctgacagtaaaaaaaaaaaaagtactcatctcactaaggcaatgtttgctgcaggatcctttcctgtcataagccctactccacataaagctgataatgcttctgcgacgaaacatggacgttctggcttacaccatagtcctgcacctgcacctgtaggcttgcctccatctgaaggaaatgcacgaggaaatcctgcgtatgcaccacgtcatccccatgaatatcactcgccttcaaattctccaggtcagttagacattcttgaaatttctccttttcctttatgttgtctcatttgttctaacctctgcaaatgctccagtcataccccccctaagaacaggccataacatgcacggccttctatttatcatgatgttgaataggattataggacactgagattttgcacggtgatgcaagaattatctctggtatacttgataagagtacggagattgaacttacaccttttattttagtttgcaacccgtcctaccttgctatggtgattaaacacatttggatatgatactaatatttaggtccacaaatttccaccttccactaagtttatctaaatgcaaaagttttatcttctctcaacttatgtcaatcccagtagggccaatttagctcccctgttgcttttataccaatttcaccatataatttgtttttgttattttccatgtcattacgcctatgcagaacctggtctaccacctgtgaatccgcccgacagtcatgcatttaaaaagcccaagagtttggcaccagcaccccaatcatttccgccaccgcctccgagttcatgtatgctacctgaggatactatcttttgtatatgaattcatcaatatatgtgctctatccaatcatgtaagctactcagctgtgatccattcatcttttctatttgccagattgcatggcgttaaattgtcaagatcctctgaccaatagtctccctggaactacatgtctttgtgtgtggccaataaaagttgagcttcgtttaggtatagctttgtacacattctttgcattggtatcagaacttgcacaagatattgcatctggagtgctcatgaaacaaagtcaagttcgtgtaatgggagcaaatgctgcaactgaggacccagagaaaacagttgtccttattgatcttgtgccactgggagaaaaatttgacaaggcaacagcacttttagtatttgaaaggttttggcacaagcaggtcaacataaactctatgcattttggaaactatgatgtgttatatgttacctaccaaggtaagagctatttgtaatttttattgtgtcattatacatattctctttgttaattcctataaaccttattggattttccgatattcgagtaaatccttaattattttgtttattattcaggtcaatcagttcacttcctctgtgtgtgtgtgtgtgtgtgtgagtgagtgagtgagtgaaaccactggcatgatattctttttagccggatcggccaaaggaagaggctgatcaaatttcattaagattgatggagaaaaaaaatagaaattgtaaaagagtacaacaacagtagtctgtcgaaactggtggcaccccagctagctgggtaaccggaaaaagaaaaagggtagggatgggctagagactagtcgccatctcctttcaaaattcctgctgtcctccagacagagatttcatctctaatttcattgacatagtttgttttttagaaagggtcttgatatggttactttcacttattcatacaggtcttcctccgtcgccaccaacagctcccaggatgaacaatggtcttagcaatgttaatgatccaaggttgcatccacttgctgttgatgtgggaaaccacagagaaacaaaaagcaggggcataattgttataattgttctttcaagtgtctttgcttttattttatgttctggagctgcgttggtaatttgtttcaagattagaaaccgcaaccatttaactgaagagtcacctatgccaccgaagcctgcaggtaacaagacattcaatccatgcagtgttgctgtatttatctttattagtcacatattagaaaaggtgtagcaaatgcaatctggtgaaacaatcattgtcattctttccatgactatgggtgagttcgctactggaggtttccaaccgggaacagtgcgcgcggaaaacggagcggttcattagcgcgtgattaattaagtattagcttttttttcaaaaatggatcaatatgattttttaaagcaactttcgtatagaaactttttgcaaaaaacacaccgtttaacagtttaaaaagcgtgcgcgaagaaaacgagaggggaaagttgggaaccggcagtgccgaacacaccctatatccattctgaggccttgttaggattgtttgattattttgtagaaaaccaatccacataaaatgatcattcgttttctagctttcaagaactgagaagttatgtttcatatttgtatggttgaaaagtaatattaccttgaaataatcaaagaacaagagttatatttcatgcttaagtagtgaaagtacttggaacagctttgaccaaatctgaaaggattatatttttgcaaaagttaaaaactgatgctaaattattttcttccatcaatgattgcattggaaatgtaggtcctgggtctgcagttgttgggagcaggctaggaagcagacctatttcagcatctccatctttcagctcaagcatagtgacatataaagggacagcgaaaacatttagcttgattgagatggaaagagctacacaaagatttgacaactccagaattattggcgagggtggttttggacgtgtttatgaaggtattcttgaggatggagaacgggttgctgtcaaaattcttaagagggacgaccagcaagttacacgggaatttttagctgagcttgagatgcttagccgattgcatcacagaaacctggttaagttgataggtatatgcacagaagaacatatccggtgtcttgtgtatgagcttgttccaaatggtagtgtggaatctcacttgcacggtaatattttgttctctttttttttcctctgaacagtttctaaggcatcatttgttactttatcgtgtctattttgcttggagagatgcatcaaaccagtcaagcactttgttgacaagaaattcataattctgccctgtagataatacagctgttgtcgcttataacaaagtcacacatgtgaacactgtgcactaagacatgaaatgtattgtgcactaatctcctgttacattatgtttttttaagggaatcccattacataatgtttcttaagggaattcctttccatcatgttgacaaatacaaacttgcattttataaaattttgacatgtttcatggattcatagtacatccatattctattctccttaataggtgacttttttggccagacataagtattttggccggtccgtaatagctaactagaataatatggttcttttttttaaaattccaagcaggatcagataagggaactgctccacttgattgggatgctaggcttaaaattgcacttggtgctgcacgtgctcttgcttatttgcatgaagattctagtccccgtgtcatacaccgtgacttcaagtcaagtaacatcttattggaacatgacttcacccccaaggtgtcagactttggcctagcaagaacagccataggtgaggggaatgagcatatttcaactcgtgttatgggaactttcgggtaagttttgatctgaaattattatcttactacctgtagttggttaacatcctcaccttaaaaagattatgaactctttttaggtatgttgctcctgaatacgcaatgactgggcatcttctagtaaagagtgatgtctacagctatggtgtcgtcctccttgagcttcttaccggaaggaaaccggtggatattttgagacctccagggcaagaaaatttagttgcatgggcttgtccttttcttactagcagagatggcttggaaacaataattgatccatcacttggaaatagcatcctattcgatagcattgcaaaagtagcagctattgcttctatgtgcgtgcagcctgaggtggatcagcgcccatttatgggtgaagttgttcaagctttgaagttggtatgcgatgaaggcagcgagttcaatgaatcaggaagtttcagccaagatttacatattcaggattctgggattataagtagagcaagcctggatgtggacgtagaacctgttgtatctgctgagctgttcaatgcatcagcacattatgacactcttgatgcatctggttcttttcgacgatattcaagttcaggtcctcttagggtaggtagaaccgggcacaatagggagaggggtttatcaactggtagctcaagcgagcactgtggtacacaaagattcaggatagattcagagtagtcagcttgcaggcttcttttgacgatgtggggctgtgttcattggcttcttttcgcaagccacatttcatattcattgtgaatatctgtgaagagcactgagcaatatcaccagcttctgccgggacaaggaccagttttcgaagagcactgagcaagactgcaagagtaccaacatctcgtcccgtcccgtctctgtttatacagttctagagatctataaagccggttccttttttttagtggaaagtaaagccggttcatcaactgcggttcatcaactgtaaatgttcatgtaccttcccaagtgtagccattcctttcgcatggaaggtaagtgaaatatcagatgaaatgaagggtatttttgcctgtcatcctttcatccggttcaatgaaatggagtcttgcatgatttactgcattttattgatttgtggtaccaaacagatagaaacgtataccagttgtaaatctgcgaataaatagccaaacttgcataagtaggccttgtttgacacttagaaactttagcgaacaactatattcttgtaggggttaaataataaaagggaaaattgaaaccatgccattataattttacaaaatttaagatatgtcattctgaccaacatgtcattgactcatatgggtcctacatgtcattgagataccgatgatatatcttaaactttgcaaaattataatggcatggttccaaattaccataaataaaattgttgtgcgataaacagctaaggcaaccagtggataaacttaaataacattcctgaactattcacttggatgaactagcgagtcaacttggcataatcatttcctcattgacaacttatcctaccacaggaggccgggatatattagtagccttcctcaacaagtacgtgtgccccccacacctggctggagtaaggggatacactataaattgctaggattgcatcaggttacatcaggtcatgatactttgtcggccatctcccagatggggaaaaaaatcaatattcatccatccaatgctgaatacaacaccttactggaacaaaccacactaaaaaaaatagtggtggtggcaggaggcaagtatttcatcaagtagatgcattgccctacgtggttacatccaaactgtagggtttccagcactaaatcatttcacatgataaaaaaaaaactggcaatcatcagagaacatgaacaaaaaataaagattgcagtgggcaaatatgaactgcaaaagactaacaagcaaatcaaaccgattaaccgataaacaaaggtgagaaagaactacgacagctagggaatgtatacatgtcttgcgagttttaggttgctgaaggagcttccttttcctcagctacagctggagcatcttgttcttctgctgtaactacagaatcttcctttgctttgtctagacccacagctaccgagagccaatctgaagcaggtgctccagtttcaggagccacatttccgtgtatattcagaggagtgacagatatctgtaggttgtaaagagaggtatacggttagccactttacacttatacatgcatgtgcacacacagagcaagggaaggagggctcacaaatccattctccaaagctctcaaatcgatatcctcgtctaagcattcatgctgcttttcagtgaactgcattcaacataatcagagaagaaaacagcgctcagtaacatgttcatatctacaaaaacatcaacgctaaaaacatctgtaggctattcacaatctccatatgagcatattggcctaatttggtactgtcttaaagttcatatgttctatacatggtcggacaagtcaaataatctttggctataacactctggaagatatatttacctcagcacggaaaagcttcttcactacttctcgagcctctgctttccctgtagatgcaacagactcaacctcgacaatcttccgctgagcattaattctgcgtgcagccccctgtagatgaaaaccacaacaaatttgaggatgtgctaacaaggacacgtcaaatttctctgaaacaaaagcatggcttcatactgctgcagatgcatccttcccaagttgtgcgagctgaataccaaggctttggtgcatgcccatgaagtgagtagcaggtgtaggtctgcttgtggacacaccttcccaactttgggcaggacgatatatgctttgcttagtcagcttgaaaccctgatatcagatatcaggagagagatgcattaaagaaaggctattacattaaaaaaaactaaacgagcagtagatctttttatccatcagtcatcacaaagaatgcaaactaacacaagataaaacaaagtgggatggcttcgccagtttcatgatctaaatttcaaataattaactgttgctcatccaattaatagtgttgatctcctgtacagatatttgcatgggcatacaatctgcatatactatataactttcccaacaactagtacacacctgataaataaggctaatggatatttttgcatttgtgggcaagccagtaaggtaactagtaccaggacgactaagacagtaagcattctgtacagatcagaaatcatggactcacgatgcagaaaaatagcgaagaacccatgaccattttgaagccaaggaaatatgaatgacatgtttcagcatatttggaagatacgaaagcttcattgtactaattcttagcaattcaatcatcggtgaggtgcaggcagctgccatgagattcctgaacactttcaaaaccttaactccaataacaaaggaaacagcttatgttctgttttgaataatgtagaatcttgtttctttgccctcaaggctagcctctcaaggaaatatgtattgctctagtccatagtattatagcaacagcacggtcatgtgctactgtacgtttataagccaatgttggagaagacaaggagttggtttacttctatagctatggaaattttggcctatggtgctagttttggccctaaactggagttcaagattcagaattcagttattagcagaataaccttatttgtagttggtgagcttggaaccccaatgttcagtaagcagcctctgaggaaggttcctttctcaacgccttccaaggcagcgtgtatcaatggtaggcaaacctcagcagcatccttgaaatcactatctttgctttcatccttcttcctacttgcacatatccagcacaaattgttaccaaatgtgattgcataaaccaatttatctaattatgaaacatatttgaaatactaatatcacaccattaaggcacacccaccaattcaatgatattgcaattgaaggaacatcatacagtaaggcctcccttgcagcagcaatggcagaagaatgaaacctacacaattttgcagtaaattaaagaacaggatagaaatcagacaatgaattgggcatttctgaaagaatcatacatctcatatccacagttcgcccctgcattgatcccactgatcacctataaacgaaacgaaaacatcctcaatgatcacaaggttaggcgatcaagttcttacacgcagatagcaaacacaatactaaccaaagcaggcgccgaccaagagaacagcctcccagataatgccaaagagacgcaatccaccggtgtccctacaataacaataatcgcaatgagatagaaacaccaactctcactgtataccagcaacagtgcgacccaaatggatcgaggaaaggatgtagaacactcacctgatatctcgaaagctttcgcccctttgaaatccaccgatgttgctgtaatggtctcgcggatggtaatggaatagccgcaagcaggcttgtcccttcacatcatcatcaagaaaacaatacagattatttacagctgggaccaatggattagttggttggtagaattcgcaacaaatccagacaaaacaaggtattttcccgaggtcaaagagaatatcgtaaggaggaatcgaggattggggggcgcatacgattcgggcgcgcatacgtggacgtcgcatcggccgccggcgacgagggagtcgacgagggccgcgagacccggcgcccggatcccgccggcgcaggtcaggagtacggccggcttcgcgggaccttcatcggccacgggagcagcgccggaggactccgccgcctccggtgccggggcctcggcgccggcctcctccgcggccggcggcggcggccggcgcgccgcgaggacggactgcaggttggacacgagcgcggacgggagcggattgggcctcggcgcgtcgtcgccggagctcgcggccatcgggcttcccttcgcttcgcctcgccggagaggtgtttgggcgtggaggagagagagagagagagagagagatgtacggacgaatgaagggaagagagagaggaggggttggaacgcgaggggggaagagagagagagagagagagagagagagaggaaatggactgaaatgggctgggcgcgccatcgcatagttaatggatttctagaccggggcccgctttacgtgtagagggaggcaggtctctgttttgacctgcacagatacgtgggaaagcgttatctactcgacgactactcccaacttgcctcagcaaagcgtggcaagaatccgtgattctcccgttccgataccaaatccactatcatcaaccaaaataatagttttactggtattattgtgaccaacatgcgggcatgaacacggaactctgtggctagtatggggtggaatcttttcttaacatggattacaaaattttacatatttttttaccaacaatggtacagcctattttaaatgaaaaaaacaaatacaccaaaaatagtaaatctagagataaaatactccatctgttctaaaatataggaacttttagctggttgggacatatcctagtactacgaatctggacaggagtagatatgtcccatccacccaaagttgctatattttgagacggagggagtagttgtaaaatctaattttgatgcagtaactgagtgtagctataagttaggtataaaggaatgtaaatcttgatgtatgatccaatgaaaaaaaactgaaagatagaagtccaaaaaacttttgttcgtgaaatatcaaaactgcttaataatcagatgatatgaaagtgaaacgttgctgtgttgaagatgcaggccaatgtagtgggagaggtactcgttgtagtacaacgttagtacgtaactacgctcgtacggtgcaggatcagccggatcctcccttgaccacgtccatctaagcgagtgggccaacccgcgggcgtaaacgctttagggttcgcccgtccagattaattcccgttgtaccaccaagcacgaggacaaacgcaagacgagctcgctcggtcgctcccctcgcccctcgacacccaccacaccacgacgactcctcgtcgtgcgaggtgcgcacgttgcacgtacgtagccgggcgggagacgcgcgcgcgcgcggacgcacggttgctgcgacccacccaggcaacagtcgtcgtgggagcgcggcgctagctcactacccctgccacccccatgtgcctccgtctcagaactcatgtgagaagccgtagccagccagtgcggcggtcggttccaaacttccaatgcctcgccgagcgatagatcggcagatcgccccgcgggggtgggtgccgtggtggactggtggtgggggcgggccggcctatctcctcgtcggatccacccgcccgcgccgtgcggaaaggctaattttagcctgcggctggttggctggatcggtcggtgaccggggtggccgcgcccgcgcgcttgggttgggactttttgggagtcctcgtgccaaggcaaacaaacgttggtggaccatcaacgggacacgtgctgtggcgacccgatggaggcgagcgttgcgtcgttttctcttcgtaattgcgtgcgaatttatttgcggagcccccgagcctctgccacaggccacagtggaaccgtacgtatgcaccatatgttaatcattcaggatttcagatgcatgactgcatgagggctctctcattaacgagtaaggagagagatctggagatctggtgctgacaatcattcgtttctactatactgtgtagcccccgtgccgtagatggttgctggtagtttgcagatcacccaacgaataaaataactttttttttctggcaggctaggaacaaggaacactggcgatctgtttatgtgactaactttgccaaaccaaattttaggtaaactgggcacataaccacacgttaatcaagctcatgtgaaattgacagttgatatttgagattatatactaatccctctgtcccatttcaagtacaactataaatttccgtgtccaactttaatcattcatcttatttaaaaaacttttataattaatatttttattattatgagatgataaaatatgaatagtattttatatgcgacttatgtttttaattttttaaaaaaattaaataagatgaacggtcaaagttgtacacggaaaattatctctgtattttaaatgggatggaaggagtagataaaattggtatggcaactcacgattataataacgaatcaaacgacatcctagaaagttctggcatataagatttgacctggtaagttaagactatgaatcaaagtatttttgtatccggccaataacacgtattatgagcttggaagccaacctactattccctccatttcatttcaaattatgagttgttttaatcttagtgtcaaactgcttcaattttatcaaaatttatagaaaatgtagtaatattttcaacgcaagacaaatatattatgaaaatatactcaattataaattcaatgaaactaatttggtattataaatattactatatttatctataaacttagttaaatgatttataatctgaaacggagggattagctacaacttgtgaagttttaattctcctatatttttcttctaagattttttattttaaacgtacggttgctgagtcgatctccatttttcctccacttccttagttatgccacttgtttaatgaactaatttatttgactttgtaatatccttttgtctgttcaagttgacgtggctagcagcctagcacattgctgtacctactactcctatgttgttatgaaattcaatatgcattgattacatcgatgacattccaacacacaaggggcgcaatcgaattaccacatccgtacgtttgtgacgacttagtatttgtttgtcactcgatacgggcatggtgataaattatcactcgatacatatttgtttgtcatgacttaaatatacacaatcatataattctctcggccggtactcctacaagattaatcagtttgctggacgctattattaggcatttccatgattaaccaatcgttgccaccttttcaggcctacccacaaattatttaagctatatgtagcttacgcacaaaacacctgtcatccacatacgccaccttaatttagcacgcaccagagaaactaaaccgttcactaactaaacacgactagctagctagcgaacgaaacaaaacaccaggcatttatacgttacgttgcatcttgagcaagccgcacttgcatagccttgggccaaattaattaaccggcagcacgttgcccggccggttgatcgatcaccaccagcaagctagagatggcgagacgggctgcatcggtggcgctggcgtgcgcggtggtggcggccgcgatggtgctcccggaggcggaggcggggcagaactgcatctgcgagtgcgtgaagctgtgcatgcggacgcggatcccgagcatcgaggcgcagtgctcgggcaagtgcagggagacggcgtgcgtgcggagctgcgaggaggcgtgcgcgcgcaagggcttccccgccctgcccggcgagggcatcggcgcctgcgagctggagccgctcacccccgacgaggcgcacatgctgcactgatcatcgagtcaccaaccaatcgatggcaagcctcaccgccgtttccgtctctgtctctgtcgctgtgtatgtttctgtctccgcctcttctgcgctgttgtatacttgtatatgtgtactacatctaccacaccggtcaaagtgacattccatcctggctcatgtgtcgcgctacatacgatacggtgcgtaagcgtaacatacgtttgattattgtcagttttgcttgctatggtcgcggttgcgcactgacgggatcgaccacatctctgactctgaggcccagctaacatgtttcctgggcccgtcttaggaagtcgatgcaacgaggcttttagcccaaataatagtggacatcccttctgctgcctttcaggtttcagcccaaatagaaccgtgggctgccagcggcgctcgtgggtctacgcatgtcggtccgttgcgccgcagcagaggttgctgccttgcctgccactgtcatgtaagcaaattttttttgccgtttccttatcttatttcgttcatgtgtccgtttatctttttttttttgcgcaattaacgagtccgtgatcgactttgttggcttgctgctatctgaagctctgaacctgttgagctcgtggcacgccattcgcttagtccacatcaaagacatttgtacactgtagtgcacccttgtcctttacctacggaaaatactaatacatgcatcttcgctcgttagcgaaaaggatatgcttgtctttctaggaaatgatctcttcaagacaacaaatccatgttattctagaaatgagggcaatgatgaggagcaaattgcattggttgtttctgttccagtccatatatatacacgctcaattagtaagagctagccaaaactggcatatatactgacattgaataggtttttgcttaaatttttctagcagattttgttcagatgatgttcgcagttagatatcgctcgttgggtactttttaatgagatagtacgagtccccgacgggggaaaaatctaaggcctctttgattcaaaggaaatttataggaattttaaaggattttatttctatagaattttttcctatatagacctttgaatcaaaggaatgaatcctatataatcccatgaaatttctatggaatacctctttccatgtaagttttagaggaaatttagcatgaggttctacctcatgttaagaatcttttgagtctttatccctctttaaatttctgtgttttttctatggctcaatcaaacggtcattcctatatttttcctgtattttacaatcctctgttttatacttgtattcttgtcagaatcctatgtttttcctatttctctgtttttttattcctatgattcaaaggggcccttaaagctcatttggcacgcatgattctcaaaatagatgaaaaaaaacgctggattgaagcgtcttaatacatcaaaacctatggtttgaaaaaaacgtaggagaaatgagcctaggaaaataagagagtcagaactgatcagaagagatagattgacacaaggattttagaggctaaacctcacgtcaaaatcactagtttcgaactaatctaaagaaatttcatataatcttttaatagttattgatttgatccaaaagactagtgtagggtttgttcattttggagaaaaagaaaaggatttatttttttaagcattcggttttaaaaaagaagtataggaaattttcctttcctataagttgtagagagaaaacataaaagaatatcatgcatccacttaaatctcttaaaaaaattcatgtgaattgacgtgtgcatgtctttctattccttgaatttttggttgaaatttctccaaactgaacaaacatgtgattggaaagtttttattagaattaaattcctaagagcaggtacaataacagactataagacagctataaatatattttaaagagataaagaaagagagaatagcagcgggctatagatcggtagccagctgcagcacggactccaagacgtaatgtgtgtttgacaggtgggaccaggtattaatagtacagtaaacaactattgtatgaattattccctccatattttaatgtatgacgccgnngacacttttaacaaacgtttgaccattcgttttattcaaaatttttgtgcaaatataaaaatatttatatcatgcttaaagaacattgatgatgaatcaaggcacaataaaataaataataattatatatatttttgaataagatgaatggtcaaacattaaataaaaagtcaacggcgtcatacattaaaatacggagatagtagctagtacattagctatagataatttagagatagtagcgggctatactattaaacttgctgaaaggaaaaaaaacgtttgttctaaagaagcttcgaaggctcaaacttcccgagccaagctgaaacgactacgagcatccaccctcgttgtagttacgggcccgggacttccgttcttacgaggaaatacttaaaaaataacatatacttccctctgactgtaataaacttttggagcatagttttgtgttcttctttttttttttttacttcaaagagggaattttattgattacggaaaagaggattacattcttggtctatcaagtctatgacactactagaaaaaacatttttcccaacgtaggggtcttattttcgcaggcggacatgacacttagagccaaatgaccgcctacaaaaatataaatcggggtgaaatttgatgtccgcccgcgaaaatatcgcaggcggaccacttaagtggcgcctgtgaaaatgattttcgcaggcggaccacatgaggtgcgcctgcgaaaattagcatggtatatatatgtgacagatgggctgaaatttttctaagtcctttcctctcccctcactctcctctcctctcccctctcctccccttcacatctcctctcccctcactctcccaccggcagaaggggcggacagcacggggcggctagcgtagggcgggcggcgactcccctccctcccttcctcccctccagatctggccgaaggggggggagggggaaggccggtggccgggcgcgaggcgttggcggcgtgtgctcccggcggcggcggcggcgggcgcgtccctccctcccgcggcagagggcggcagcagcgaggagggtcgaggcggcgcgtctcccagcccctccctcctagatctggccggagggggcagggggagagcggtggccggtggctcctggcccctccctcccagatctggctggaggggggtggggggagcacggcggcgggctgtggcggcgaggagggtcgaggcggcgcagccacggcggcgcggggggttgaggcggcagcggcggcgcggacgacggtgcggcgcggacatgcagtggcggcgacggacaacggctgggcggcggccgtgatttttttgaatgtttttatttgctttctttgctacaattgattcggtgattttggatgaattgaatggattggatggggatgaagtggatgaattggatggggaatggattgggaacgggaagcgaccaccgtccggcagtggctgcccattttttttagcgctcaaagctattttcgcaggcggacctgttgcccgcctgcgaaaatcaactatttccgctggcgttgaggtgcaggcggacggcttgtccgcctgcgaaaatatgatttggccgcctaggaaaagcctttttctagtagtgagattcttgcgggagcacacaacttccactcctcacacgatctacctcatagccatttgagctagagcatgagcaatcctatttgcttccctcttgatcttgtaaacctgcacactttgtgttctgctaatgcttctaaggtaatattggaacagcatttcggtcgctgcacctaattaattatccctatgtgtacattcatatgttggaaatacatacttttactctatttatcaataagaatagcgctatctatgcacattaggaagcacatatacatatatagtatagtaaatcagaagttcaactgcaactgatacctcacccattatatacgtacttaattaccacttaccagtcctacacatttatatgaaaaatataaaaatgtatctacatgtaacttatgtgaaacatatataccctaagatacatgttattttataaattaagatctatatatatatttgaaacttaattaagacgagaacgagtttataaacccgtgtgttacgcaagcaccgaccagaatacccccgaacatgcatgcataattgcatattcagggaatccagtgaggttgcatggcggtgttcgccgagaagctgtcgacggatgaagcactggccgccgacgtcgtcgacgaccccaggatggcgtccatgaagtccatcaccggacccatggccggatcggccaagaaagcgccgccgccgccgcccttctgttcgacaaacgccgggaggcaactccgggccacgacgccctctggagccaagagatgatcacttggcttgcactgacccccgacgatgccagcggcgccgttctccagctggtacgcctccgctgctcggcacagcctgatgaactccccgtcgacggcggcggcgtactgaaggtcgccgccgccgcagccgtggacgccgtggccggggagaaagattggctggtgggagctgaagctggcccatgccgcggagttgtacacggaagacggcggcgattgagtgacaccgtgagctgcattctccaccgcgttcagtgacgcagctgcgatgctctgtcctgctccgtccagaatgttgtagtacaaatctagatcaatgcaacaaacatcgagtcgatcagtaattattcagtattcagtacactattacatgtttgtcgtgagtaaattatattcgtactgatccatgtgtaaactaacaagaacgaaaggtatgaaaattcatatgagaagcagcattttttcagaaagaagtgaaaaatgtagcacaggttttacctgcagaggaagggtgcagactacccacggcctgggagatgagcttcttcttgatggtggagttccagaagttcttgacctcattgtctgttctaccaggtaggtgcttggcaatctgagcccacctgcatgcaatgcagtgaatcacagtgacacagcatatgttagccagctcaaatctcgatcgattgccacatttgcgccccgtcctttgtctcagatcaagttaatgcgattgtgcattactcaaatataggccaaagcgtgcaaagataagtaactgtcacactgtcatacatgggacgttacagcctcatcacatgatgcagttagcagcaacgcagagatgatttgcaggtagagactgaccgaccaaggattacctgttgcccagcaccctgtggagctcaatgatgagggactcctcctgctgcgagaagcttcccctcttcaggtcaggcctcaggtagttgatccacctcagcctgcagctcttgccacatctctgcaaccctgcatgccatcaacaatacatggataacacgttcaccgatcgatgccataaacccaagtaaactgactgaactgaactactaagctagtctgaagaaactctgaactgaaactctgaactttgatctgcgactgaaaaaactatgtaaacgtaataaagcacttaccggctagcctggggacggagctccagcagccatggccgtgcgtggagatgtacttgacgagcttctcgtcttcctctggtgaccacaggcccctcctgaccttctgcttgttgcagcaggagtggtgccccatctcccttgacctctcactctctcgctgtactccgtgtaggctaggctcttgatatcctcttcttcacactgccggcagtagtaataccggccagaactactcgagcttttcagtagttacatggttattataaagaagagaggagaggaagagagagagcaaatgagcaaatacgccaactgcatgcatgccattccgctacatctaagggcaggcagatcaaaagcaaggagaagaaaagctgggcctgaaactgtgcatgcagttgagtcgatcgtcctagctagccaggaccctagctaacctagacgtgtgagctccatgttacgtaggttacttcaaaagtgagtggctcaagccaagtgaggggtactggagtgatgagggtgaatggaggagggcattttggtaacttaaggccccactgtgagaggaagacttgtgccatggaattgagctcctatgcctggttagttttgggaactcctgtactgtggtgtaagtgtgtgatgcctgagttgggtgtgtgtgtttgcaagcgtaaattttcaccgctctatcagtacggccataactgctatagtctgctagtagctttcttcaaactactaacatggcagcagctaccatttagactagtatcaattcgtctgtgtacatctaatggtccaaatatgttcactctgatctatcatctatatttgtacgagagcccaaattgcatgtgtatacgttttgtattagcatgcacgcaggtaaaaacaggcattacctagtgactatatagcactaaataaagcaatgcacgtagtgccattcattcacctttgacaattaaacgatcaagagctgcgattctcttgtctatacgccctgccagagagaaagacaagggatcaggatcaactgcaacagaaacagaagatctctggctctctgtacgtatgtgcatgtcttcttaggtagcttgcccgaaaagattgcagttgtaattaagccgagtaggtggcgatccgtatttgccagcgctctcgatcggcaaagtattcgttctaggtaaattaaggaccgatcctaagcatgtatagctaggtttatcgatctgaagaaacctgtaatgtgtgtgcactctgaatgattcatgtttgcagacacaattttttagctgatgcactaactacactatgggtttatttgatagagtttcaactcataaatttagctctagtagttgaatctagagtaaagttgtaaaacagcctaattaaacccagctccgctctcattttaggtagagctaaaactgtttggccggatggagttgaagctagagctgtgtcaaataaaccctatatattttgcaacgtttatttaactctcaaattagcttcacttcagtttttgccgttgcaaccagtggtcgacacaagccgatgtcaagaggctaaaggcaatattataggttgtagtactagtaccgtagtacgtacttgctggcgaaagattgacgcgaaagaggtgagcggtttcggacaagaaaaatcgagtgggccgggcggggacggcagccgtgcatatgcatatgcatgggcctcttgcagaatagaggaaacgcgacaacgcgtagtagcattcaaccccgtaccaacgtacatacgcgcgcgatcgctcacagagtcgtcgatcaccccgtcgtcgcacgaccacttccccactcctctcgatagactccggccatgatcgaagcgtgcaccatacgggtgtggtcgctcatgcgcacgtcgctcgtgccatcaatgcgccggggacccgcgctacatgtcatggcatgtacacgtgctcgtactcgtactactaatatactccatatgcatggtacataatacatgccacactcaaaggtcacagctttgctatacaatgctatatatgctacaaacaatcatgttgtatatatattgtgcgtatgtaatacgtgcgaaacgaaatgatgagaggatttgcttgtatttacagttaattatccttttaatagtaaacaaagtaactataaataacgagatatgttcgtcatgatttcgttaacatcaaaatgtgtcggttcagttcttttaaggtgcgtgtttgtgtactatgctttttttgttaaaaaaaaaatgtcgtcctagctagcagcggcatgtacacatcctaaagacgaggaagagatggaggtacgcctgtaccggccggcactttcacgtacacctgcatgataggagagcaaaacggcatgcaggttaattaataaacaagttgcatggccgcccggtacatgacacaggtgagcatgcatcaccgagctgaggttaattatatcaggttaatttcctcctcggttattggattgtttgcaaatcgttcgtacctgccgcggcgccggccatgcatttgcagcagctagtggccgatcgatcacataagtcagtcacatgtgtgcctacttggttgaatatcagtccagttcgtccgtgcgtacccaaagatgggacgatgtgattccccaaccaccgcctacttctactactacagcatgcagcatgcatgccacgcccgagatgacttggttcagtggcaagctattagcccctgcagcctccttttcgatctgtgtttctctttctgtgtttaccccctttgtgtacgtgctacgtgctctgtttcatttgacgataaattaagtattagtcgcgagctacagtagctgttttcttctctccctctttgcgttaaccataagcaaacaaatggcacagcgcttgtacgtgaggcataatttaagccgatcgatgagctttgctatgcgtacgtaactaggtatatccggtacgtattcatagtgcccatccatcggatgacaaatgtccggtcttcgggaacggcagtacgtagaaactgctccatggtgcagaaagtacaagcaaatataatgcagctcttgctgcacttgtaagcgaagctacggaatacacatcctgctggagagacaaaaaatgcaggtatatatcttcatgaaagaggcgcagtttcttttttttttctctccctctcttcgtcttttcagttatcactgtccataattagaaaattgtcagccacgtacgttacgtgcatgtacacagctgcacgtgcgattgcgcctccatggactttcggagtagaaagtcacctgacgtgaacgggttgtcaaaaaaaaaaaaaaacctgacgtgaacggtgcagaatcaatctccccgccgtacatggagcaggagaaaaggagcataaatagttcgttcagagagctgttcggtgctatactagtactgctacttggaattagtcgtccaagaacgccgagatggattggagtcggtggagtcgataccgaaagagttgcagcagagattacaaaagtcgtgttgacagcgtgcactggcatctcgtcaatgcttccatttcataacctttccagttcatggatacaattcgagcatgacacctctctagcttcaccttttcaaacgcacaatacagatgcgcttaaccggattcgcatcctcaccaaatcagcctatataattaacctgcggaaccttttttttttcaaataactactatctccattacgttttaactttgatcgaagtcaaactcatttaagtttgactaagtttttagaaaaaataataatattttcaatctaagataaatttattatgaaaatatatttaattattgatttaataaaactaatttaatattttaaatactactatatttgtctataaatttaattaaacttgaagcggtgtgacttcaatcaaagtcaaaacgttttataacttaaaacggagacgagacgtcttgcatgatccgacagtaatcaggaggcaagatgaatttactacctgccccaacgaaggccgcgaacgagtcgttttccaaacccgtcccgtccaagagaagcggcacggcgacgtcgtcggtcgcagtccgccactcgcgtcgctttcaacggagaggggacgagggatatcgccgcgcgctgtagcatccgcatgccgttagccggcaacccccggcaccggggaaggagacaagccgaatccccctcgcggatatcgccgcccacgtcgccacgcccgcacgcccgcgcccgcgcccgcgcgcgatggcgtcgtcgcgttggcttcggatcggagtccggatgggccgaaacgacttgggaatagtggaaaaggatcggcttgctctgggattgccggaaaaggatcggcttgcggcccggtgcacggcggtggcgatcacttgggcttagagacgtgaggtgccgcgttgcttgaataatcgcccgtgtgatggatggggcttgctttgtcagctcatctgtttggctgaccttcaatttctagatttagcttcagaagttaagtctgggggtatagttatagagctgtctgagagtctatttggcacagctttagctccacctctcctggagatagagctcagccaaacagctccacctgaaatgggagcggagttgggtggagcgctatcaccaaatgaactagagaagtggagctgggtttaagcagctccacagctccactccaaactcaacttctggagctaaatttaggagttgaaactctatcaaacatgccccaaacccagctctacctctttagttcattttgtgagagtgcaccacccagctccgatcctagtgtaggtggagctgaaactgtttggttgggctccagctccgggagaggtggagctgcagctgtgccaaatagacctaaaattactgcactgttgaggataaatttgtctcgattaaatcaaaacagacataacacttggtaaagtatcgaccaaacaatagacactaatattttgtgtaatatatatccgtgcattgcaacggccaataccattagaaacgggttgggttggatttagcatattattttttttttcaccagatggatttccaccaatttgagctcgacatcaaattatattcaggaggatcaatcaattaatgtaactaactgttaacaaccaaatttggtaatatcggcattggaaaagaagattagattgaagcaaagtcggaggcggagatcgagttcggaaacagagcagggatcggctggagtccagatcggctacgataagatcggctgagtctgagtcggactaggtaagccgatgtagccgatcctagcaatacaacttgatgtgtgatgtcgggttagattgaggtgcttcaaggtgattgccgcacatggatagagtcctgaggaggcaattgtatctattaattaggatgttttatgtaatttccttagagatatgattaggcaaaagtctgccgcaaagacttatagtatcttagagtttgttagaaatggtagtcgtgtccgttatggacatatcttgtaattctcgggtataaatagaccggagccctatgtaacttttaacacacgttcaatacaatctcggcgcatcgccccccttttactttagttttgttttgacgagttcttgctttcgagttgagctgcatcggtttcgatcttcaacaagaggtaaaacttgttatgacgacttgtgttttcgggattagtatttccatctttatgatactctgatctcgtttatataattcgccgagctatcatatatcttacataatcttcggcaataccgctatctaatctacaatcggctaacatctgtcggtagaaggcagccgaccaggttaaatagcgacgttgacctaaattatataagatatttaccactttatgaaactttcagtggtttgattgtctagatattgttcttcttttcatacttaatactgcatcagttaagtttgatctattaaatcgtgcttagaatatcaacctctagcctgccttctggttaccgattagggtagcatcggagtttcagccgatcttatctgatttaactatatttgctctatatgctttattgacatgttaaatctgccctttatgccaagatattgatgtatttgaatatattaggcttttgcttgatattctatacctgttttaatatcctgatataaagtagtatcggagtattagccgatacatgctagatctatctgatcggctatgctgtaaacatatatagtcctgttattaatatatatttcggtctaagtgatttatactgtctcggcatggcgaccgatctatcccaatcacttgatttaattatatatcgatataaggagtatatatcgttaacatctacagccgatcaagtagatttagttctttcttacttattcaagattgccgatcaaatacacatatgacatcggctcaaagataaatgatatatcatcggcacttagccgatcaactatcatttatagatttaaccgcgatttctttgcttctacttcttgttgattacaggatcaaatcaactggcacactagcacacccgaaggcgagctttggacctgcactggagttaaacagatctcccaggcctcatgttttctgtcaacactaacacagctaggacctacgaggctacgagtaccaattaaaaatcctccaaacagcttatagtttggatggtaaacaatattaatagttttacacatgctaatatacattcgtattaatccaaatccttggcgaggaagaactaaaaccctatgcataaaataacaatagcaataaacagctctggaggagtaggtcaagatttatgggaaaacccgtatggaattttgaaaccttttgtagcatcctaaaagttgtggtagcaccctacaaatttacaacgttccacatctggtggatgtaatgaatgaaaataatgaatcggaagaatatgtaagcttgttagttaacacaattactacttgacaagattgaacctcagaggctttatacaattgtgacttcacaaaaggcacttgataaaatcttgaaagagaaccttgccctgctccatgtttcttacggatggatagaaacttcaattagaaccatgacctgacattttcttctctctgggaggtatcttcagtaaactcttcatcgtgtcatatgcggtaaaaccaatagccacagagggtaccacctataaaaagaaacaatatttttataagggtcaatctggctaactcaacacatttatgtaagttgcaactaaataatctcttgtgaatacacatcattcaacaagtaaggttttcggctgaaactgagctggacaaatagctaaaacaagaatattgaagacaatcatgcaattcaatgttgtataaatgaaaggaaccaaggaaaattaagttcaagagggaaaaaaaatgatctgcagaattttatacatgccactggaaagattcatacagttctgacatgtacaactggaatccatatcctcttgtcagttgagtggcaaatgcaaaaagtgatgcttttcagtggaatataaacgcaaatgactaacaagaatcgcctcgctccaggttagggtgcagaacattgctcagaattaccatgtaaccacaaaagtttcaaagccaaagcaagcacaggaatgctattttttcttggggcgtaaaggttcagaatttgaggttctaggaactattacgagagcgagtattattacttgggtctaaccagtaaatagttggttatcacttggttctagcgattctagctagcaaaatagttaatgtacttaaatgttccagatgattgacctgccatcagtcctagcattcttgattatctgactagtaccatttccaggatattttgaaatgc

SEQ ID NO: 9292 - DNA, 20069 bp, Oryza sativa
cagttttattaatagaataaatgttacatggataactgatattagatgctgccggcaactttctgactcataagtcgtgctgttgtagatattacacatccaactcctgatcttactggttatatcactgagggacagatctacattgacaggcaactacataatcgacaggtattccacatttccacagtttcctgctaaactttgtttgatgacttctaaaccgaaaatttggattcctgattacgacaaaagaataagataagacttaattagctatttatagtaaaagcataaatagttggcatataaaaagttctctctgatcttattgctgatttcaatttggcagatctatccaccgattaatgtccttccttcactctcccggctcatgaaggtaaggtttttggcaataaagaaagctgccgcactctacatcctactttagagttttgcagggactgacatcgtcaatataaggttgataatttgcttataacttgaccggatctcttgcagagtgctattggtgaaggcatgactcgcagggatcattctgatgtctcgaaccaggtcggttgggcgttcatagcctatgttctgcacaaactaccttaaccaagtatatatatggagtatttactcggatgtgtttgtttcagctgtatgccaattacgccataggcaaggacgtacaggcgatgaaggcagtggttggagaggaagcgctgtcatcagaggacctggtaaccctcatgcatgacctgacattgttattcttaaactccttaattattttaagttttaacctcctaatcaactgatctatgaaaaaaatgacagctgtacctcgagtttcttgacaagttcgagcggaagttcgtgacacaaggagcatatgacacacgcaacatcttccagtcgcttgacctcgcctggtcactactgcgcatctttccccgagagctgcttcaccgtataccagcgaaaacccttgaccagtattatagccgtgatgcctcccactgatctgcaaagggtcgtgtgtaataagaaaaaaaaccatcccggactcccacttcttctctttcatttttgccaccaatgcattcattattttttgtgtaaaaaacacgaattatctagtgatgtgggcttccatcattgttgtcccaagcacaccatgtatcatatttatcttcttttttggaagaaaatgtattattttcttgccgtggaaaaatgaataagtgaggacgagtgagctagggatttggttaatgtaagaacacaatgaaataagccatttgcctcatggttttcgcctgtcaattgagtttcagaccctcttggcttcgtgtctttgtgcacagagatgtttgtgatttagcccgttaagatccatccatgtgaactttgtttcatgttcgcccagctaaaaagatgagtaaatttaagaaaactacaactatagcataaaaacgatctacaatgataacatggaaatttttcacaatactgcatgggaaattattacaaaactacaacttttatgtcatatgttgctacaaaacatctaggtgacaacaataagtttgggctatgtaaaagttacagttttatgaaaatttcctattatattattgtagcaaactgaaataggtcgctaatgttgcagtaaactagtagttttgtcaatgtaaatgcggttttctgaaatttactcaaaaagaaagatcttcgtgtatgaactgtggcgctctatttgccccgaataattccaaacagggactctgtaaggactaagatttgccatgtgcatgctcaatgtttaagttgcagtgtagtcttactacatgttccacaatgcttgatgatcatacagactttaaggtggaccccatatgttgatagaaaaaaatatttaatcatttgtttatattataatttagtatatagaagtataaattaagattgtagattctttaatctctactattataaaaattgaagatgtttttgccggtgttttgatacgtcatccgtgtatgagtcggtttttaagttcgtttgtttttgtaaatacatatccgtatttgagtcggtttttaagatcgttcacttttggtaatacaaaaagaatcatataagaaatctgtttaaaaaaaactcacatgctaacttgagacgatcggactcctaactgcagctcatgattttatatatatatatatatatatatatatatatatatatatatatatatatccaagcgaactcccacagtgaatttcattttaactaaaccatacaacaataataagattaaaatagacttcacccgttgcaacgcacgggcattttttctagtgataaaaaagtcattaaaataaaatgatatttatgtatttttttaatatctgatattataaaaattgaagatgtttccgcgatctgtcatccgtgtttgagtcggttataaaaattgaaggtgttttcgtggttcgttatatgtgtttgagtcagttttaattttatgttttggttttaatctatatctcttctcttctatatctctatctcttctctactattataaaaattgaagttgtttttgtcgtattttggtacgtcatctgtgtataagtcagtttttaagtttgcttgcttttgaaaatagaaaaggaagcttacaataattctgcaagcatacggcatactgctccgcgtggaacaaatgaaggaaacacacacacaacagaacataagcaagaacaagcaaatcatgggcgaatcacacatacttacgatggagtttgcacacacacaagctagcagtaccaggaatcagtgacaaatggatggaaagatggagaagaatgcagacttcttattagctttgttccttcccttcttttgcttcggtacgtcatccatgtatgagtcggttttcaagtttgtttgtttttgaaaatatatatctgtatttgagtagggtttttaagatcgttcacttttggtaatacagaaagaattatataagaaatctgtttaaaaaaaactcgcatgctaacttgagataattggactgcagcttataattttctaaaaatatatatatccaaacaaactcccgcagtgacttcacccgttgcaatgcacgagtatttttttctagtaagataaatggttaaaccttatatgtgaaaccagagaaaatatatggcaccaacctataaatcctaagtcgtcaagtattggttaaaatagaggtcccaagtcgtctaaaggtcagcaaaaatatgggcaaggaggttgtagtttctaatgaagtcgattttgaacatcgttcttaagtcttacttacgaacgagataccttatttatattttgtttcatctttcttatagtattttggtatatgtagcctacgacgaatcgacgattctttgcttaaaaacagctttgccgaaccaaagcagtaaagcacaaactatgttttcgactctgcttcttttattattactttttattttattttttttaaaaaaagaaactccgttccttctaaacccatcgagactttgatattttcctccgctagctttccgcccttcgcccccttcccccgccgcaagaataatcgggaggagaaacccaaacccccctcctcctcggcggcggcggcgggcggcggcgcgagcacatggcggccacctccatcgtgcgatcgaagcgcaggctcgccctgccctacctccaccgcctcctccactccggccccgcgaccccttcccccaaccgcttcctccgccacgcctcgccggtgccccgcgaccccgaccactcccccttcctccgcctccccgacgcgcgcgtctccacgctccccacgggcctccgcatcgtcacgcaggcctacccggccgccacgcggatggcctccgtcggcgtctgggtcgacgccggcagccggttcgagctgcccggcaccaacggcacggcgcacttcctcgagcacatggccttcaagggcaccacgcgccggcccaccgcgaacgcgctcgaggtggagatcgagaacatgggcgcgcgcctcaacgcctacacctcccgcgagcagaccacctacttcgccgatgtgcaggggcgggacgtgcccatcgcgctcgacgtcctaagcgatatcctccagtacccgtgcttccccgcgaatgccctccagcgcgagcgcggcgtcatcctccgcgagatggaggaggtgagctgtcgcacccttttgctgctttgtccccttccttgccgtctaatgcaattccttaatttaatagtcgatgtgaaacttgatatccttgtcgcacgagtgtagaacacccttatttgtaggtggcaaatgtttttcttctgcatttttggtattgttctcggctattgcagcaaaggaagtgcatttggtttggatagtgaccgtaactctcaggttgcacgttatgggtatggatgattgtatatttcactatttcagcattgttttacagtgtacatgtagaggctggtgtctttaggcacaatggatttttttttccttaaagaaaatatgtttcctgctctgatagtgtgatggttggtattgtttatattagccttgtggtgttggccaagatgataagtatgcttgaacactgattgtctgaatgtagcggttcctagtttttaaataacttcctgaatgcatactgtggtttagtgcaattagcttatcaaatccatgctcgatcccgtgcaattagcttatcagatctaatatacaatatatatattgtgtttcgtggatgcttgatctgtgcttacatgtgtttatggttagacaggtgcaaggaatgatggacgaggtgatatttgatcacttgcatgccgcagcattccaaggtcatccgctgggtgacacaatattaggtcctgtagagaatattaaatcgatctctaagaaagatttggagcaatacattacaactcactatacctgtcctcgaatggtacttgtcagccagttctgaaatttacaggcattgatttgttatcaccgagcattctagtgctgaatgttttattttgcctggttggtttaggttgtgtctgctgctggagctgtcaatcatgatgaggttgttgatcaagtgagagaattttttacaggattctctactgacccaactactgtagatcaacttgttgaagcaaatccagctatttttactggatctgaggtccattttcagctgtcaagatgttattagtcatttttagcctttttggattgattttatcttttggacttattccctacttttctatatcatccttaggtccgtgtggagcaaccagagatgcctctaacgcactttgcaattgctttcaagggttcatcatgggctaaccctagctcaattcctcttatggtgatccaaagcatattgggaacttggaataggagcattggggttgggaactgctcagggtgagatgatttgcattgattgattatgcttagttgaccaacaattttcttgccttgttgtgttgttgctaatctgctgcataaggctcatatgatctattggaactgcaaggtctgctttagctcgtggtatcagcaacggtaatttagctgagagcatgattgcattcaacactaactaccgagatacaggattgtttggcatctgcactattgctcaggtaaatttggtttatcaatcttttaaattgttcagctagctggaacattaaattagttttagtaaagtatgctacattttccttacttcttgatgccaatcagtaataatactagctatgttcactattaatttcacatacattataaaaaaactgaggtatgcattggatcaaaaattcccttttataatgttttcttacattttgtgaaatatgattgcagccggattccctatatgacctatcacagttaataatgcaagaatttagaagacttgcatttgaagtgtcggaaacagaggttgctcgtgctcgtaatcaggttgcttatccatctcaagttgctaattcagagtttttacccattgagtcatttctactgtgaatttgtggtgttagacaacatttttctagaaggcaaatcagacagtagattctcctacattattagtaggcaaaattttgcctttttaatattcctaggctctttcctttttgttttgtcaataactcatcttcattttcactagacaataccatgatatctgctatgctcatgttgctctgatgtaggacaatagcaagaaagttgatttcaacctgatgatcagtcgttgtaacttcactagacctgtttcactttcccttaaatgacactgatagtttgtggttagttttatatttatatgtatgatatgtctttatgcagtaccagtaatcattaagtacgaactctgcatagtttcatggctgatacatgtttttttataatatatgccaattaacttgcatctagaaatatttgttatactaattgtgaagtggtgaattatttcctacattttagcaccaacctaaaagtcagttctggtgccttggtagcttttctgttttatctttcttggcctgcctgtaagctatgtattgtatctgttaaggagaactgcattcagtgaagtggatggataacagctaacatttatttaatttcagttgaaatctgctcttttacttcacattgacggatccactgctgtttctgaaaataacggccgtcaggtatggtgaatgaaatattttcttaagtgcccatgttgcagttgctactatttttcctaactatgtatattccctcgaccatctggatcagatgctaacgtatgggcgagtaatgccattcttagagctttttgctcgcattgatgctgttgaccgtgatacagtaatggaaacagctaaggatttcataattgacaaggtaaaactcggcatcttcctagtaataatctggagtgcatctttgctattgctgtctcaacaagctatacggaagattcatgcactcacatgacttgtttgacaatcttcaggatatcgccctagctgcagtgggaccgctcacgaatttgccggagcttagttggtttcgctcacatacatactcggatgatgaatttagttcaagaacgttcttgcaggatgcacagaataattgaagctccggtcctggtagtgttgttgtagtaactcaagctcacccaagaaatattcgatcgtaggaagcatcaagcattttagttatttgttagatgttctctatttatttgcaaataactcccttcgttcggattgtaaactccttccgttcaccttttactttcttagcatacaattgcgtcaaaattctaaatataaaaaagaaaagaaacttgacataaccaaaaggccagacaaaagaggtacagctgaacacaacacatttaagtacacctgcagtgttaactaaaaaatgttctgttctctctcgacctaaaataaaccaattttatataaatatgttgagattcatttatagtttattttagaatagagagtagcatttattttgttgattggtttattttagaataaaaggagtagcaatgtggcattcatttttgctgatgtggacgagagagagagagagagagaagagagaagagagaagagattgaaaaaaaaattacgctgttggttgtttaatatctattcttgaaacctaaattgcaacttcgtttttccacatcattagaaaaatatggatcataggaggcaacaaaacatataatacctgccgttagatataaagaaggcagtaaaactataaaggagtggtcaaagttgattcttccacatatcctcttggatatttactgggccatcgttgtctgaaagccctaacccacatattcgttttccaactaaaaacgtattttagcgctaaattaaagtacgatataacaaatattacacacaacaatgccgcacattgtgaaaatacatgtattctagtgacttgagtagcacctgaagatcttgagttcaaacctttataggaagttcaaatcttcaaaggagtgaatttcatattgggttgttccatgagctaagttcctacattgtagagaccgggttaggaatgcataagggtaacttacgcaattgcaatgtaataacttatacttcctccatacttataaaggaagttgtttaggacaatgtttaagtcaaactttgggaatataaatcatgaataactcttaaattgttgagtttgaatatgtaaaaattatatgaatagatttgtcttgaaaaatactttcataaaagtacacatatatcacttctcaataaataattttatagaaacaagaagtcaaagttgtgttttggagaccgtgtcgctgcccaaaacgacttcctttatgagtacggagggagtacaaaactttcacataattataaaaaatgcataagggtacatgtgattagtgaggcatgtgaatgggacgtcgggggttcaattcccatgcgcgcacggtaaattttactcctcccgcacttcctcttgacaaatatttagcaactatataaatttaattggtttttttactttaaaatgtgaatgaaaagtttgcattaaattaccttaagtgatttttttgtcataataatattgtttattacatatcaaaataaatatacttttggaaaagtgccggtattgtggtggtgggatgcatgactccagttactactactaatcaaatcttggtaccatgaccatgaatattacacacatatggatacgagtacactttgaattgaaaccacctctttaagtgtatcttaagggtgtgtgaatatagagcagtgatatgtgctcacacgtgtttttcatgtaataataaagagaatagatttttcattctatctagacttcctgctgattttattttctaccattgactttccgtctttccttagccatgttctttgtttacattgttattttttattataaattttgtctaataattattatataggtaaacatttatatatttaataaagtgatattctatccataaaaaaatgtcaaccgcgtactatgtccagattcgttgtactatgttacctttttttaagaacggagcgagtagtcatagtcgcgtgaaatgcatgatataatgtactagtattgtatattgaatattaagctatttctctctctacaggtttatgggaatggtatctgtctaagggcccctttgaatcgtagaatgaaaaaaacggaggaataggaaaaacataggattctaataggaatgtaaatgtaaaacagatgattgcaaaacataggaatgatcgtttgattggaccacaggaaaaacacaggaatcggatgagagagatatactcaaagaatttttaccaagaggttggacctctcgctaagtttcctttaaaacctatatgcaacaagccattccataggaattttgtaggatttgaaaaactcaaatcctttaaatcaaagggctacatagtaaaatttcctgtagcatttcaatcctatgaaattcctttataattcctttgactgaagggcccttaatatttgtgcatgccctgaaggctgaagctgctgctcactgcaggaagccaggaaggcccccagctgaaggccagaccaatgagaccagtgagccaacatatggtgacagaaaaaaattactccttttccccaagtaaattaaatatacatggggcagaggcgcagagccatgcagcagcagcatcgcccggccgcccggccatgttctgctcgctcgttcagactgacgctcggataagcaaaacaagcaccgatcacccacacccatctcccggccatttctgctcgctctctcagatactacacgcaaaacaagcaccaataacccagtaggaaacagggtttacgttactgtctcgcgtcgtttctacggttaccagcttactacgggtacgataatataaatactacggtaacctccttaaattcaaataaattaaaaaaataatttaaatttttaataaattttatacggtttttcatggttaccgcggttaacacgtggtaaccgtacttaccgtcgggacgcggtaaccccggtcccggcggtttgggaaacctgactaggaaacgctgaagaattaggtttgcttcgttgctgcaattaatggcagaaaagacacgagcgctaccggctttaagcagaaccatccgtacgcgactccggtgaaggaaactgtgaatgcgtgaaatcctttggctcccgtgaaaaccaagcacgggccggtgcgcacgggtgcgcaaatgggctcacgccgcacgcgacgcgctccgtctcctctcccctctcccgcagtctcttccccacgcagccacgcgcgcgcccattaatcgctcacgcacttgcacgttgcaccatcaactcctctgctcccagcttccttgctggatacacgaacaaagtcccgtttgcttctgggtagaacacaacaatggcgctgcgttcttctgctgcatactactacatgaactaatttgcttctcccttacgttccgtttgcatcatctgccttgcacacacgcacgcactacaaaatggcgttgcgcgtgctcttcttgatgctgtcggcgttccccgcgagctgcctcgccgtcgctgctccgatcagtcccgacgccgtgccattgctcgccttcaagtcggcgtgcgccgaccctgccgccgcgctcgtctcctggacggaggcctccgacccctgctccgacaggtggcgtggcatcacttgccggaagccttcgccttcgccgccgccgtcgtcacctcctcgcgtccgtcgcgttgttctcgaaggcctccgcctcggcggggatgctggagccgtcgccgcgctcgctggcctccctatgctctcgttccttagcctcaagaacaactcgtttacgggctctctcggtgacgtcgacttctccaccttggcgccgcacctcaagctcctctatctctccggcaatggcttctccgggcggtttccggagtccgtgctacggcttcgccatctgcgccgtctcgacctctctggcaatcggcttacctgcacgattccgccggagataggacaccggctcccttctctcctgacgctgcatcttgcgcgcaactcgctcgtcgggcccttgccggcctcgctgggagcaatggccaggcttgccaagctcaacgtctccggtaaccacctccagggccggatccccaagcgcctcgccgccgtcttccccgcgtcttcgttcaccggcaaccccgaactttgcggtgcccctctgcgccgccggtgcaatgagcagctccacatggtgtacggcggcggcggcagcggcgctgacacgtcacaccaaccgaagagagggaggaggaggagcaatgaccggtggatggtggcgatgatcatggcggcggtgggcgcagcagtggcatcgctggtcgccgcggcactctgcggcgtactgtggctgaagaacaagaagccggagaggccgcgcgccagctcacgcaccagctcgatggcgcgggaggagacggtgcgcttcgacggctgctgcgtggagttcgacgtgtgcacgctcatgcggggcgccgcggagatgctgggcaagggcgcgacggcgacgacgtaccgcgtggccatgggaggcgacaacgtcatcgtggacgacgccagcgtcgtcgaggagggcaaggctggcgaggtggtggtggtgaagaggatgcggcggagggaaggcgcgacccgggaggacgagcggcggaagcggaagctcgcgcgggagatgggcacgtggcggcacgccaacgtcgtcagccttcgcgccttctacgcgtcggcagacgagctcctcctcgtcttcgactacgtccccaatggcagcctccacagcctcctccatggtccgtaaccctctctctcctgactcctctcatggcttcttctcatcaatgtctacatgatgacgatggcaacggattctttcagagaaccgaggaccggcgcgtgttccactggagtggcagacgaggctgaagctggcgcaggacgcggcgcaggggctcgcgtacctccacggcgtgtccggcggcaagctcgcccaccggcacctcacctcctccaacatcctcgtcgacgccggcggcaacgcgcgcgtctccgacttcgccctgctgcagctgctcgtcccggccccggcggcggacgaggccgcgcagaagcaggacgtgcacgcgttcggggtcgtcctgcttgagatcctgacggggcggtcgccggaggacggcaacgtggacctggcgctgtgggcgcgcacggtggtgcgcgaggagtggacctcggaggtgttcgacgtggagctgctgccgagcaggggcggcgcggaggacgagatggtggcgctcctccatgtggcgctgctgtgcgtcgccgacgaccccggcgagcggccgaggatggcggtggtggccaagatgatcgaggacatcagggacagggggagcaagaggagcaggtactcggcgtcgccgtcgcaggttggccactcctacgagtcatccccttccatctcggaggacaccactaggtccaccaatgcctcaagctcttgaagctgtggtgacagtttccagctttccttcccaaaaaatccaatggatgttgttaacaagaggtgctgccgtttagatgttagttttctgccatcatgattctgtggcatgtgacatgtcaggtacctgtgatcaatggaaattatcaactccttttgttttctgtccaacgaacgtagacagggccaagtttgtattacaattcaaacatgcagggaataagttccctttaggtccatgaatttgttgccaagtttgaaattcatcctgaactataataacagatataacgtgtccctcaatttacaaaaccggtgtactcgagatcccagacggaataatgtccagtttcagttgatgtggtggctgagttagcagggacccacatgtcaggacaattcaatctattttttaaaaaaaattggtggacctcacatgccagtaacacatcatctccttcttctctcggtttctctccctttttcttggcgggagcagggcgtagacgacgaggcagtaggcactgcatgcagtgcgcgaagacacaaggtgtgggcggcagcgaccggcagtggcacgaaggaggaagtcagcgttagtggtggaggtcgtcatcgcccaatgagcccatggccaccgcgtgcgcgtgcacccgcctacccctccaaaacggccctcttggcggcaacgaggtcaaggacctagccgaagtgctctgtaggagaggcctgccccggtgccgagcgagtggcgagtaggcggaggacctcctgcaagttactttccttgcaatgctaccttagggagggcccgatgttggcaggtgggagcttccaatgagggattggatggaaggggaacaccttgttggctctcaaaggcgagcacccagtcgtggtggaacaacaacatccatcatcggagtgcatccgaccaccaccgacgactgaatctgagcagctggagtcggcccttgttgctcgaggagtcgcgacaaaagagcagcagagagggcatcatcattccgagcatgtgtcacaataaggtcatcatagggaccctcaatgctaggatccccctgcccctccactagaaagggatctctctcgtgatgaaccatgtcagctgcagccgtcatccaaaccgctttaagaccttatttataccggttttggaagtttagaaacatgttatatgtggtattgcggttcagggacaattttaggactcgacgacaaacagagagacctaaagtgaacttgttctattcagccttcttctacggtccatttggccgctccgagtggtgcgtcaaagagagacgattttttttcatttttaatttttttaatatttacaaaaatattatatcggtgaaaatatttgcaaaaatataccctgccacccaagtggagggcagcaaggtgatgtggcacgcgacgctgtttgtgcattttgcacggaggtctctcggtgaaatgcaattttcgccgtatgtaaagttaagccctccgtgaccggcgaagaaaagttgtccgttgaatacttgaatgccttcggcgaaatggtcacctacgtctcgctcccactcccagactcgagtagtctggatgaactgccaatccgcgcggcgcgtctgtgcattagcgaagacaggagtggcaaactggaagcgcgtgcgcgcgagcgattcgtccagagtatcagtttcaaccccggcccaaaagtttattagctgcgtcgctcagggccatgcgcggcagggctgtgagggagagagacgtgacgagaagcccggatccgcctggcacgttttgggcccgaaatttcccctgcctcacactcgtatgtcagtcacacactcacaccacacacctgccggggtccggtgtgacacaggcgcacgtccagccaggcttatcctcctcacggtggcaaccaaacagcctcagaatccctgcaacgattgtgatttatgaacttgcgttttcatagctcgaccgccttgtaatttgttggccactcgagctcaagttagatcaccaactatggccagttgcatgcgtaaccgtgtagcgagcagatccagcggagaagaagagagaatatatgtctcaagatgctgatcatgttgcaacaaaaatttcagcttaatttcttatgatcggttcgatttgtaatatgtgagtatttttcagttgttcctatatcgatcacttgttcatccagtagctgcagactgcaagttctgatgaactcgatgcatttatgcatgtatgagaatattctgtcccccagcgtggaataggattcactcgcattgatcattaatttgatccacatctttgacgattagaccttactgagtacctgaagatacgtatgtgatagttgagctaatgatatttgacacatggaactcaatagaaaatacttgaacctgaaaattcctttttggcacgataagactccaggaaaatctagccaaatatttgtgtaggttctacagatgctaaacgaagaaaaatcttcccacgaagtatggttaccatacatgttgttttcatctcgtccataattatctggggccaagcactatttttcccccttcctcgtttttattgagaatcatatcactccacttggttagtgcaatcttttcctgttattatgtgattttctttagtttttttgtgtgccatggcttctcgctttgtgacaccactaggtacagtggactgggcaaagttgtttgtttgttccataaataactttgtggaagcacttgatactctcagtcccactgaccatattgtttatttgtttgtttgttccattaacaaatggacatgctatgtgcacaaaccacttgcattgcgtagtacatggtctctgcagatacaaggatggacaacggggagtcggggaccatgaaatgaaactaggttataatgtatatttagttttagttgaaaaaatagttcctcaagtggtgtctagatacatttttaaaaaatacataaaaaaattcataggatatgttcaatatataatatcccatactcactccgtcctaaaaaaaaaaagtgaatctattactggatgtgacatactccctccgtcccaaaaaaagacaaaccctgggtttccgtgtccaactttgactgtccgtcttgtatgaaatttttttataattcgtattttcattgttgttagatgataaaacatgattaatattttatgcgtgacttgtctttttaatttttttcataattttttcaaataagacggacggtcaaacattgggcacggaatccagggtttgtctttttttggaacggagggagtattatagtacaatgaatctggacatacctccgtccagattcgtagtactaggatatgtcacatccagtactgtgttggttttttatgggacggagggagtaggtcataaagcagttgctgcaatgaattaggtatatagtactccctccattccataatataaggtgcatatgcatttgaagattcaacctttaaacatttgaccaacacttagtataatatgaaataaactttatttgttaaaaattatatcattaaattgagatttaaatttacttttatatggttataattgtattgctaaaaaccttatagtatatgagaaattataagctaaagattagttttgaagaccgtgccaattttgaccatgtcttatattataggatagagggagtaagagaagacattagctttagtcccactcaattaggaaccaatgaagcaatgagggaggggggcgagagagagagagaaattatcattatttatttcttaaagccaagttttatgtatatgaatagcttatcatatagactattatatgatcacttttataatgatgaggcatgccatattgagttatatggataactttttatagatattgtggatgcccttatattttaaaatggacgaaatattttatattggaaggaatcacacaactatattacacaacattcctgatgaaaaaggtttaaaaatggaggacttttacggtatattgtactgcaagtatatactagcagtatatagaagggtatgtttggtatttgttaaacaactggaaatggctatttagtcatgtgaagttcaaattaatttatttcaatcggaagtacttgtcatggatcttgtcgtccgtgcatttggtagcgtttgttctggagacatctcgtgtggcgacggctcgatcgatgtctaaattacttatgtttggtgtacatgatcccgatatgtagaaataatggtgctttccggtcataatgcaaggttaattcagtcatgaaaaataactaacggttgatcacttgactgtgggaatatcatctcatcataattactgagatagccataatttttttgccagatatatccagttggttctcagtatctactatgttgattacttcaaaatttctcattcaataattagttcatgacgggatgatttgccagttctaatcctgcatggagagacggcgagttgggcttgcctcctcctactgcctgcccatcctggctgtgtgccttgcccggttgcccctggtatatgctgccgccgcccggatgccctacactgttgctgctgcttcttaggtgcgcgggaatgacagaagagaaggaaaggacaggaaatcgaatcaatcccggcttgcggtggcccggggcgcagcgtgctcacggtggctggcggcggcggcggtagcccatgtggtgaaggaaggggaatggagcggatttctctcgattcgccatttctttcgaacgacaaatcgactggatttctctcgatcgggatctgaccaagtaacaaaaacgcgaaaaatacaaaaatacccccacacagaaagatgaaaagacaaatataccccttttgaatttatattgcaaagctaaccgggtggaatatcagattaatcttcaccgttagatcgtttatactgctagtatatacttgtagtataatgtaccgtaaaattcctcttgaaaatgatccacccaacaattgccacgctagacaattatgagcctactagaaaaaagttactaaacaatgccacaaatcatagctcaaattctacacgaatatgaaaaaaaaatttgaatttggttgtgctttttctagggcacctgcgaggcaagtatttttaggtgagaaacataaaagtacttaagcaaatgccaaacagttactgtgctagctataattgaccaatttccatcctacaatagtaagtgtatcctaatatttagatgcgattcatcccatcagggatggaaaacaattgattctattaatgctttccttcagtggcaatgactttttcgtagaatagcttgcttcttaaaccgcgctattgtggtctggttgaattttgctccttttactttgtagccaagggaggaactcaaacggaaagagaaagatcacctacaagtaaggctggcctgaccatagttgtactaaaaaaaatgcacttctatacgcagtattgccaatcaaatttagcaaagaaaaacggtttttctatgtacgagcaactgagcagccggaaggaggtttggtggaacagcgacacccggcctcccaccccacgggttccgagagattctttggcggtaggtgatcccaaccaacgtcgtccaggccccaccccgcagatccaccaaaccacacacggccgtcgctgactcaccgatgcaccatcgccaaccgtactcagcgaccccgcgcgtcagtgggcggatcggaccgacgagccgcgctgctgggtgcactgtgcagcgcccacccccgcgacccacgtgttcccgtccccgcccatgcttgaatctggttacgttagctagatccctcgctccgtccgcggtcgcggtcgctagcgccgcgctgttttggcgactagttccgtcgtaccgggcgtttgccgctgccacaccgaggtgaggtggagtccccgacccccggtggaacggacgccgcaaaaaatgcgtcctcgcgggcgcgctgccgatttcccctgcgcgcacaaattttctgcggggaaagcgataaggctcccgccgcaccggcgtcgcccgcgcgtcgtgcccgcagctctccctctccctcgagtcaccccctgataccgctcctccccgcatgttcccacggtcgccgcgagcgacgtgctcgattctgtggcggggccttatataccggcaccggctcgcctcctcgtccatccaaacgccatccgcttcctccgcctcccgttgcaaataactgtgtcagcgcccacgtcatcaccggtcggaggggaaaaacatctcccgtgttctccacctcactccacaataacttggcggctgctcgtcaccggagaaagaaagaaaaacgcctgtttttttttcccctctctcacaatgcgccgatatatattagccaaccaaatcactccgtaaccgagcacccaaaccacacagccgctcttctcggcaggagtggaggccctcaccgggggacttccatttcctgctcctcgtgttctcccacctccaatctcaggatggagcgcgcacgccgcctcgccaaccgcgccctgctgcgccgcctcctcgcggcggcggcgtccaccacgtccccggccccgtcccgcggcatctcgaccctggccaaggcgcccggggcggggtcgcgcccgcgcgccccgcgcccggcgccccaccagtacaccacggggcggcccgtgtcggcgtcggcgctgcagccgagcgacacgttcccgcggaggcacaactcggccacgccggcggagcaggcggcgatggcgtcggagtgcgggttcaacaccctcgacgcgctcatcgacgccaccgtcccggccgccatccgcgcgccgacgatgcacttctccgggaagttcgacgccgggtttaccgagtcccagatgattgaccacatgcagcgcctggcggccatgaacaaggcctacaagtccttcatcgggatggggtactacaacacccacgtccccgcggtgatactgcgcaacctcatggagaaccccgcgtggtacacgcagtacacgccgtaccaggcggagatcgcgcagggccgtctcgagtcgctgctcaactaccagaccatggtcgccgacctcaccggcctgcccatgtccaacgcctcgctgcttgacgaggccaccgccgccgccgaggccatggccatgtgcaacggcatcc

SEQ ID NO: 9293 - DNA, 20912 bp, Oryza sativa
caggaatccaaattttcggtttagaagtcatcaaacaaagtttagcaggaaactgtggaaatgtggaatacctgtcgattatgtagttgcctgtcaatgtagatctgtccctcagtgatataaccagtaagatcaggagttggatgtgtaatatctacaacagcacgacttatgagtcagaaagttgccggcagcatctaatatcagttatccatgtaacatttattctattaataaaactgattcactatgtttttctgtgcaattaacatacatacttcaaattaaaaaaaggaaaagtgcaatttcgcaaaaagatttatcataaaatgtaagcacatttaaataactaaccatcattaggcatggttaaaatgggtatctgcgtaattgatccttttcttccttctatgcgaccagcacgctcatagatagttgccaaatcagtatacatataaccaggataaccacgccgtccaggtacttcctctcgagctgcagaaacctgatgtgaggaaagacagagaaaaggtaagtagaggtgacttgaatgatataatacttaagaaatcagcataaaccgtggtattaaaaggactagatttcaaaaaaaaaaaaggagcaagcatatgtagaaaaacaatattaaagcatttattcgatacaatattatttagttattcaaattagctcaaaccaatatttctgaatctaaatttacaacgagaagcatataactagtatagctgcagacctgcaatagtgaatagaataactctgtatctgtgttaatgtaattatacgatacctagctaccgatcatcgtctcatcgatgacagacaaaatagtctagagcacaacaaacaacagatcataacttgctttagatctaaccatctaggttctctgtataaacctatgttgtgctcgttttcccccttcaaacaggtaaggcaagacaacatttttcagaattatcatctttcaaaacgtccattttagctcaaagtgatagcagagaattcccaccatgtttctaatgtaaacactaggaaataacatatagcaagataaaggcccttacttcacgaagtgcatcggcatatgagctcatgtcagtcaggatgacaagaacatgcttcccgcactcatatgccaagtattctgctgtggtgagagcaattcttggggtgataatacgctcgatagttggatcatttgcctatgaacaaaaaatacaaaatcaaggagtaagttatagatcttgcaaattccttagagcagcatagtgaaggaaaagaaagaacaaaggtaatgcagatataccagattaagaaataaggtaactctctccattgaaccattttcctcaaaatcacgcttgaaaaattgtgctgtctccatgtttactcccatagcagcaaagacaatcgcaaaattttcatcctcggaactctataataaattgttatattagatagataatattaaggaagaagtgtgaatgtcaaaatgttattcagcatacagcaataacagaatagaaaactgcactaaattgcaatgactgataacaatctttttgtagctagtgttacatatttatgactacttatccataacacggttagcttcaccatgtaggacaaactaagtatgcatcaaatatatttagtcacttcttataaattagaaacaaagatcacaagcttattgtcaattatctatggctacttactgcaagaactaagtaagaagtaatgcctatagcttgctacagtacccagaatgcaacatggaaatggtactccagttaggtatgatgaatattatgtagtttagacaaaaatacctccaagatattgtcactcttctctaaacgctttaccagaccagcctgacggcaaatctgagcagcaatttcattgtgtgggagaccagcagcggaaaacagagggatcttctgaccacgggcaatagaattcataacatcaattgtagatatcccagtctgaatcatttcttcagggtatgttcgttcactgggattgatagaacttcctgcaccagcaaacccgatgtcaaaatctaagcatttgatttacaccataatcaaatcttatgaataatcaaaagcagctagcacctaccagaaatatccaagtaagcctctggtaaaatcggtgggccattatctataggtttcccagaaccattgaagacacgtccaagcatatccagtgacactggagtttttagaacctgaaaaaagttcacgaggaaagtagaatgaacaaaattaagagtgaaccacttcgaaaatttcaatgactaaaacactgtatgtgggaacaagccaatggctaatggtgggggggccagccggtttctaatccaaggattgacaactttatttagtgaatgccagagatccgggtcactattttaaacagtgccactacatattagcacaaattcacggggaaaaagaatattacctcaccggtgaattgtacagttgtgtatttgttgtcaataccagatgttccttcgaaaacctgccagtgatttcaaaagtttcatgagtgaaagagacaggtaggtaacaactgcacaataacatctagactgacgttcacattactctcaaaagtttgaggcaacctgaagacaaaagtaaagaccactgctcggtgatgcttatactaccataagaaatataaaaattgtaaacttaatatttgtgttagtcatacttgtatcactgccatctaagatggttctgacaaaatacaggcaattcagctaattatctgtaaaatgcttaaaagattgcataaacaatgtacaccatctgctttccaatcaaattgtcataatatactaatagaattttgaaaaacagttatattaataagtgatgaagaaggaatcaactttttttaataacaatataaccacacgaatgaattggcaacatgttaaaagaatgcatgctatcttaattatttattgccactgtgaaacaaatatgtacatacctgaacaacagctttctccccatcgacttcaagcacttgaccacgcctagttgtgccatctcctaatcgtatattgacaatttcttggtatttaggaccctgaaataccaacacattatatggaatgtgaatgtgatctgaaataatcaaaattatatttgcatgtaaaacaatatgaaatagccatcacaagatatgattaccttcactttatcaagaatgactagaggaccagcaactccagagactgtcctgtactctgcatttttaaaagaaaaacttacaaagtgtgagtagttcaacaatatcaatactaggctacttacaagctagactcagtccatatatggttattgtgaatcaagcagaagatccgtacccatcccaatctcaagagttccttcctccgtgtcgacattaccatttgcaacaaccatgtttgagattgtagaagaagcctgctgtaggtaagtatttgagtcaataaaatatactcagaagaatattctatggacaatctgtcgtgtatctgttttctcaagttccctagataaatggggtatgcatcaccattaaaccctttcttcactggccgcatacttatcttctcttttagttttgcgatttagattagaaattaaaacaacaaattcatggcattaactgtcacttctatatttcctaaattaccagcaacaaaggccagatactttgccaatctaaaatcaatcagatgctgacaaagctaaagctgatatcaactacaaggtgaaatgtatagttagtagatatgccaaataggcaaacactatcctgctattcgaattagcaaaagattaactctagaaagattatgttgttccaattttctggaaatactagaaggatctagctccatgagctactattctagtaagcagtaaaaacataaaaggcagtgatagaacatcgccaatcgaatcatatgtacttcaccagaaccctttctagtccaaaaaccaaccctacatctctgaaaaaaaaaatcatgtttcagacacattgatcattacatgtaagctccctagaagaactgaggcagaaacgagctttgtactgtatctcacttcttaaacaacaacactacgaagatcctagtcctagcgctctcgacagaacactaatcgacaaaccccatctcctcgcacgggcagctctgcatacctccacagtggaggtagcgggggtcaatctacccaacaaactctgaaaattcggcaacatcggggaacgtggagcgccaattgatcctacacgctacgcacgggtctgaagcgccaaaccacgatccggcggcggcgggggtgccgggcctcgtcgtaagcagatccccgcggcgagcggaggagctataggatcggggccggaaggagtgaggaggaggaggaggaggaggagggaggcgtgcgtaccgcagattcgagcggaggagaggagaggggagatcgcgcaagtttcgtcgccccacccccagcgaagaaggcgatctgggtttccagtcagattagcggttttgttttgggcgtcgtcgtctcgtccccgatttgatccgccatgttcgagagaccagggggtttccgtcgtccacgtggcgggatcggacggcccggatcggcgtgacagcgtgatttgttcctgtgggccccaccttgtcgaagcgtctgggcacgttggccaacgtgcaccgccgtccagactacagcatggccaaggcctagtcggagactcggagtcctcctcggcttttggttgggcttgaagcccaacgttaaccaccattttgggccttaggcccatatgcacataagagttttatacggtttctgtgcgtgcatatcatatcatatcatatcatattaaatctttagttttcctgcccacagtaacaccctacgcgagaacgctgcattctgctacagggtaacagttccatgccatgcgtgagccgttggatctttgagagctggtatgatctggccgtccgcctgcttgcttgtgcagttgtgcatcctcatccactcgtctccccaatccccatccctcctgatccccaatccccaatccccaatcgatcaatcctcacttccccagccagcccgtctgcggagaaatcgatcccgcacttcctgcagccgccgccgatcccgcatcgctccaccggctactgccttttctcatctccaaccttcgctcttcccccacaatttctgcctgtctacggctgtggggttgcctgctgctggttgtcgttcagcgtccatcgggcaggcagcagcgttccagtggatctcattgacgccggccacaacgcccggttcaacaccgcattccccttggctcaccctctccggcgatgagctcgagcgggcgaggcggcaagcggcaaggggcgccgcccccagcgccattcggggctgcggcgaagagggcccaaccccacggtgggcacctagcagatgactccatccgcgctagcggtgacctctcatctcctatcggttcagcgcctaacggtcgctgcctcctcttccacaggtaccacggtgcctgcacctgttactttcctcttgtgcctttcgcatttagcttttggttcgattccccattccttgcactgctccaagcctctaacctggagttttacctcttgaaaatgcaggtaataacgtgtctgtgatttttaggtgtttttcaggaacatcaaatttatgtatgcttttgttatgctcgatgaaatggatgaatcggctgtacataatttgtcagctcgctgccacactatgatcagcaaaggcgcaagttgatccaatttccatctgcatctggtccttggtatgtctgcctacatctccttagggtaatcacaattatcaatttctcactattacctaacttttgtttgcattgcaggtctctgatcagttatcaatttgcaagagtgcttgattttccaagtttcgataccggacaatcttccttgctatgacaactaagatgttctttctgtacatctatgttctcccactgtactttagttcgttgttagttgagttagatttagtgtgaagcaaatagacccgactctctgtaaagttagtattgtatatgatttcctgtttttagggcattcagcaagtgcttatggttaagaactacactacattacaaagttgccaagaaaatgcaaggtgacaatatcttgtggccatcaaaaattgagattttcagtgactgtcaattttttcttgtgttctacagtgtgctacattgctcaggactgcctcaggtaaatagaaaactataatatagcgcaatatcgtcttacgtttcccatgaggccatgactgttttctgcatgatctgctgctacctaccgggcaagcactggtgttatgttttggactgaccatttgtaaatctatttaacctttaatatgtactaaaagagaggattcttcagcggtgttttactgtacatctgtattaatatatttctttgtgcatagcatttcaggccagggacaggctgcccaggacgagtggaaataattatgtaatatttgctaggtattacttcctactcttacttctacgcttctcgcttcatttcagttgaagccatcaagacattgtccagaccgaaatcatatattgttattatccagtagattatcaagattactgtctgttttagttcaagatgttccctgaatagcagaactggatggtagctgacagattcggtaaagttcaatactctaatcaaaactggatatggacatcatttagatcaagttgctttctaggttcaggagatcaagctgggtgagaacatcagagtataatggttgtgatggtgagagcaccatagtatggtggatagggctaggtgaggtttgtacaattcattctacgatgcatatcttgcagttgggagtcatgatctttctttcaaataagtatcattgcttatcgcaaaaaaaaaaatgcagtgtttattgccaaatcctgacatgaaaagggtgaagagaattttggtaatatagttgtaagcaacatagtgagaagcactttattaagttaaaaggatcgctctacattggattgagtttgatgttagaattttgtaccaatctttctctgttaaaatttccatcctcattggctaataaaaagaagatagtctgatttgggacagtgatcaatgtatgagaaggtcaatcagatttctaatgttggtccatttgattcaaaatatttgcaattatacatggtatatgtaatgcttatgtctacgtgtgggctatgtttgcacccgcagcaacgcgcggggtgccagctagttttcagaatattctgtctgtctggtgtcaaccggctgggactcacataccaactccgattaatccgttggtgattgaactcattgaaggacacggcaggacaagattcttctaggtctctccgttggtgattgaactcattgaaggacacggcaggacaagattcttctaggtctctgatcacttcacttgtttggttgctttcaactgctctatataattgtccgttaggccatagtgacagtgcggatgagacttaataatagtgctcctggggtcgttagtgtgtaacgttgatcctggtcgatcgtccggggttacctcatcgctgtctgtggggttaccttatcgctgtctgtggcaagttggaactgtcctacggctgataatgggcgttcggataatgaactaggggaagccacacatcggttttgataggattttgcctccgaagaatagtagtaaaggacccatcttgtttggagttaatttggagtactatattttttttttgcaggaaatttggagtactatagttggaagtcggaactcgaaagatcgccaaaagattccagacaaagggtgtgtttagttgacgtcaaaattgtaagtttggttgaaattgaaacgatgtgacggaaaagttggaagtttgtctgtgtacgaaagttttgatgtgatgaaaaagttggaagtttgaagaaaaatttggaactaaactcggccaaagaaagcagtagcactgttttagaagtatgtgcggtttgtgcccagtaagaagaagaagaaccatgaactcaaattttatattcatgagttaaatcaaatttacaaagtttaaatatgtccatgtcagtacatttgttatagtaaactcaattttactatacttacatcggtgcaatgaaagcgctatgcgggccttgggcccgaactgtcaccggccgacgttaatgccatgccgccgcgtacagtttacacgaatggttttaatcacacgctgcacctctcccgcgcccaccagtccactcacgcggtcactctcctccagttgtccagtctccgctcgctatatccgctcccgcgcgactcactcaacccagtacacacactccacctaatcttcttctcctcacacattcacacacacacaccccgcagaccccggcaccttaccgagcggcggctcagcacgctgctgctacgcacatggacaagagccagggagtcctactgtccagcaacgtcggggccggctcccggccgtggccggagctgctcggctccgcccactgggacggcctcctcgacccgctcgacctcacgctgcgccgcctcatcctgctctgcggcgacctctgccaggtcacctacgactccttcaactccgactcccactccaagtactgcggcacctgccgcttctccaggtccacgctcctcgaccgcacgcagttcccggccgccggcgacctctccgtcgccgcctacctctacgccacctccgacgccacggcgttcccggggagcatggtgtactcgatgtcgcgcgaggcgtggagcaaggagtccaactggatcggctacgtcgccgtgtccaacgacgccgcagcggccgcctcgggccagcgcgtcatctacgtcgcgtggcgcggcaccatccggtcgctggagtgggtcgacgtgctcaagccggacctggtcgaccacgacgacatcctccccgaggggcacccggggcgcggccggtcgcgcgtcatgaaggggtggtacctcatctacagctccaccgacgagcgctcccctttctccaagtacagcgcccgcgaccagatgctcgccgccgtgcgcgagctggtggcgaggtacaggaacgagagcctcggcgtcgtctgcacggggcacagcctcggcgcgtcgctcgccacgctctgcgcgttcgatatcgtcgtcaacggcgtgtccaaggtcggcgacggcgcgcacatcccggtgaccgccgtggtgttcgggagcccgcagatcgggaacccggagttcaagaagcagttcgaggagcagcccaacctgcgggcgctgcacgtcaggaacatgcccgacctcatcccgctctacccgagcggcctcctcggctacgccaacgtcggcaaaaccctccaggtcgactccaagaagtcgccctacgtgaagcgagacaccagcccaggcgactaccacaacctgcaggggatcctacacacggtggccggctggaacgggaaggacggcgagttcaagctccaggtgaagcgcagcgtcgcgctggtgaacaagtcgagcggcttcctcaaggacagcaaccttgtgccggagtcatggtgggtggagaggaacaaaggcatggtgctcggccagaacggggaatggcagctcgaggggcccgcagaggagaacctgcccgtgccaccggtggtgaccgggaagatcatcgacgacgacgtcgctgccgtggccacctccagcagtgccaaggaggataagaagacgggcaaagggtctaagcttctgtctggattgattgatcaactgctttgtgtgtaagtgaatttattacatgatcaaaccatttacttttgcaattgtggtaaataagtagtctgttacatatcaatagaagtgatgatgcatgatgctattacaggctttacagcaatgtggttaattattaaaggcgagacaagtttgtataagaaaaaaaaaattgtaatagtgaatcatatgcgatataatctgaagtaaaatgaagtatatgagcgcagatgacgctctatattgtaagtagtcacgtgtactccaggttactctgaaatgcggaattatcgcgaaatacaataagaactttcaaatgtcataaaagtaatgctagtttcccttttaaatttattggtaaattggcttcctttgaaaataaattgactagtgacatgaaaataggctggcaggagcaagaacaagcaaattcagtggcaatctagtactctcttcgtaccataaaaaccaacctacttaatattggatgtgacacatcctaatattacatatacctcagtccaaattcattgcactagagtgtgtaagtccaaattcattgcactagagtgtgtcacatacagtcctagattcttttttagatagtatgtatgaacgatagaaaattaatattgtttacttttagctctctgtctcggcgcgtcgcattatgtatgaattcatagtatttgaaactaatttttgctttacttgattaacatgataaattaatattttttaaaaaactttgtaaataacttaaaacaagtgacctaaataatgctctaagagtttcttttaaaagaaattgtatttttaagaagcgtgaagcagataatccgtgacaaaaatcagaaaagaacctgaaaagaataatggggctaagtgcgccgagctttgttaaaatcacgctagctttcttttaaaaaaaaagacataaatttgatgattgttggctgaagagtgatttgttgggtccaatgaaaatacagaaagtaaaaaacacagacacacaatcatcttcagaaaattgagtttatctaactccaatacactgatctttcaagtgtgtcattggttgtctttctaggcctgatacatgtaaagccggagctgcgtgagttgttgaagaccacatcagaaaaagactcgagagcggtggcgtcgaactgatatgcttgtgaagtagctggagcttgggagttgggagcgagctagattacaacaatgtcatttatcggtttttctttggaataaaatgagttgttttgttaggagaaagtagtatttttcctttctgcttttagtgtctcttgagaaagaataaaatgagtcctggcatcataagtaggtgggttagtcgactaggttcgagcctcaccacatctcaataaatatcgatatgtgacccctcctttcatatccagtatcttttaagtgtgccttgtctcctagatataatttctgtttaaaacagccttctacctgaacatgtatgatagaagcataaactgagcacaccaatttttcccttccagataaggtttcaaaaacctttcagatatttatgttatcgtcatcgtgtcttacgttgtctaacaatatgtgagagcatgtctaatagaccaactgggctggcgatagcacgacacgttggcttcactgctgtgctagaggagagaatggtagagagaatgcgagccgacgatataattatcgcccggctgtagcacgctgtacaatgaagaaataaataagtctgatggagattggttcatacttggaacaacagtgaagaatgcagtaattagtgagacccatatcaattaaaaaaatatatcagttgttatcgtaaatgatagtaataaagaccattgttatatgagcagcctatactaacagactatagatgatgtggatgttttacagctagcaagttgacgatattattaaacctactttgatgcccatgggtgatatctaccgctatacgttctctaaaaaaatatagcctccacttcataatatccaaccatactgctcataaaaacaaatacttttgtgctgcacacaccttatacaattcaaatcctcgttgcagtactgcagaggacccttactccaccatataacgttatctgtcactctatccagttccctgcatacaagttatcttttgtgctagaagcgcgagtgccgcgtcttttctctttcaagaaactaagcgccacgttaatgaaacgagtaagatgcatgactctatagactacagacaagaaggggaagtgaaggttgtccctttgcccctttccttcttggcaaaatttgctacaggatatccaaaatatgtataattagctggtggactcacaagaacgtgaatttgctaaaggccaccacaaaaacccagtaattagctgttggacacccgtcggattattttattatatttggaggaattggagagagaaacacctatgtaagtacagttctacccttcaatttttttttcttttttcttccttatcttttctctttctctcattctttctctctttctcgttgcattttcttcaaccgagggcgccggcgcagcgaggcgcgggccagtgcggcacctcagctggggtggcgctgcacggtcgtgcgcaggggtcggggcctgctgcgtcttcctgtggcgcaggatgtaccgcctcacgccaaagcacccctgacaggacgagctgatgtgtgggaacacctgatgatgccgccggagtgttgccatcgccggggaaatgatgcaaaaatgcggcggcggctgccatggagatgaagctcctccgtctgaaggcaactggccgccgagatgaactccgcgacacgatccattaggtgctagcgcgcgccagccggtataggtggaagtagtggttctcgccctccgactcaccaacgtcacctcgcgcccaccaccgccgccgcgaagctgggcggtgtactggcggccgcgttcactcagtatgtccttctcagcgacggcgaccagcgcgcggcagcatggaagcaacgacacatcctcggcgggagggtcgatccgcagggcgtcattgccggcggcggcgctcgtcacgtacggccggagcgtgtccagcctgtccgcgcgcgagcatcggcggctcgtcgtgccggctggccgcctcctcctccgacggctgccaccgcgcgccccagaagcagggctatagcagcgccatgccctcgatgtcaatgttgtcgccttcgggtccatgctgcgaacgccgcgctacctccgtccagccgccggcgtagccactgaaagtgcattaatccccctagtgggttttggtgattaatgataaatgtggttaagagactaatgagtttattgagctacttttaggtgcattagtccaaggtgtggaagatggatgcttggagaccccccaaaagtataaaatcaaagcagaccggaactcgaggagtgcataggatagtttatttattgcaatcgagtttttaggaaaaaccgtattattaaggggggttccaggtggtgctctaagatatgtcaagtgttcttaggttgaaccaagtgacaagtttccctaggagttatttttgcaaatactccatctgtccaaaaatgcaagtccggaacttcctgtcttccaggtccggaacttcctgtcttgtgaaaaagattttcctaagtgtagtccggaagttcctgtcttccaggtccgaaacttcctgtctagtttccaattcaaaattgtgagtaacggctagatgacgtcacctagccgttatacatatccagctcgtttccagctcgttctttggccattccactttcacttttggaccctagagctgttgctagcctctcccaagtgtttcttgccttctccactcaatcttgagcctaattcttgtgagaaagagagattgagagggagagaagaagatttggagaggtgtgaagattaggatcttgggtgagcacttggaatatctcgtgggctgtcatctcggtgcttattactcttggagatgatctcctagacggttaggtgtcgcccgcgagaatccgttgcatattgtggatgtcccgggtaagtttgtgaaggatctcctctcctccgaaagggaacgaggtaagttaatgaagttcttgtgctgagattctagaggctttccaagtagagcaacctacacttgtggcggatttctagaagttggttgagttcgatcttggtggtcactcaattctagaaatttgcctaggagtgtttgcgattgaaagctgtggatttcctctgggtttttgcacaagtgaggcaagagattaatcgagacctagctctttggagctcctcaacggagagtaggatcgcaagatccgaacttcgggaaaaatcgctcttgtcttttctgtgatgtttctgtggatgtttctgtgatctatcctctgcttagaatacctgtgcttcatcttgtgaagattggcttagtctcttgtttcgaaatttgaatttcatccttgttctgttactcggaagttccgggcctggcagaccggaagttccggtgttccttactaggaagttcagggtctgtttgaattttaccgctgtgatttgtttttaagttttcagggacagcctattcacccccacccccctctaggcttcatcagcacgttcaattggtatcagagccttgtgctcctgattcaagcttcaccgcttggagtgatccgatgtcgcatcaagagggaaacggagagatagatgaaggggacaagggagacgcttccagcaccgaggagattgcatcaaagggggctactattcactttgattacagcaaacttaatgttccttctcataacttcgtctccgtgccttccgggcgtgcacctcattttgatgggacacactatgccgcttggaagcacaagatgaagtggcatttaatctctttgcatccaagtatttggaaagttgtttgtacaggtattgatgtaccccatgatggcatggagctcacttcggagcaagagcaactcatccaccgcaatgctcaagcttccaatgcaattctctccgccttgagtccggaggagttcaacaaagtggatggacttgaggaggccaaggagatatgggacactttgcaattggctcatgagggatcacccgccgttcgtgaggccaagattgaattgttggaagaaaggctaggaagatttgtgatggatgacaaggagacaccacaagagatgtatgataggatgatgattcttgtcaacaagattaaaggacttagaagtgaggatatgacaaatcactttgtggtcaagagacttctccgtgcttttggtccaaggaaccccactcttgtatcaatgatacatgagaggaaagacttcaagaggctcacctctagtgacattcttggaagaattgtgtctcatgagatgcaagaagaggaagctcgtgaagtgaggcaaatggtgaagaatgccgccatgatcaaaaatcaagaagtggctttgaaggcaaaacaagaagaagagtcaagttgtgaagaaagtgaagatgaagagatggctcttattgtcaagagattcaagcactttcttcgcaagagtggctatgggaaaggaaggaaggatgatgacaagggaaagaggcaatcaaagagagcttgcttcaattgtggcgaatatggccacttcattgccgattgccccaagtcaaatgaagctaaggctaagggaggcaagaagaagccggagcgtgctcatgtggcggaggcacacatggcggaggtgtggtactccgaagatgaagaagcttccgaggccaagcctaagcccaagcccaagccaaaagacaaagttgaaggagagggtagtgttgctaccatcgccttcaagtcatcctcttcaagcaaggagcgtctcttcaacaacttgagtgatgacgatgacgactcctaccactactcatgtttcatggcccaaggccgcaaggtgatgactcaaagccctctcacacttctcttgatgatgattctagtgatgaagaaagtgataattaattagatgatatgcttaagagctttagcaaacccgctatgcaacatttggctaaattaatgatgggagggtgacgatgtgaaagaggaagatggaagagtgacgggagtggcatggttccaaatacgtgaattgtaatgatatttttctaatatgccatatttataatggtatggatccaattaaccctaaaaaaatatctacgtttagtttgttgctaaatttgatgaatgcataagaaatcctgctaaaatttcagcattaccaaaactttgtaaggtttagtttagctataatctaaacaggcgtaaaatctgtatgctagaggaggagggagtagaggtcggaggttcggagcctgcgccatcatcatagaagagcttggagctggtcaccgcggcgatgaagacgtcgtcgttggtttcgtcagcagtagcagggtacaacgcagcacaacgacagagttgaacggcgagtgatcctcggtcccgtgatataagagcatctccaacagcctacccaaatcacactctccaaatacctatatagctaactctctaattaatttagcaagttaaacctgttgctcactccaataggctctccatccaccctctctattctgagtgtatgacactgggaccgtatgtcagtctctcgctccttcctcccccttcactttcctcccaactacatcaccaacggcaggccacgagaagggaaaagccggcggggggcgacgcaggcgaaggggcggcgcggaggggcgacgccggcgaagtcgcggcggtgtcgtaggcgcgggcggcggcctcggcggagtcgcggcggcgtccctcgtaggcgcgggcggcggctaccttcccttcccccgaccccagcccgccgccatcgcctcgaggttggcgacgcaggcggagggccgactcgtcgtcgccgtcgccgttgttgtcgccgttgccgtcgccgccccgctccagatctcggagagtcgaggggaaggcaaagggcggtggagccggaaggatgacggcggcggcggcgccgggaggatggcagcggcggcgacgggaagacgacggcgacgacgctaggcggaatgggcggcgggcaggaagggagccatgatgggatggggaaagagggagagagaggagagaggggtgggacccacatcatatggccagccgtcctggctggccaactttggctagtgaggtgggaaatttagccagctagatggcttggagagccatttggctagtctattggagtagatttttttgtccaaattagctaaaatttaacttagagagccatttggctagtctcttggagatgctctagaggcaaacacaatgttgtatttagaggaggttctataggagagagaagggacaagagctaaccatactcattaattatatggttctactccctccatttcaggttttaaaatgtttttgacttggtcaaagttaaactattttaaatttggccaagtttataaaaaagataatattttgatacaagataaattattataaaaaatatatttaattattaatttaataaaactaatttggtaatttaaatattattatatttgtctataaacttagttaaacttaaagcagtttaactttaaccaaaatcaaaacatcttataacctgaaacagaagaagtagataagagagaatatatctggcccgcatgtcagatgcctacagctatgaagaagaagagatccgtgctaatatcttggttttcgcaagttgaacaacatgttatattcaagaatgagggacctaaagtaaacttattccctgtcaaaatcgtaaaggaagcccacgtccattggcccaatttgtgatcagggtatagaaggaaggggtaaacactagatcccggtcccagccgcccgcgtcgttcctcttcttcctcaaaacgcaatctctccgaattctccccatcatcgccatcgacggcttcccaggccgggggaggaagaactccgtttcggacccggcgtccgtgtccgttatcgtccgtcggtttccgtgtccgattctgttcttctccatatgttgatatagatagatcgatcgatcggatcccccacccacacaccacaccacatccgccgcgacacagcaagaagaggagagcagaggagaggaagcagagtgttggaaagaaacaaggaataagccggcggccggagatgaagtccggcaagccgatctgcgagaaggtgaagcccgcagtagcagtccgcatattcggcgggctacgttacgctccgccggatggcctggtcgtcaacaatcctctactggctgccttcatccgagctgtttacgtaagtgttttgtttcctccttgcaatatatatatatttatatatatgctgttgcaagattacaattttggttctgcctttgtttcatcggacaatctatggatcgactcaaggaggaaaagggagtttccaaatttttatctggtgcctactgcctagtactgtgggaattgattgtggtttgctactttttaaccatcacctagcatgaacctagaattgcgccaagtagtttattatatattatagatgatgcatattcaggtcggaacctaaagcactctatctctcattctaaaacagaagaaatcgtactatcaattcggtaactaaccaaatgatgaaatagttgcgggtcgttgggtctgacttaattaggagcatttccattgtcatttgctgattcatattgctatcttatttagttggtagtttaactcactccagtgattaggccagcagatggagtgacagaatgctaaatttcatcatctttcggtgctattattattgtgcaccaggaagtttgggtgtcatcatttttctaaaatctttgatgtggtataaccaatttttccttgttattatctagtgctagttgttttgttggtacttcaatcatgtataattttctttgcatccagaatttcttatcttgtagtcccagtgaatggtcgctcactttacctgttatttctttctttgcagaccttatacatggctacgacagtgtttctctacatttttggcatggttactgctatcaaggaatacgaaatgttggtggcactgtccataattgtagtcatgcagcccttcttcatattgatgtggattgcagcaccattccttaggactgtagcaattgtgaaatatgcgatgggactccctgatagtaataacgtcaacagaattacaacaggaaggatgtcagccctagcctgaacaaagtatgcctaagaagggttgttcaagtttatcataattgtgccctctttagaaatagggcactttaagttgctgtcttctttagaagaccttttagattcagatgtgtatttcttagaacatatgttaacagtggcgtagctagcttatagtccatatgggcacaggactaccctagattttagcatagagaccttaatccctactatcaaaattcatggatcatttgcaaaacaaactatacatacttatcatgcttcttaaacttgttagttgggactacctatacatttgtcgacaaatttttccccaaaaatttgacagatgtaattatagtacaatcgtagtgtaattacactgtaacttatatgtaattacactgtaacttgcatgtaactacagtgtaacttatatgtaagtttcacataattttgaatcgttagatctattacaagatttgttttggtgaggaagaaaacaaatcatagcacacacatatatgaaagaatttgttcccacgacctccattttaccgaaataacatgttacggagagatttttgaaagttacatacaagttacactatagttacagtgtaattacatgcaagttacagtgtaattacactacgattgtactgtaattacatctgtcaaatttttgaggaaaaatttgtcgacaaatatatagcaaaatcgtttgtgtttgtttatacgattagattggagctagctgtctttttttttatcatggtgtcttatattacgatgatttatttgaattaggtggtctttaacaattttgtaaatgcatattatattgtatggtgatattaaaaattgtagcataagtaggcacgaccaaggacaaattttgtaaatttcgtagtataatttgtttttgcattattatatttgctatctaccaggtacttggccacacctaaattttttcatcctccatgggaaataggactgcccaatgaaaaattcctagctacgccactgtatgttaaagcaactttgtatgtttatattagttatatgatgcttcatggttcttttgtggcgagtttcatggtttctgctttctccattgtaatatgtgttgattattttgattttggagaataaaaccgcccgttctttttatttatttgtgcaacacatttgtacatgcgtagaggcatttttgcagacgtatccagccatcggggcttctctattcttaatcctaaagcttaacatgtaaagatgttacatcatcatccactaataattattatatttaaacatcatacaagcatgctatattatctacaatttaataatttattaaattttagagaattaaaatgtaagtatgtcaaatcattccacataattcacataatattttaatatagtccatcctcacttagttcatgctatttttcttctctcattaaaccatgtcatctctttttttctagcccatagatgtatagtctaaattatc

SEQ ID NO: 9294 - DNA, 17048 bp, Oryza sativa
acaaaaaggtcctcgcagcctgtgctacaatgaaacaaataagggataactgatgtgcagcctaccttaactgacatgcgacatctgtctgtttaaaaggggcgaaacagaataggatactaaattcaagaatcacatgaacgagaacaaatattatctacgaagaaatatccagaatgacctttcatcaatgtacacttagcctacaaaaaatgcccagcaatttgaaggcttggtaacctaatcagcataatgacactgacagaaaataaggaaaggaaatcttttttcacaagcacatgcaacacagacacagatagacacacatagagatattcatagtgggtcaatgatcctaacttttctcctaaattaagttaatcatcacatttcaacaggacatgtgatgccaaccaaaatcgtacatgatgaaatagtggggagccacttccactttatcattaaacacatgttttcgctgctgcagccatagtttgcaactttgcaagaaattgagtgattcgggttatacaggggtgtgttgacgcaaaattgtctagtggtttcatatcaacatgttgccaggtgaaaaaagcactacagcttatttaggcaaaatgagagcaagatccaggaagaaatatcctcaaaaacaaacaaacattgagcatcgagctaagtaaacatgtaagttgctcccacatagattaaactcacttgcagagctccgaaagaaccaagttcttgcaaacagaaaataatattttcatgcaacctccataaggacttcagtttcttctgagaatccttgaaatcgcataggctcgctcttagcatgcgctcgctctgtattaagcccaataaaaataatgagaagggaaaaaaggaaacagaacacataaggttttgtcaattggagtaatgacaatttcagcataatggtggaacaaaactttacctgaagctttaagctatcaagctctttgatgcatattgtggtaaggttagagtgattaactgggccataaaagtacacctccatatcaggagatgcaaccacactttcaagttcttcattatcaactgaacaaacctatccaacatgagagtgaaaagttttacagagaagaatatcactgagtaatttcccccaatccctagaaatcttgccatgagcaccagcaatatgtacctttgcatgaagtaattcctcaagactgttgatacatttcgtgtagttaagtttattagacccacctgccatataaaacatatgtacattaatcgaccagacatgcttaatataaaagataatcgaagcaaccaaaaataattttagggtaagactacttctattcttagcggtccaaaaggcaaggctgaaaaagagaaaaaccccaaaattaactctaaaattaagttctaaaaggaattcaacgggccaacctaatttattaagattggagcagaagaaaactcaaaggtgctcaacaacagggttgttgaaggtacatatgctacaattacaaccgcaggcaggcgaccacacatttagcactaggtagccacagaacaacagaaagctctacactccagcatcaggagggtcaaggaacttctagaattcaaatgctggctgaggcttataaaccaacgcgcagctaatatttcaaagtgttacataagttactccagcaaacatttttttgagccctgaccataacattttagcattaaatttcaaaagatatctcaggtaatcatgttttaacttataatgtactaatggtgtaaatcacaaacatttgttcataactcatccagctttgaccttttggaagaaaaaatattagaggctgacaaggagaccttcctcctttttctgtaaagctgtgtgaaggcatgacacctgggatggtgaagatggttacagaagcacccacgcaaacatgacatgcacatgagttgaatactcaatatatgcagaatttcaatgcgtaaagcaaaacttcagtgcgtcaagaatttattttatgtgtttttggtccaattttcctctttgctttggtactatgaggcttcaagtgcaatttctgaccaactgtagtggagcagagacattttatatttgagcacatttccgttcggtttttagaactaggagttgatataatgataaatactctttgatcccaatttcttgttcaattatgagtttcagaaaacctttggtgtttctcttccaatggatcatattttttttcaaccactgacaacataaagatttaaggatttaaaatgatcccaaaaaatttagtggcatttaccctgtgttgtaaatttaaaagcataccaagaaatagaatagtatccaagaattgattgtatgtaatgaggcaaggttatgtcctaactcttagataaataaagaagataatatacgtcaggagcatattgactgtacaaaatgcattacagaagaaaagtggtatgcagtactggtagaaagaatcattacctttcccaataattggtgaagcagtcatgccaaaaacccgagggaatttctcaacactgttactattatagaattcctgaaacattgtcataaatatttttaatccagaaaaattgcagttcattgaattaactacaggtactatttaatataagaagctgtcctacaatcctataggtttacttatgtatgaacaatttgctcacctattgatacaacaggagcaacaagcaactggacccaaaagcctactcctaccatgtggatatagtttataagaaacaatttaaatgaaaagagtatcaatgatgtactgcagcatgaggtttaatgggttaaaaactaaacaactaagtattccaatagatgtagattaccaagaattcaaaagttgtaataaagcaagaaaatcatgaacttgccttcataatttgcgcatatggatgccgtttttgcggttgtgcatgatggcactcatcaagtatcagaagtgcaattgagttcatcttgatgaagcaatgacgcaaactttgcaataatatttggggagtcattacaaggacctgacgtggcagaggaagtacaaaagttacgcaaagaactaatgtacagagtagaagaaaagatgaattcaaatggattatatttgaaaaaaatgaatacaataatgatatatgtgctgtctacatgttctcggagtcagacctctagtttcagaataaattaggcaggattaagcaggaccttttagctgaagattcttctccatcgtgtgcatcttaaattagtttatgataagtcaactagttatctacaaagcttctctttcgtttacaaatacttttcatgctggaataataatttgactggtctgcagaggtaatgtactgcaaagtgtacctcaaactccctcatgtcgttctcccattcctgatgatctctcgagtttttaccattcccataataacattgaactttgaaatcggtggaacttgcgatcaccacagcttgctgtataatataataaagaatacttacttttttagtgagcaagagcacagattaaccatggtttttcttttttgataatacactgattaaccatgtaaagttttatttgattctgaaaggtggagctataaccattcataagcaaattgagatgcacacttctagtgagaaattaagaacccatgttcccaattcaaatcggttaccctgacatattgcaaattggaaacttaatggtaacaaatgattgggagcagctgcaagttgatgtaaacctacagtgcggaccaggaaaggaggatatctacctggcgtacaagggggatggttggggcaaggaagatgcagacctcgcggcttggcttgcggatgagatgaccaagctcataaatcagcagcacggcaatgtgcgtcttaccgcatcctgtcccaaggtacactatgatgttctcctccacagccctcttgcagagatccaattgatacctaaatacacaaaattaaaacaatcttcaatgctattctataaattacgccctcacaaaaaaaaacataaattacacatagttgaacaaagcggaggaatggattaaaaaagctaaagaaatgcaacaaaacaagatagttcgccaggtgctgcaccattctgaactcgatgaaagggtgccgtgtcctgccagagtatgggtgcaagggagctaaaatgggtgcaaatgccacagaatcttttctcttctctttttttttttttgacaaagagaggcagatctctcccgcttccattgcagaaacgaggcaaatggcacacaatctggtataataaagggaatgtagttcatttatgcatggagatgatattactactacagattatctggcacactgcattgccaccgagtaacggcgcagtctacataaacacaggctttgaatgcgcatcaacagccatcaatatgtgaagagtagtaccaattattagcagatatgcaaccgcttcccctgagaaagcatctgacagtatcgaatcgtaggcaataaaaacggggattgctttgcaaattacgagtagtaaaaccttaaaattaactaatagaaaaacattttacggactcactgtctccttaagattgatccgctgacctatgcttgaatcagatcggtctaccagacagcagagaatagagcatgaaaatgctccacacaaaaaaaaaaacgctccataaaacccacctaaaacctcccaatactcccgagtaacaaaaaccacgaatcaatcacgaaacgcgaaggtatcgtcgtttcgagggaacaaacagcagcgatttcacttcgtcccacccaccaccatccacgacgcatcaaaaatcccccacaaaataaccaaaaaaaaaaactaacgaggaagacgcggacgcggtagtagtaggaggaggaggaggacgggcggtactcacttgcgcgcgatcgtcctcggatccttcggctccccccgcgtgctgctcggccccgccgccgcggctgccggggcggcggcggcggcgtcgcccatggctggcggcggaagcttcgagccgaagcaacccgcttccccttccccctcccgaagtcaccccccacacacttgggcgctggacacgagacgtaactgtgctccgcgaccgccgctgcggcggaaagcgtgggagggagagagcaagggaggaggggggcccgtggccgaggaggagaggggaagaggaggaagagcgtgcgccgttgcgtgcgtaaaagagcatgtataataacaggctatagcatgtacaatagctgggctattagctagctactaaatgtaattcattctagcatttttcacatttatattaatattaataaatctagacatatatatctatctagatttattaacatcaatataaatatgggaaatactggatgacttacattgtaaaacggagggagtataaacatattttaataagataaaagatgagagagaaaagcagcaggctacagatctatagccagctgcagcacggagtctaagacgtaatgtgtgtataacaggtgggaccggctacagatatgtagctagctgcagtacagactctaagacgtaatgtgtgtataacatgtgggaccaggtattaatagtatagtaagcaactattgtatgaattggctattacattgtctatagatgatttgaagttagtagtgagattagagcaggtacaatagcagactattagccagctacaaatatattttaatgagataaaagataagggagaagagcagcgggctacagatatgtagtcagctacagcacggactccaagacgcaatatgtatatgacaatgggaccatatactaatagtatagtaagcaactattgtataaattggctattagattagttataaataaattggagctagtaattggctatattattaacctttgctcttatcaatcaattaaacttgctctaaacgaggcaagcgaagcgaggagcgggtcgagtcgcgtcaggagtcaggacggcgtttgtttccggcgcacgagagcggcggcagcgttgggagagtcggagagagagagagagggggacccacctggcgtcactgcagaggtggggcccactcgtgcggtagggggacggactgtcctctcctccgggcttttggtctggtcgttttcgtctatactgtgcgcgagcggagcgtgtggtgcggtttgggttgggacttggggtacgacgaggtgacgaagtattgagagatgactctagccggtgtagtactgctggtgtgtggcgtgtgtggcgacgaggaatctgagcccgcgtgggcgtcatcagtgtgcacgacgtgccttgggcagttgggctcggtggatgggagcgcggtaagaactgcaacgtgtacccagcgtggttttcccaggtgttacatacaccgtctgtaaaaaaaattaatttgaacatgaacttgtccatgcgtattgcttagaattggatttttttttccggatagagtataggtcggtatgtgggccgtaaattccaatacttgtttggtttacatctaatctcatctaaattatacgtctttcatttggtttataaaaatactcctttgatagctagccagacaagaggatagccaaattttcccaaaaaaaaagagtagcaacaaccaacttcatatcactctgagaaagagatggttgcaccacgtgatataccagtgcattttatataataaacaaatgtaatggtataatgagatgattggttaccgaataggaaaaggtagcatatctcgttttcaccataggtcgaggacaacggtggtggtagtcacacataggttggctacaaatcaagagacttctatttataatggttgtaaaccatagtacacaaaattatcagatgagttggaacttgtaaaacgtaaggcaagcaatggatggttaatagaggttttattgaactacttgatttgttgacgggtctatttctaggggaacacactaccaaagacaacttatgaagaaaaaaatgtatcatgtccactgaggctagggtacagagaattcacgcatacccaattgactgtatattgtaatacaaggataatgtcggcttagaagcatgtccttcgtgcaaagctacttgatacgagagaaaaggtactagcatagaagacaagaatgaattcgaagaagagtgtctaacaaatcttttatactatttgcctataaaaattcatttgaggccatcatatatgggccggtatgtgctagtgtcataagtttacattacatcaacaagaactcagcaacaactaaccaatgaacaatgatatagtggtaggttatttttgtaattcctacgttggtggcatgtatcatcttgtaaataacatgtactcaataagttactattactcttacttctgttgtgtacacaaataatagtgtggttgggttaaaccaaatattggctaaattacatgcattggatccagggtgaatcaaatggcttggtgatcagcccgagcaaccactcggctcgtaagtaatgacactatgatgacatatattttcagtgttcaataatatctatcattgtccgcgcatgtatatgtctagcatatctaaattcctctacctttttagataatggatataaaacccgatatttgcttcaattgaagctacaaccacttattacaaagttattggcacgaagcctaaacacactagaaataacacaatggtagatgaaaagacgacacaaccacaccaaccaaaggaaaatagcttatcaaagttcataaattcctccactggtagggataaggcgcactcaacctagcgattttcctttgataacctagttcataaatatatctaaaaactaaaagaaataaaaacaatttaagagatgttcaacactataacatctaccacgacaaaaaaaaagatactcaatatactatgtatgtagggagggaaaaaaaagataaatctcaggtgaataataaggtgatatgtttgaacactacgtactagagcacaattttttttcttgtatatgaatccggacatctaaactaggcataaatccaagccgccccttaatttgctgcgaccaacccgtggcagcaagaaaacctcgctcctcgctcagtaatcgcctcatcgatcgggctagtccgttcgacgacgggtgtgtacgtgggtgcaataaagaacaagaaaatcgcgcacagattccttccctcccttgccctccataccagaagctctctctgatcccacccccaaagtgcgcttggagcctctccacctccaggtgacgctactggctgcgcgtccctttttgtttctctttctcctagcaacaagctatagatcacctagctagtgatgccccagccttttaactagcttcggactcgatcgtatagtagctgcgagctcgtcggacagtacagcctcgatcatggggacgacgtcgagtccggacaccatggcggcggcggccggccccagcctgtccatcaccgtcgagaagaacccgccggaggcgcgcttgcttcagctcggcatcaagtcgtggcccaagtatgtacatgcataagcctggctcttccttaattaatctcctcgttatttggttgttaatttccatccggtgtgatttgatttgtaaaactaagttagtttaattttggatgtgattggttatataagatgggggtgtccgccggggaagttcccgctcaagttcgacgcgaggctgacgtgctacctcctcaagggcagggtgagggcctccgtgaagggcaccgggaggtgcgtcgagttcggcgccggcgacctcgtcgtcttccccaagggcctcagctgcacatgggacgtcgtcgtcggcatcgacaagcactacaacttcgactcctagtcagttaaacaccaagctagacatgcatgcatcattcatgcttcgctcgatcgtctcttcttaattaatttgtagcgttacatctttgttaatcatctcctcacttcacagtttagtgacacgctaagcttgcagcaagtgttttgttcttggcaaagtcggtaaatactaaatacctccatttgtgtatgatttttatgctcttttcttttgtaaaatacgacgatgccacatggtgatctagctaggtagcaagattttgtgtcagccgttattagttttcagaactcacatgagtggaaacaaacaaaaattcactggctgctaagttcagaagccctcacatgccatctgttaacgaatatcaaaactgcaaagatgtttttggatgctttatttgaccgtcacggctctcatcaatcatcatcgtcataggaccaaaaagcaattaagcaaagcagcagcactgtctctagttcagtgcacctgtgaggttcctgcactagcaagctttgagcttaatgatgatcattggccgtttttaccggctgcttttggcgatgcgcctctcttttttttccacctccttttgattcagtggtctcgaacccagctttggaccgggcggccgggtggtgactggtgagtgcaccgggcggaaatgcgcgtgcaatgttgctgtcactgatggagctagcgaaagggatggtccacgacgcagtcctcggcgtggtggtggtgatgaattggcttcacacataacgctctcatcacgcagaaaagaccaatcttgtgttagatttaattgggtaattaatccatttaaatcaattaaatcaaataaattccaaggctcattatgctaggaattcatgtgaattcattcttctatgggatatcaatgggatgaagagttttgagaattaatccatttgattcaggaattgataacttatatcaattagtcctaattgatggatggttgatggttgtgtagtggaggatggttcatggctagttgatgacaattagttgctctattcctcttcctattccattggtaacttacatcaattactcttaattgattgttggttgatggttgtgtagtggaggatggttcatggctagttgatgacaattagttgctccattcctcttcctattccatgactcttactcttcatcttccattcctcttataaaatgagaatggatttgatctcccgcgagaagaagaagacacactttcatccattttcaaaagctgttgctgctacggtaatcccatcccgacgagtgtgtgcacacgcgttgggagagtaggcctccgaaaccacgcgttgctgcgacgtttgcacagacgggcgggcgatcaggtttttggggagcgcaaggcgcgactactcactgttcgtcaacatctacttcatcttcaccaacatttcgaacactggagacaaggagaaggagactcccgtcaacaccaacggaggcaatactgcctcaaactccagcggaggaacattcttggggtataaccttattacattatttcaattagaagttttactgttaatgttcatcgcaatgtcaacattgtgtcattatgtgattgttgatgcttattcaacgttaagcatgctcatgttgattacattcaccactatcactggatcaaatcctattgtaaatatcatgtttattatcttgttattttggattaaaatatgccgaattatgaccaaatttccaacatcttggtgacctgtgggcgttaaatttccagattctttgaattttgataacactgtttggggtgtctaatctttaaatcaaatcattttctaaaaaagctaaatcaaatacccagtgtggtgccaggctagctttgaagctgaatatatacagaaacacgtatatctatatgcatgctctaatcttctttcttttcccctttatgacacaagtctgaaattgattcctgccgagcattgcatgatccgtcattggtttgtagcttggcccagcaaagatgaaacaccgccgctgcccgcacgagccggtgatggatgatcagcggatgcaggccggttcatcggagatgggtcgttctgtcgaaaatgtcgggaataagttcactccgactccgggttcaatctaatccatatcttgacccctaaactataaaaaccagtgtaaaatgactctcttggtggtcttaagcgtggtttttgatgaggtggctcaataatgtaacctaatcggctgagtcagtatgtaggacccatatgtcagcatgaagattttcttttttctttccttgtcctctcgtcgttgaacaggctctccttcccgtccagtctcctcgtgtatgacagcccgagccgcgaccgcacgctgcaaaggtcgctagtgctggagtcgagccccatgaactcccccatcacggcggtgagcggtggcccgatgagcggtctgtcgagggatattgtggttgagggatattgtcgctattgtggttgagggatatgatcagattggcatatttaagggagtgaaagtaaacttattctaaaatgtcggcctagacaggagtccgagacagccggcccggcctaccaaataacacgtaagacggcagaattgggccgttggattagggggcctataggccttgcatgcagccctgcacgaagtctttcaccgcgaggcggtagaactaagaaaacggaatacacgcttccttccagtaaataaaataaaacaaaatgaaggaaaataaagaaaaaacataatagaacgtgataaccgttgaggtgtggtgtagtatatgcgctgacgtcacccccaacgtcataccgtccgcttgctcgcaaaaaaaaaatggaagtaattttcagagagagaaaaatgtagtgctacgtattaccactagtcagtcagagttgctgcagtgtaggttagcacaaaatattgcggcgtggtgagctgattaactctgataatccaatcctcttagatccagaaagcgagttcatcacgcattcacgcgacagccgacggcgccagttcgcgaaaagaaaatttttaggtgtcatgtcggatgtttactagatgttgaaaggggttttcgaacactaatgaaaatactaattttataactcacctggaaatcgcgagacgaatcttttgagactaattaatccatcattagcatatgtgggttactgtaacacttatgactaatcattgactaattaggctcaaaagattcgtctcgcgatttctcccttaactgtgtaattagtttttcttttaatctatatttaatgattcatgcatatgttaaagattcggtgtgatatttttgagggaaaaaattgggcaactattcaaacttctaacttttttcatcacatcaaaactttcctacatacagattaggaaagttttgatgtgatagaaaaattgaaagtttgaagaaaaagttgtgaactaaaccaagcatgagtatgaacatttaaaccctgtggaggaaaaaaagaccgcaccttctgcaagtctcaaccactagtatcaggattcaagatcccctatttttgaccaggaaatatcaaagccataaatgaatgggtgatacgttcattcacgctctaatcttgagcctctatctccccccaaaaaaaggtcagctctgactttaagatgcaggaagattaaatgcaatggctccgaccgtacgacggtagcagtagcagcagcagcaggacatcgacatctggtcgacacggaggaaactctggttatgcaagtgagacacgcaggaatcaatgaggatctctatcagataaatcaccctcgttgacacattggacagctagatctgcacggaaatggaaattaacacctgtaatgtccgagaaaaagagtgaattaacatcagaagaaagaacatagtcttgagtgacattgagtgctgggtgctgttgatgttcttccattcgatcaattctgtgattgatcctgtttacttgtacaatacgatgacaaaaatcactttctagaatacaatcgagcattgactagtactttgtaagaacttgtctcctgggaaaataaatcattgatcgagaggggaactttgctaagcatctttcagcatgtcatcagtttttgacagcacaacgtcagaccagctaggatacttgtgcgtacttgtgtagagaaacgctgactttgcatcttatggagtatatactactgatttctgtcccttttaactgaatcttaattagtatttcaacagctcggctcgaaatggaagccattgttcttccaaaaagaaatggaagtcattagttgtccagaaggccgagagcgacatttgattattaattagctcaaccatgattttttttacaaggaatctaatacaattatttggccaaatgaactgtatctgaatcaacagacgtaaacatttgagtatttggcagaagagaggttagctaccatttcctctactcctctttggtgcattgactatgtgacattccctgtgataccttaggtaggtatctgtatccctggttatctcataaactatactatgttccgaagaatctccaccaatcatgcattcagtgcctaatcgatcaattaccttcattctaatgaaacattcaacttcccgcacggtgtcgagcttccaacttggagatttagacagtcttggataattataaatggggagctagcgagcaacagcaaccagacaactcataaatcattttgttacattgcctaaaaataaccctctagtctatcttagaataaacaagaaagcgacaacgcattcaggaatcaagaacatgcgtacaacagaaacccctttgaagtagatgcaatgcaatccgtcatcaaagtgcaccttatcaatttataacgactaagctgcctttaaagcttgtaacatttatcttcagtctgtatagataagatttcagagccaaagcaccacagatatatcttcaggacactctcagaattcagaaagaaacaccatgagtgaggtataaaaacaggtcattctagattaatccatgcctacatgcaacgtgatccatgccactagatcattaaccaaactagattccaagcaaatgcatagctgtttctttccggcgggaatcacccagatcagcatgatccaaaagagattcaggtcaatgcgaagctgttagcccatgggattctgaatttcgtattgccgccaaattaacatgtcaaatgtcactgaaactcataaactaggggggcacacaacggtatgaaaacatgcttggctgcttgcaggaatgtatcacattacaggcatagaatagtagaaaatactttcccttgtagaaatattctccttgttttcttttcctgctcacatggcacactaatctaatcttgtcaggatgaacagctagaacagaaactgatagaagataactctggcgaatgggagtggaggacaacatcaagcggaactcagatatcgctttaatctatccaagaagcaggtagatcagatgctatcgcgttacgtctcacccgatttcttaaaacagaaacccgatttaactaaaccaaagtcagaatatccacgcgtagatgcaacaatcatgtagtgattcttcacataagcataagcaacacgaagagaaatagcagattaatcagcgaacatgcaaagcggaatttggcaacgggagatgcggcaagtggggaagtttcttactctgaatatgtttacctgcagagttcattttttttctctctcaccccaacaagtgcatattagtccatccttgctgatggcgatttaataaggaatccgataggtgacagggagataaacaaatcggacgctgaccttgctgtggcgaactgggtgatcatcgatggcgatgcgagacatcacccaactgcgtcgggtctccacaggagggagttgcttgtgcttggtccgtttggggatcgttaacttaaacacttttacggcgacctcgacacagctaaaccctaaactaattgcgagttagaggcttatctcgatctcttctatgcagatgtttgacaacttgggagtagtttactgctggtttggagtatcttctcaacttgcaatttgattatgtttaaacggggagtgcatgattggtgttcgcatggttttaaatcagattttataaactgatgctcgtcaagagacgacaaggggccagattagggcagcagagtacgtgcttgcttgaattctgaagcatgtacgaaataaatacgatagaaatttcttaagaaattatgtatttttctgaacctccaataagatcgcgtggttgccagtattgcacgtcgactactacatatctgaattcagaacaatccagaagagatgttactgttgatatttctacgtataaaaaaaacatcaaaatgctttgtatattacgaaaacagagcgagttcccttattgaccagagcaaaaaggttgagcctgattaaacaaagtctatgagcttgcaggatgcgtctcttcccaaatttattcacaccaaagtcctcttcgatgacatcgccctatttgaatcttatcgttgacattgctcattttgctctttagttaatctgggcaaatgattggcggtggtacttcgtgatgtggaacagtgaaactgtttgtcaatctgtgcgctcgaggtacaaccaggtcggttcctttgctgttttattaataaaaggagcataaattagcgccaaaactcaagttttaccacaaaaaaacagtcagttttaataaagattaagcaaacccttgaattgcactctgtaaaatgtttgtttcccctcaaaagctgataaggacggacgccgatgtgaaacgaaacctgctatttcaaccatgtacatatataatcaagaatttcctacacgacttccattttttgtgtgttgactagtttctctccttcctggaggtgttaaaagagttccgattctgtcaaaacttccatacagataaatccaacctgtcaaactaccagctgtttaattattccttttcccattttgttatggtacacaaaggcacataaccatttacacggagcagaacagaataggatatgtattaaaaaaacagaatggagaaaaatcctgagtcacaagcacgaaaaatgaaggcgagattaattcgaaaccatacacatcatcatccacatctcgtcgtttgtctcacaggacatgacacagggagcgaaaaccacatcattaatcgcggcctacagctacacatccagattctcccgggatccccgaaacggctcccaccccgcaaccgccgcaagccgacccagccaaaggagatccccctccaccacggaagattcactgcgcggtgggccccgccgccaaaaaccaaaacgacgaaaccattccgcgtcatctctcccgcacggcgagcgagcgagcgagcgacctgacctcctcctcctataaatccggcgccagcgtttctccccaacctcccacgcccaatcctgccgccgtttcagcagctctagtttgaacgagggatcgtagagaggagggtttggtgagggagggaggaagatggcgacgtgcgcggcggacctggcgccgctgctggggccggtggcggcgaacgcgacggactacctgtgcaaccggttcgccgacacgacgtcggcggtggacgcgacgtacctgctcttctcggcgtacctcgtgttcgccatgcagctcgggttcgcgatgctctgcgccgggtcggtgcgggccaagaacacgatgaacatcatgctcaccaacgtgctcgacgccgcggccggggcgctcttctactacctcttcggcttcgccttcgccttcggcacgccgtccaacggcttcatcgggaagcagttcttcggcctcaagcacatgccgcagaccgggttcgactacgacttcttcctcttccagtggg

SEQ ID NO: 9295 - DNA, 9236 bp, Oryza sativa
cctctgcctcccgcacgtccggacctctgctgttcggctccggtgtcatcgacttcgccggctccggcgtcgtccacatggtcggcggtgtcgccgggctctggggcgcgctcatcgagggcccccgcatcgggaggttcgaccacgccggccgatcggtggcgctcaagggccacagcgcgtcgctcgtcgtgcttggcaccttcctgctgtggttcggctggtacggattcaaccccgggtcgttcaccaccatcctcaagacgtacggcccggccggcggcatcaacgggcagtggtccggagtcggccgcaccgccgtgacgacgaccctggccggcagcgtggcggcgctcaccacgctgttcgggaagcggctccagacggggcactggaacgtggtcgacgtctgcaacggcctcctcggcgggttcgccgccatcaccgccgggtgcagcgtcgtcgacccgtgggccgcgatcatctgcgggttcgtctcggcgtgggtgctcatcggcctcaacgcgctcgccgcgcgcctcaagttcgacgacccgctcgaggccgcccagctccacggcgggtgcggcgcgtgggggatcctcttcaccgcgctcttcgcgaggcagaagtacgtcgaggagatctacggcgccggccggccgtacggcctgttcatgggcggcggcggcaagctgctcgccgcgcacgtcatccagatcctggtcatcttcgggtgggtcagctgcaccatgggacctctcttctacgggctcaagaagctcggcctgctccgcatctccgccgaggacgagacgtccggcatggacctgacacggcacggcgggttcgcgtacgtctaccacgacgaggacgagcacgacaagtctggggttggtgggttcatgctccggtccgcgcagacccgcgtcgagccggcggcggcggctgcctccaacagcaacaaccaagtgtaaccaatccagaacgaacgacgtcacagcgaaggaagaaatcacgggtttctctccctctccgatctcgatcgtcacgtcataaatttgatccccatatttgattgccagtttctgtttgggccaaatgcttttgccgctctctctggtgttgcaagactgtaaaaacactgtaggatggacgagtgtctttcacttttgctgggcttctcttgtgtacaggcatgcgtacgtgtcttagaatgtgtggtgtgaaggtgggaagaatcagaggttagggtttaattttcttttgcacaatggttactgctattattgttttattttgtggtcgaattttatcgtcataagggtgtggtggaatggtggtcaagataggtggctgtgcagggctcaaagactttgcgtgggtccttttgtcctgcagtgctctacctctctatcaaaactttggcttatttcctggaatctagtggtttgagagtgtttgttttatactcagttctgcattatgtttacgatatatatttttttttaccaaaagcatttcatttaaactctaccgagagtacttgtttatgctgaatcagtacatctacactgagtgatatttagagccttatactaattgaagattaaatagtcaaagtccatgtgcacatttctactcgccagttagtctgaaagaaaagattcctgtgtgcaattgtgcatatcagcatatgccacctggcgataaagtaaacatactatagttgtgaactgtgcgatgacaacgaccaaattaagcagcctgatctttacaacgaccgctgtatagagaacagactatatcaagttttggtccgctgttcttcttttgggattgtgaagcatgaaaatactacagttttgcatttctttttcccgtaaatgtggaatgcatctcgatatgatatggctattttagcaattgatctgtctcctttttttttcccaaaatacaattgatctctcatctgtcgcacacagccacgatatggtatagagttaattttggcatttttggcaatatagcacattactattatccccttaaatattgtgatatctgtttttcaatatatctgctcgttgcactgattagtccgcaaaatgaggtctgcaaattgctcggtacagcttttgactatatatattaggataaacggatgctttctcgtcttgtagttctgaattgcaatatgttttcctctttttttaatcgacgacaatatattatccattcaatcatggtctgtagtaccttcctgcagtacactccctacctgtaaatttcaaacatgtatgcaccacagtacatactcctacatctctctttcaccaatgctgccaaataagacgctaggagattgaaagagattggatagcacaacatgcgcttgcctcacctctctcaccagtcaccactcacgacaatacaggttgatacgcacggctagcactgatccgcaaacaccccgcataattaattagcaaagtagccaatatcatcaggtgagtacgttactaatctgactgcttgaatctgtgacaaagaagaaacgactggttgggggggagagaacatagatcgagacctatagctatcatatcccaccgtaagattcccacactgcgcggctgccgatcaaaaggctgtggaaaaaactaggaataattgaactttcgcagcactgaacgtcaaaaaaactttcgcagcagaagatataaaatgagtgtaccgtatcgttttcacgacagaaagccgatactagtcctctatattttactcctgttatgtatgcccacgatcgaagttccggttaatctctccaagctaatcagtatacggtcttatcaattgcaaattgagatttttttttacgtgaagaaaactaccttagatactccctttacctaagcgcgcacgggtacggaaaaggacacgcgcgcacttccctcgtagaaggagcaggaggatgagcgcggccgcaaagctgggcgcgcaccctttgtgatgtcaccgcctcacgagacgggcccgaggaaatcggaactcgaaaggcacgccacactcgagcgcaccggcgcgccaccgctcgcatcgcgcggacggggggaagcccggaggcggacccgcgcgcgcactcagctcggcggtgaccgagccgcgcccccgctcgcgtctcagtcctcgcctttttttttttcctttcctgacgtctcagaatcaggagacccgagcgggcgcgcgcgcgccgcaccacacgtccacacggctcggatcagcagctagcagcagcagcagcgcgcgctcccctgcgaaacgggggtagtctcgcggtctcggtggatcacgaggatcccgtcgtcaaaccgtcgtctgccgcccgatcgactgcccgcagccaaaggcaacgacacggccgacggcacgcgacgtgagcaaagtacatatactagagtatactagtcggggtgctgcgtgagcgtgatgcgcacatcgatgtgattggtgtgcagccgcgcggagtcgatcgcatacttgcatgcatgcatgtacacgatcattgtttagcgagaagataatgccgcgtatgattttcggagagataataatgtctcgtgatacaggcgtacagcgctctgaggttgtccctacctctcgtcgcgtcagctagcgggggagcaggatcctcccatccatgtaggtacagttgggctgggaagttgtttaatccatcaccaagatctgcccgtacaaaaaacgtttgaaactcgggttaagataatggatgatcgagcatcgaaaagttcccctttttgagcgggcgggagcgacagcttttacgccccgaaagattagtacacgtaatttaatggctacggtggtttctccgttttttaacaaattggtccttttcaaaaacttatttcaaaactaatccttacaaaaaaaaactttaaccaaaaatagaactcagagccatggaccttagcgctaagctcgaatccgaggtggtaggaatttgctaagttgtttggtactgaggttctaatgatttaaattactgcggaggcatttagtttaacaacccaccgatagtatagtggtagtgggcttctactctaaccttatggagcagggttcgatccctcatctctcccattttttttcttttcttctttttcttctctctctctctctctttattttttctttttttttcttcttccgatcccccatctctcccttttttttttctttttcttcttttttcttctctctctcgctctttattttttttctttttttcttttttgtttgtctcgtgatactatcttcaaaagatatgtttaagttgcaatttttttgaattaggaaaaaatattaaagtggtatattatatggcaattgagaacttaaactgaaatttcaaatcaaattcaaaataaaacaaatttacaaacgaaactgtcattttgtaaagaataagagtgagtagtcgagagaaaaaaaacttattttgtaaaacatattaattttaaaagaatgctatggggaagagaaaaggaaaaaacccaaaatacaaaaaaatattaagtattaattttaaaagaatgctatgaggaagagaatgctatgagaaagataaaaggaaaaaacccaaaataattttaaaagaatgctatgaggaagagaaaaggaaaaaacccaaaatacaaaaaagtattaatttaaaagaatgctatgaggaagagaaaaggaaaaaacccaaaataaaaaaaatagaaaaggaaaaacatattaattttgaaagaatgctatgagaaagagaaaaggaaaaaacccaaaatacaacaaagagaaaaggaaaaaacatattaatttaaaagaatgctatgagaaagagaaaaggaaaaaaaacccaaaatacaacaaagagaaaaggaaaaaaccccccaaaaaatattaattttaaaagaatgctatgagaaagagaaaaggaaaaaacccaaaaaaaaaggtgaggtgggataccaggattcgaacctgaaacccaatgcctaaaagcttgagacatcaaccactaggctatcactattttgctacacttagatgcttgcgcctctatttgaatcgtcaggacctcagcgccaagtagcaaattcatgccacctaagattagatgttagtgccaacaatattgacgttgagacgttgtagctcaacgacagggtctatggcgctgagtccacggcctatttttggttaaagtttttttgcagggactagttttgaaataagtttttgaaaaggaccaatttattaaaaatacgggtggtttctttcccgcatccaaccaggatatagaatttgtacgctactcgctgtaggtactacgtactctctcgttctgtgtcacgaaaaggttcagtctaaacaactccaacatcgtgactagaataatagactgaaatcagcggaagaacaggggttggtgaaaccgcgaaacactgatcggtgaacagtggctggaatctgatgttggacactcaaccgatgccctcatggtcaaattctggagtgggacgcacatgccgacgagaccaccggctggaattggaatctgggcgatacgcttgcattgcagcaagggcgcagcatttgttatttcttttttttgcagcttgtacggttgcatcctcacacctgatgtgaccaacgtgtttctgtcccggcatgcttccatcgacggttggtgttgggatcgttgtgtgcccgaagacgcggaggggcaccggttaaactgaaccgacctctctcggtcgtgtacaagtacaacaagtcgcaatgctgctacgtacagtgccacgaacacgaggcaagtgtatggtggcgaagcggccaggtcgagggaaattgcgtaggcgagctgggctgccgccaaaggggaaaacggcaaaagcagtcctgtcttcttgcttgtgagagggtgagggtagctgcatgtgagaagatgatcgcttattcaatactcccccgtttcataatgtaagtcattctattattttccacatttatattgatgttaataaatatagacatatatatctatttagatttattaatattaatataaatgtgagaaatactagaatgacttaaattgtgaaacggagaaaatactagctagggaaaagaaagagactgcatttacaagacttgtgtgagcacgaaacggtgaccattgtcaaaggcgacaacggcctgcctgacttcttatcgttttgttgaaaagaaaaaggaaggggacgtatacggcttgaaagtagagattgcatagtcccaagcatagtgaagtacaggaattggccaggctcgagtacgtgcaagctataacactctctttcttatcgccctttcctgctgtagtattacgctcttatctagttcccaactttttctttaaacttttaacttttttattacatcaaaactttcctacacacataaactttcaacttttttcttcaaactttcaattttagtcaaactttcaattttggcgtggatctaaacacacctacgtataccaaactattctactcctataataactactattcactgcatagtactaaggaatcaagaatttgttcatgataatttcagggtttagggtttagggtaatactcccttcatttcaaaatacaagaatcatccacctttaatccaaatatcaaaaaaataattattatcatcttatagtttggatcatcttaataaatacaatttatgcatccaatataattaaaaatcttaagtatggaagattttaaacataatattttagcgggaaaaaagtgttacttaatagcatgcattcatgcatgccttatattgtaaaacatctaaaaaaagttatgttttatattatagaattgatagagtagcttctttgtactataaaggcaatagcaatgcggcgcatgtatttgtcgaacctcacatgccacatgggctaaggaacggtgatagacacgaggttcacaatgctgtaacctcaagtggggtctaaacaataaagtttttccttttcttttctccacctttcccctctctctccccctttcctcgagaccgacactctcctctccgcctttcaccgctctggccaccaccaccggaccacccttccctctcccatccggcctccttcctcggcggcggttaaggaggtcctcactggcgtagctgcgtagggcagattgagttgtcgcccttcacgaccgccccttcctcgtctactccggtctcctccccaggctatctcgaatccacgcagcggtggcggttgaggagccccaggcaacacgggcaatgagctcaccgacggccgcacggggcggatcgagccgatgacgcccctccccgccccgctccggccaccaccgccccttcatctccccctccggcttcctcacttagctacccccaatccacgcagcagtggcagtggatgagtcccccggtgatgcggccggcggggcagatcgaggacgaccgcccctccctccccacccctagccaccatcgctcgatcaaccagggccggatctagcggcgttggcgcccttactgctctcccctctccagcgcggatcgaagcaggccggatctagcggcgttggcgcccttactgctctcccctctccagcgcggatcgaagcaggtgggaggcatgggctagcgagggcaccttcgtcgaggtcgggctcttcgatgcttcaccacctatgcacccctctatagcgagcttcactgacacatatcgagctcttttctttagtcggacaccgttatcccttctctctctcgctctcgccacgcgtggatgaccactttttctaaccgaactgctgcaaggctctcatgatcaactttggtcacgtgaagccggtgaaggaacggtctccactcccctctcttctccacacaagcgacttatgtacgtagaccaacattgccacacgtcatgtgtgtgcactgtgaatgacctaattactactgcctccgtcccaaaataagtgtagttttgcactattcacgtttaatgtttgactgttcgtcttatttgaaaaaaatttatgattagtatctgtattgctattagatgataaaacatgaatagtactctatgtgtgactaaatatcttcaaatttttcaaataagacggatggtcaaacgttgggcacggatatccacggctgcacttattttgggacggaggtagtaatacaattcgattgtttgtgtttgtcgcgaacgtgcagtggtgtcggagccttggagcgcccactgggaaattaatgggaaccttaacgatgcttcgaaaaccagcaacacatctgtcgtccaaagatgccacactcaccacattttacgccagctttgacctgacatgataaagtgtcgaactgtcgatccacgcatacgtcagaacctacgacggcgctgttccggattgcacgaaattccaacttgtcatgtaaacagtaaactaacctacctatagagtcgtagccattgtaccctactactcctactgtactgacaggcgttgaagtaaacggctgcatgcagctcgctgccaaaaactgcagctctctatacgtagaatccagtagagagtgctgttggatcacacctcgccatcccggttcaacgcccagcggagcaagtctacgccccgatacggaacgtgacgaactgcatgcatcgggaaaaaggccacacgagttattgcaggccggcggcggcggggtcttcgtcttcgcggacggatcgtggattggatccacgccgcgctgaccagaatcaatcactcgttgccaagcgcacgagacgtatcgtacggtcgatggcagcaggtagtagtagtagcagcagcatgtccttggtctagatggcagaagtatctatctctcgctggatcggtgccgtgcggggccgtgcgtggggttagtaatttgcccgcgtgcgcagcaacttttgaacgtcgagctgatgacgaacaggagagctcagcgctgacttgagaaccggttcgtcgtgtggggtctcaggctgtgatcaatggatcctgtcatgtgcagtgaacttcggatgcagaggacagctactgtgggccagttgattgggagatggatgaccggggggggggggggggggggg

SEQ ID NO: 9296 - DNA, 23077 bp, Oryza sativa
ggggggggggaggaggcgacggcggaactgatcatgatcaagcagctgcatgcgaattgctcctcgcctctgatagtgtgatcgcctatctgatttactagtatataaattagtagaaccaggttttcgattggaaaggtgctgtcaaaagtcaataaccacctaatctaatgcaacctggatattactccatgcttatataatgctcggctgattgattcctgcaattgctagtagctagatcagtagtatcttggtgagttggtatagttttttttttttcaacgctctcaagtctgaagatcccaggcactttctttattgcaattttccatttttaaaaactcgggtgtcgtttttgctcaacagttgacacggatatatcgattgggagatatttgtcagaatttcaagctgctgaaagcaatgacatgctttcgttgtgcgttttgaagcagtcttagcttccttgctacaagcacttctgacatgaaaaggattggtacctggtacatgcaactgcgagtgaacattgagcacaactagtactagccactagccagcgctcccctgacctttatccccaaggcccaaactacttgtcaagtcgccaacccgccgaagtacaatctaacaacagtggtagagcatggcataaatgactgagataagatgcagtccaatctacatggataggataagattgctgaaaatctctctaaaattccaattccctgttcttccgaacccctacgtacagacattctgcgccgcgccattgacaacttgatcaaatcacaaggaaagtgtgatggtccaacataaacggatcaattgcatgcagcatgctggaggcaccagctttggttcaatggaccgcattagatattcccagaagcatcacccatatattatctgttcaggttattagctgcagatgggaattgttatacagtagtgaactgaaaacagatgccccggaataatatggaacgatatgatttcttattctgtactgtccaattgtagccaaaagtaatggacaagggtcaaagatgtttggagcatgagcaaaaggtcatgcgggcatgcatgagcaaccaagataaggtcccaaggaacctcttacaggtttgaacaggaaggacttggtgagaaacttttggcagttttgggtccattttgaactacactactgggcaacaaacacaacatgggccactacgggataagccgaggcgagctgcctgcagttgccaacactacaggaatctgcacggcccattggtgaaaaggcctgtgtggagtggactctggcccgttagctgtggccgcaggctaacagccgactagttgaaacttgaaagtttgacgctgtacatgcttaactctgagtctctgagtattcaacaaatatactatcggcctatcggggtgaagaaactcacaagtcacacccagcatgtccgcatgttgcatgtatttactcgctagaaaataacagcagatgatagatcgatcaccaagtcttgcacagatagcgcacttacaatttttcctacagaaaaatagcagccaagtgcggcatagtacataggagcaccaagctagcaaaacaaaatcaggatgtacgtggcattacagcggcatcaggcgttgattgctggcgaaacaaatggagaacatccatgtccgaagatcagagctgagagagaccactgtggaatcgcatccatgaacagaaccacaccggatcagctaacgcgttgaagagactttcgtcgtcagggatgctcgccgtcgtcctcgaggagctcttcgactgactcgatgatgaggccgaagcaagcggcaaagccggcctcctctagcacgtcataatcatcatcatcatcgcaggccacctcttcgacgtcaatgacggctttgctgccgagccgggccgccgcctcatcctggaggaccttgactctggcgcagaagctggcaatgtcgtcggcaacgacgacgtcctcctccgtctcgacgcggaagccgtgctcatcgcagatcaggaacccggcctcctccgtcgacgcgaaggggaagacggggtcgtacgcgaatccctccggagtcatggaccagaacctggctggctcgtacagggatcccgggtacagcggcgtccacacggctggttcgagcaggccgagcgcctccaccgtcgacgacgtcgccatctccgccgtcgtcctcttcccggctctcaattcgttcgtctcgtgcgcgatagagagagtgtgtgcgtcacgatccgggcacgaggcgcagggctttgctttgacaggttgacgtacgtgctgcgggagcatggcttatatggagccatgttacgacttggagtcggagacggattgcggctgcacgagcggaggctgggggcgtcacgcctgtacgtacgggcaaaaccaaaacggagtcgagtggaagacgagatgggggaggtagaaaatgccaccgcctcgaccacaaaccatagcagatgatcaccgggttagaaaatcgacttggaataattgtggtattttgttatgttttgattggtagcaaaagagagataatatgactatccctgctaccatgtgatatacggaaaaataaaaaataataatggtgtaaaaacttgtctagttgttgtaaaccctggttgaatggaacatccacactagcaaactgattatacgtggcggtgaccataattcatgcatgtgggtcaatctgaactgaatggagaataatccataatgcaaccatcgttctcaaacagatccatacacagaaatttatgatgctagagtaacaaaaagaacaagatgaaaggaaggacgaagctgcttgagcagattaatgattgctggagacatacttcgctgtgccgccaccctcgaggtccagtcgatgttgctgccatagccttcaagatattcacaactatttgatcgtcgaatttgaacttcatttttcgtggacagatagatatatatcacaatactcaacattttcaaattttttcttcataattttcacagctatttgtgtattgaatttggaagaaaaaagatacacgaggggacattccctcaaggtattagaatccactcccccaaatcatatggtttgcaagatgttgcatttagcacccaacacaagtttatacaccgtaggttcaatttgcccaaaacaatatatctgtagctatattaatggattggctgattcgagaataattgcaggttaataagagaagcaatatctagcatcataaatgttgtcttggatcataaaaaagaacagaaatttatgatgctagagtaacaaaaagaacaagatgcataggcggtgaaagtgcatataatgttttctcatcaatgtgcccctaatgttgtcttggatgcatggttaatggcaaacgtttaaattgtcttggatgttttcattgacatactgaaatactactgaatatagaaaatagttcacattggtgtcaaagcaacgttggagattccggtttcataaaagagatcgaattgaatggatactcgtctggtaaaaatttttttatgagtattggaatatcgtactatcaaaatgttgtttattcgggatttaggctcccgtggagactatgcaaacactgagtcacaaagcttcaatattatcaactccacatccacatttccaccgtgacacaccaaggtgtttacccatcatttttggattttgaaataatatattgaagtgcgacttgtagtttgtaatttcgaacatggaaaatgttctaaactccaaactaaatacataatttgctgcgcggatctatatacagcaaataaataatttaagcaaatgcctacaaatagcatgtgaaaatggtacaagaattgtcaagatcaaatctatcagctcaacttcttgatgatgtgacatgcatgtgcttctttatggcagtgattacagagcacttgatgattttctatttatcaattccattttctgaattatttaatcaataaaaaaactgaaaaatcaagggaaaaaaggggcattgggcaacaaacaggccgaaccgttggcatgccgctgccaacagtacagttgtacacttgctctgatgttcaacggcccacgagtggtaggcactaaaaggcccatgtggagtggaatctggcccggtggttgcgcttgtggctgcagattaggaataagttcactttaggtccctctatttgtcgcccaatccgatttccgtccctcgaccgcaaaaccgggtacaacctgtcccccaactttcgaaaaccgggcacaagatccctcggcggttttgaaggtggttttggctgacgtgacgtctacgtggcttgtttgactagttctccgtcccacgtggcattgatgtggcgctgatgtggcaattatatcttcaaaaaataataaaaatcgtgggcccacaatttaaccatagaaaaaataatttaaaaatgatgggtctcacatgtcagctaaaaaaataaatatggtagggcccacatgggccccacatgtcattcccaaatgaccaaatcctatcctcttcttcctcctctctctggctctccccatctctctgctccctcctctcgccgggcggcgtccagcacgacgggcggcgcggcggcggtaggcggcgcgggcgacggacagcgcatggccggcggcgggcgatggcgcgcgtggcggcgcgcgaggcgcgtggggcaggggcggccatctctctcttgcgcaacagatggattaagttgtgaccacgatcgatcgcttcaaaccaagttgagttcacagcaacgagattcacatactgcaatgcagaaacgcaaacagaacaggcaattcagatggccaaatgcgacagaatggaagagttaaccacaatccagagctagaggattcaaacagcagcaccagaacggcttcactgggttatgttgcgatcgcctaataaccaaactgaaatcacagcagcaaggttcaaatcaccgcaatgcaaacacagacaagcaattcatgagacaattctccactgcttcatcacagatgctcaaatccaaccgaggaactccaagttagttcaaagttcaaaccaattcccttcctccaatccaccgaacttccagaaacacacgcgtacattgaaaccacactcgattaagaacaaggcacgcagaatccgaaccaatttcaaaagttcaagagctccggagtttactcaaattcgccatctcgaactcgaagccacgcacgcacatggagcagagcgaatcacttaccagtggaagggagggcgacggcgagcgaggaaggaggcgcgcggaagcctgcacgcccggagcggcgcctcgcacggaccgcacacggatggctgacgcacaggagcggcgccggcgggagaggagggagtgacgcccgcgcgctcgccggtaggccagggagctcgcctagccgtccgccgcccttctagctcgccggcgggagaggagggagctcggcacggctctagctccttcgttcctcttcccctttcccatacgcgcgtgcccgggagggagtgaggcgagtacgagccgccgccgccgctgctgccgctgtcgcggcggacagggagaagaagctgagggcggaggccgggtcgggggaggaggcgagggcacggagcgtggtgttgagcatgaaggaattgggggcgcaggggagggaggcgaggaggcggagcatggcgtcgggaggggagagcgcggcatagacggcttgtggagcggcggcggaaggatgacgagcgcggtgtagaggcgcttggcaatgccgtaccggcgcgcgcggagggcgtccgggtggtcggcggcggcgacatggatggcgacgtcgatggcgtcttccagggcgccgccgcgctgctcgccttcacgcggagcggcggcgccgaccacgcccgccgccgccgccggagctcgcctgctccgccgcccacccgcgccgtcctctgcctgagaaagagaaagagagagggaaagggaagaagagagagaagggagagggaagaagagaggagtgagactgacatgtggggcccacatggcccacactattttaaaattattttttttgcagccacgttttttattatttttctgagatataattgtcacgtaaacgccacgtcaatgccacgtgggacggagacctagtcaaacaagccacgtatgcgccacgtcagccaaaaccgctgagggaccacgtttgcccggttttcgtaagttgggggacggatcatacccggttttgcagtcaaggacgaaaatcggactggataaaaaataaagagacccaaagtgaacttattcctgcagattatgagcaattctccgttcaaaaaaaaaaaagagagagattatgagcaattctgcaattgagcacgtgggcgtactctcgactcgagcatcgattgtgtgaagaaagaaaccagttaaccagcacgtaattcctcagaaaagaaagcaactgatgatatctcaatcaccaagttttgcatactgcaaaggttaagtgagatagttattccattacatagatagatttgcaacacaacgtactacaaatccaagtgatctgcagcttacatcaatcaagagttaactaatctgagcagaacatcctagattagatactggcgcgaacacaatcttgtgatctgccgcaggagctacaaaattgtcttaaatcctaagagcatctttcccatctttaagggagtaccatgaggtactatgaagtacgagggaccataaggtaacaatctaatctaaccgttgatttagaaggggtatgatcggactaaataaagttaaggcgccgcaaatcaccgcccactcaaccaatagcgataccctgttcccgtctcctaccttctacctcatctccggccgccgtcgcatcatggccgccgcggccacgcgtcacacaagcttcagcctccgtcgcatcgaggccgccgcggctgtgcgtcgcacacgcgtctgccgccgtcgtatcgaggccgccgcggccgccgtcgcatcgaggccgccgagcagccgtcgcatcaaccccgccacggccgccgtggcttcaacgccgccgcatagacgtcgccgcctccacccgctgcatccgccgtcgcaggcgcatcaacatcgccgcctccaccccgtcccatccgccgtcgtagccaccccgaagactccggcatcttttccaccatctggtgtggactctgtcgtaataagaactaaatttgaaatgtgcttcatctggatttgttatttgttggtacattttatggttgaagaagttatgaaggtggtaaattatttggcaggttcactgtgccgtgtacagtggaaggtgttggtagcagaacaaatatgctgtatgatgttgttgtttgtctaagtttgagctgaatttacattgtatgccgtgtgcataagttgtttcaaccattgttgtttgtatcttgtacaactttcataaagtaagtacttgaatcttgttggtctaagtttgatctctgttcaagaagcagcagtgccagcaattttcagttttcagcatcaaaaagcagtaccaagcagcaaatttaaatttgtagcaataattccagcaagaggagcaataaattcaggcaaactgcaattgtgacacagtcaattcagcagcatatatgtgtatttcatctcagcaacaccaacttcagttccgcagatagcatccactagtaacaaataatcagtaagcatgcaccagtaataaatctcgcaagaagcatccatacaaaatgcacacaaacaggggcatcaattatgcaaaccataccactagaattgactgatagacatattacatcggaacacatattacatcggaacttcagtgaacagaaacacacaaacatcagcttgctcgaaaagattggctccaaccaaagcattccatccagttgtgaaggttgctcgcttatccttgaatttcatcagtttcatccgcatccaaccatcgccggcctcccgccgatgcagcgccgccgtcgcatcgaggccgttgccctccgaccctgacgaatcgccaccgccaccgatgcagcacagccgtcgcatccagacagccatgcccgccatcgccgacgaatcgccgccgccgccaatgcagcgcagccgtcgcatccagactgccgcgcccgccgccgttgacgattcgccggggctacccgatctaggccaccatcgggtcgccagtccaacctactcccgccgccatctatcgccgccatgcattctagggtttctttctctcgctgctctagcccgtcgaatacgcggcttctgttctctcgccaaacagagaagtaaacagagaaggaagggatgctgcgtgcgtgatgcggaatagacgcgaaagtacataactaccctcccacccacggtaccacttcaaggcagaggtgtggtaccatgaggtacagatgatttttgaccgtccgatgagacctgatcaacggtcacgatttggtactgcacagcctcaaggacagtaaaaatgctcaaatcctaatgacggcttcagtgtttcgccacgtcgtcttcgtcctctaacatcagtacatcaacccgactagctcgatctccataagactgcactgcacgtgaagcttatagagcacagcaactatgcggcgtccatgaaccgggcctagctcgagctcgtctcgtcgtcgtcctcaaggagctcttcggctaagccgatgatgtggctgaagccttcctctgtcaacgcgtcgtcctcatcgctgcccacctcctcttcggtctcgacgacgtcgtcaccgctgtggcgagacgcgagcgcgcgcgcggccgcctcctctccctggagggcgttcactctggcgcagaagctggcgacgtcctcctccgcctcgacggcagggccggccctgacgggggacgagcagtgcggccgctccgggcccccgtatcgtaggggccccaccccacccccaggccaccccctgccgtggttggcccaacaggccatgcagacgatgagacgctgaggcggaacagaagacgcgagggtttccgattgacgcgcgttagccgccgcccacgtcctcacgctcacgcaaaatcacatcgcgcattcatcccgcagccacagccgcagaccgcatcggcgccgcgttgtcgtccgtcgcccacgccgacgcatcagccatccacggcgggcttcctcttccgcgcgaggcgctgaggcacagccatcaggtgagcagcagcaacacgccaacaccattggtccattgccaatttgccatcgccttatgaaaaattgaaagattgtaactgattctatatgtaatctgttggctgttgccatgtaagtatgtactgatgttcagtagccgtgcattttgctgtcctgtgcaaggtaaattcagttggaccgattgttggatacttggacgaaccgaggaaggcataaaactgcacctagtgtgtatatattttcgatttactagtaaaatgcccgtgcttcgctacgggtaaaaagaacgtttaaatgtaataaatatttcaagaacggatataaaacactgtcccattttgatatactcatattgtcataacgcgctctctatcaactctcacatggcaagcgcatgatattatttacaaaattgagatggtgcttggactgtaatatatcgtgttttgcggatgacggaaagaaaataattacttacttaaaattattgatttttgaattatccgttattgttcgtatattgtctgcattatgcaccacacacaatatccgtggatccacatagttgcctcgtgttgcaatagataaaaactaaattaaatttgtgttgacgtaaaaattaaactatatatcataattatgaaagctaatggcatagccaaattatgaaaatcagtgttattattttttcaatgggagtattgttttccatttataaatcacattgtcaaatatcgaaaaaaataagaagcagattagacgtagagaaaaaaaacagaaattaaaactatggaagcagagtgacagggaagggataagaaagcagcagcagagcagtctcggacctctcggttcttccattctcaatttatctctatacacgatactctgttcttatcctcccatctcactctcttagacactggcagggacatgtaaaaaaaccgctccccatcactttccccacttctcctcctgctcagctgctctcgatgaatccgccgtcttcctttttctgctctttcctcttggttttctctcctctcatctgctgctctccctcctcgaccacccaccgacggcgccactccctctccgccgctccccctccttgtccctccaccgagcccaccggcgatggatccaactcccccgaactcgctggcgatggatcggccttctctgagcttgccgacgacagatccacctcccctgagctcggtccagccgtcgtcggcgttgggtggcgaatcagtcgacgccgatagcagatcgagctccccaacggtggattgagctgccacaacgatgcagttcggtgccgagcggattggggcggctttggcctttaggcggagggagtggtcgaagacggggggaggctgagcgagtcgtggatgccggatccggtgggtttttcttgtctcgtgatgtcctccatgatcactatttggtctgattggtgtttgttttgttggatttctcaggatctggtacagtggacgaatgtccggctcgacgtcccgttggtgcttcttctggtcgtccagtcggctctcaaggcctggctgcggcccgccgagtttgagagctcgcctgccccgtgcctgccagtgactgatgtccttgattcgccgtcagttccagccactgacgcctatggtaattttcatttttaagataatatatcatgttattcatgtgaaatcttgggatcatcttgcattggagcaattctgtttttgaaatgggggaattgcggaacaccagtgtatttccatgctgattaatttggaacatagcatagtgaacagggtgacaggtggttatcttgatcttaaactgtctccaactcttcattgaatgtttctcagatgaattgattcatttaattcattaaagccacaggcatatgctgaccactgcatttcttgtacaatgttgaacaggtacatggagttggctcactgagttgatgaagctttgtggttcatggcagctgatggactcactatggatcaccctattatgacaacagaattctggacatcacatgagtgccttcttcttccctatgagcaagcattacctgaaaacattagagtgaaactccctcacctcatacgtgctgttcatgttgctgtccagatagtaacatgggttaccgacccgatgcatggtaacacaatgaaggctccttgtggcctcaagactcgctcctttgctacttttcagtatttgcttgttcctattacttctcagtagtatgtaactgaataattgtcttatttttgctggacaacctaattgcatatgcactatgctgctatgcagagagaagctgtttatagggtgtttgatggttgattgcggcgtacaatgtctgacaggtacgcggaagtttccgatgcttaatttgaattgttgatattgcaaattaaatcagtaaatctcattctaagtcttttaactcctgttattcattttttattccccgcacaacatacacacacgcacaagttatatctcaccttccagtatatatgttttttaagattgcttttgtattctagtagtttttatactgcataagagtagttttttttttaaaaaaaaacagaacagttagttaatttgatttcattggtttgtagctctacgacttatggaatactgagatgaatataaacctaggtggtacctgtggattgtaatttaaactctacacacatgggtaatcttatatgtcttttcgatgaattaaaaagcttcacaattaagaaaacataatgtatttaaataataaaacaataacgcgaggatctctgcgtgcacaataagtttaggccattaagaatagaatgactgatctacatgatatataatagatttcaaggttctatcacaaagcagaattccatcaagtttatagtgacaaaacactaacttttgaaacattaacaaagttcaggagatcaaaactcaaccaaaaatagcaaaattagaagagacctttaggtgttctatctaaaagaatagcatgcaaagtatatttatctagcaagatattgattaggagattatgtactggtaaaaacaaataattagtttacattatgttaaataattagtttacttgcttgattctcaagtaatttatctctctgaccagaaggtctgcatgatgtgtctgttctagctagaaggccatattggtgtatgagaatctgtcaaatccctatggaatagcgggaactctccttcatgtccaagtctcgcagtcctatcttccgaagccggtaagcattctgcttccattcctacttttccaggcagctttcctagagcctattccttacgtaaaaaatgacctctcgtggtcctactctgtctattcgtttaagccagctgtgcttttcattttcttttatctttccgcgagggcctctgctttcctttctatccctttatttctgggggcattctaaggttttcatgatgatctactctgtggtgctcaattatattactgattgatgtcttacgtttttacagctgtttttgttcgttttattgagctgcaggagattagatcacttcattattttgacactaatatgatattccaacattgaatggtatcttattgtgctaatcattttcctatgttgattcctgtagaagtttattttcaatggcggacatgaactttgggagtggagaagcatatggtaggtgttttgcgctgccgccagttggaaatatgtaagttttacggtctctcaacctcaactccttcctgcttgtttgtgttgcatgatgtttcatggtctgcattgttcagtggatgtggtcatatggatagtcaacctctaaatgatactactactcgtactgaagtaagtacttctagcttgtgtggacactaagatctatactattatgtgggtgtggatgttcaaccactaaatgatacttatcatactgatttgtgcaaacattgataatacctctaaactgcacttagttagctgtgattttgagtgccaccacgcaatcatggaagcaatctcagaacaacttgatatggatgcatgatgcatatgtattgagtattttgcatgccactgtttgtctttatttcatattagaattgcatatagtgtagtagttgttcttgctcctactacatttgacctggcagagttgatgcaaagttggatcattctaaaaaaaattaatctggttctaaccttttcatttgtgtgtatgttaagagtgaaaaataattgctgctaatgcttgctatatgtaattgattttgtctgaatttactcaataatttaggtaaaaggtgggaaagtagtgagcaggaagtagaagaataatttacaaattccagtctatgagagcagacgaataattaaatatctagattcaattgtgattgttccaaaagttatgccaaaaaataaatacaattcttaatatgtgcatcattaagggctaaagaattacctgcgtccatcataaacgtagatttagtatcacgttgaaccagaaattgctcactttgaaaaaaataacaaatttgggggcatatattagtgccgagtgagagattgctcagtatccacaccaaattttgggtgcatatgagtcttatttgtgatatgtgatttcagttttttgtataggttgataagatgtttgtattctacttggacatgtaatttcaatagttggattctgtatgtaattcggtatgtaatttctatcattggactgtatgcaatttttgggccatctaattgttcccgactctatttggcctttgtaatttctgagtcatgtatttgtatcctactaaatttgtgcttcaacccaatcggatggaaaaaaagaaaaccacggtaaaaaaaaaccggacagccgaaaaaaaacagggtagaaaaccgcaaaaaaaaaccggatagaaaaaatcaacgaaaaaatggaccaggaaaaccgtgaaaaaaccagacggcccagaaaaaccggacagaaaaaacgacgaaaaaaaaccgggttagaaaaccacgaaaaaaccggatggcaaaaaaaccgcgtgtgcgttcaggaaaccgccgacggacgaaaaaacctcacgaaagccttacgaatttttttattaggtatagacttgtggtgcacactcaaacgcttgcaaattacgatcaactaattggtaagattttaaatttagatttataatttttagtgtagttcctttttttttcaattattaggccatgtcattgataaagtatgcatcgggtagcgagaaaaatacatttttaaggtaataaatagaatttttttatatcaatattatttatgaatgcaatttaattaaacttttacggcaataactcatatatctactactactactactattatgttaagggcctctatgtttagattcgcaccggggccctgaaaactcgggaccggcccgacgcggaatccgcgctcgtcgtagtggaggaggagcccgccgacggcgccgtcctttgtctcgaagcggaagacggggtcgtacacgaatccctccttcgtgatcatggaccggaacctagccggatcgtacaggaaccccgggtacagtggcgtccacactgccgccgccgtcgacgccatctccgtcgtcccggctggctcaaatccgctcgtcgcgtgtcgtcgtcatgggcgggtgaaaccggcaaggcgggagtgcttgcttttgacacaattttgacttttgacgtgcaaggagctttggttgacaggatgacgagcaacgggggcggcgctggctttatggcctgagagacagaatgcgagtcggagacacgatgaatgcacacgcggcttggaatcggagacggagtgctgggcgccaatctgcgaagatcgagtaaccatgacacaattttcaacacacagtcaagtccgtatttcagtcagatgcttggtttggtcaaggttaatcgaaatatctctttgatacaaaggggtggattaggaagagatgaatagagggggacttatctccttgctccttcattccctctactcttcctcttctccctcttcatccccctcccatctcttcttctctcaacggtgatttcacatgactcaaaattttggcttcgcgcgcgctagtaatggtagatactttcattattaataacctattcagatcggtgtcattttaaattatatcctttttagtaaaattgataaatatatgaatacatttagtttgctaccaaatattaatactaatgttcagtgaattttagtaataacacatttatgagtctgtcatagatgttagcaattttccaaaaatttagtactcctattgctaaattttagaaaggtttattttaatactaatatgaacataatactaacctatcaaaataaaagttttttttcgaggaatcaaaataaaagttgaaccaacgtagtacactactggcctgctgggcagatgcccggtagtatttggttaaaaaaagttgaaccaacgtcgtcatataaaatttaactcaaatcgaatagcttccacttcaaaccttaaacacgcattaatggtttcaaaatctgtagtactacagtaatatatctacagcaaataatcatttatgatcaatactcgacagctcatctgtacacaaagcaggagtaattactaattagggaccgagaagtcgaaggaggtggatacctgagggggctctccgcaaaaaaactcacctactcgacccaacccgtcccaaccaaatccgtccattttagatccgacggctcgcagtggagatcgtaacccaagagaatataataaaaaaaagaagcgcatagccatcgcacggcggaaggactagaggagaggatactttcgccgaaacgggcccacactaccgtctcttcccccccctcccttcccttcccttccctcccctttctctctccttcccgatctctctctctctctctctcctcgagctctcgccgcacgctcccaaaagcggcgccgcgccgagctcgagctcgagctcgcggcgggcgacgagctccggcgagcgcgcgcgcgcacgctgaccagcgggggtttccccgtccgagctcgcgcgggcgtcgtctcgtcgggcccccttttcacctttctatcggtcattgaggggtgttctctctccccccaggccaccgcttcgcctggccgctcgggcgctcgccgcggattttcctggcccgccgagtggcgggatcgcggccaaccggtaatgtgggctctgatccctacgttctgctgtgaattaggactgattgtgctggctatggtgctgatttgtgtcgtgtttggttcggtttgctcggggttgtgcagcggaatggcgcagagcaactgggaagcggataagatgtaggcgatttctctgtcttttggtgcctggtttctgcggattttttgttgttgtgttaggattaatttccggtgcttgtcgtgcaggcttgatgtgtatatctatgactatttgctgaagcggaatttgcaggcgacggccaagtcgttcatggcggaggggaaggtctccgccgatccagttggtattcatctccgctgcttctgtagccgcctccttttggggttcccctttggtttttgccttgctagcttttgatagcaaatggagtttgtgaccacaggaaaattctggattttaagtagaggggcaggtttccatttttattttatttttttgagatggcaggtttcgagcattagtaggaacgaaaatttgggtttcgatctggaatgggagtcttgtgccatgaaatttgaaatcttcacacaggggttgtttctgatcaaatcagaacagaaaatttggaacgtggaagtatttgggagactttttcttccttcaaaatttaagaagaggtgctcacggttagagcttcgagctaatgcagggtatagctttcgatgtttgggggaaaagtaacttggagaatggagacgcttggtgttcggttcacttgggtgtctagctttcgtggttttcattcagctagtcatgtgctacttccattttttaatatatgacgcatttaacttttgtgattcgtttggctattcatcttttctagaaatatctgtgcatataggcaaacatacaatgcatgatagttgtgtacatccactttggatgtagaggcctggttttttattttctttcttaaaaaaacatacaacgcacgcttaagtacttttgatggcagatctagtggtactcttttcactttaactaagtaactgaataaatattgtaggtaaaatttgaaggaaataatgaatcatgttatatattaaaaatggaggtagtaaataatagtttcaacaactatcttattgagtggatggcgggattgggcggcttgctttggacattcatgcatgcttgtagacaacattggattttgatggtggagtacagatgtattaaaagcagaaaccgcatagatctttttagttgtggctcttttcatatatctatcataatgtaattgacatatatagccagaaatgatctattaatggtatttagctaacttagctattgttcagccatttctttcagcactcgatgaactgaattatgtcaaattgtcagctgtgttcaaataagaatagatgcatacatttagaaaagttgtaaagggttttgagttttggtagtaaaactccagatgtatagtagaacaggatgcttaactttctagaaactactgttttgttctgtgacatgagaaataataattgatacagagtacattatattttgtggccctaaggagccctaacatggataggaatacatgtgcatagtgggaccagaactacagaacaaagtaatactaatacaatttgcatatttctcacacatgtagtaggtagttctagactactagtactatacagtcaacaactgatacagtgccaaactagggagctgaactaaacttagaaaataaagagaaaaactttgcttttgcccttttagttccaaatacacgtctcgctaagaccaggcctgttagaaaagggctagcttcatctttcacgcattactcaaaatgataattcattaatttgtcacctttgaaccctccatgatgtttgaccctagttgcttttcccagcttaaatggttcagttctgtcacataaaaaacagcatgcgatttacaaaaatctttaaatcctcatgaaacgtaccatcacctttaattccaaataaacttctcacttactaaaattggcatgtgagaaaagggttaggtagtatgtttttgttttgctaggttcttcagatgtgataactaccacatctgaaccttccaattcaactttggcatgtggatatcttcaaagatgccaaaaaccctaggtgatgataatatatttaatgcaaaacacctagaactaataattcaatatagatttgtgtcactccaagaacttatgcatgctgtttacctgtgacccatttactacattagtttcaattcataggagattcattcaagcatcataattgtaaattcttgtattgcagcaattgatgctcctggagggtttctctttgagtggtggtctgttttttgggatatatttattgcaagaactaacgagaagcattctgagatcgcagcagcatacctagaggtacctttggaattgtaaatttttaatcaccatgcatgtcttttttagcttgtccaatgtaaatttccttttggaaatataggcacagcaaacaaaagcaagagagcatcaacagcagatgcaaatgcaacagttgcagctaatacaacaaagacatgctcaactgcagcgaactaatgccactcatccttcacttaatggtccaataagtggcctaaactctgatggcattctgggaccatctacggctagtgttttagctgccaagatgtatgaagagcgcttaaagcactctcatcccatggactctgatgggtcacagcttcttgatgctagtaggttggctcttctcaagtcggcgtcaacaaatcactcagggtaatcctccatgtcatttttttctgatatgtgaaagcaaaattgaagaaattgaatttgatgtgctatcagcattctcactatttgtatattttatggaaataggcaatcagtacctgggactcctggaagtgtgtctacgacgcttcaacaaatccaagctcggaatcagcaaaatattgtgggtttattggttaatttatgctgtgtattttaagttcactactttgtccattagtccattaaatgtatacaatgatgacccaaatatcatctctaacaggatataaaaagtgaaggtaacatgagtgtagcacaaagatctatgcccatggacccatcatcattatatggtcagggaataatccagccaaagcctggattgggtggtggaggtcagcccattcctctctgtatataagttcgcttttgttgctaaagtagcactctgaaataaatgcagtgaacgtggaacttatatactacatcgatttatatgttgtttctgtggtgactatattgtgggcatattctgaaacattaaaagcaaatgctattgttctcaagggagaaaaatatcctattcttgctttgtccattctgattttgttgagaaatctctttgctgctaaatgattgagattcatttttctgttaacagttttaaaccaaggagtgagtggtctaccattgaagggctggccgctaactgtaagcttcatgaatataaattgcctcatctgttcatgcatttattttggatctactgattaatattggtgctatcatcttacagggaattgaccaactgcggccaaatttaggtggtcaaatgcagaagccatttctttcaacacagtcgcagtttcaacttatgtcgccacagcagcagcagcaattcttagcacaagcccaagcacagggaaatcttggcaactctaccaatttaggggatatggatccccgaagattgtcagcgctaaccaggagcgtgttgaatggtaaagatggacaacctgctggaactgatgggtgcattacttccccaatgcaatccagttcacccaaagtcagaccagaccaagaatatctcatgaaggttggtttttcttctggaagtgtgctgcttctttgttttgcaaaaaaatctagttatacctaaaaggtacccacatgcagcagacatcttctcagcaaacacaggaacaacttcagcagcagcataatcagcaacagcaacagcaaacacaacaggtaccaactactgatagtatacccaagcccaatctctgaattcatcttctgttgtagaaaatttaattgatgtgagcgtttacccctaaagttttaaccacaaatgtggtcgagaaaaaaaaaagttgaaaccataaatctgccaagcaaaactattctttgtacctactgccgcacttctgtaaataaattataagtgttcactgtagcatatgaatcagttaaatatattgatatagtgtacacgatggaatcaaaatgctggtctgaaaaggccaattgagacgattttgtgctgatgatgtactgcagtggcacagcttttctacttttttctgtagatataatgatttagttagttagatatggtgtacacaatagaatcgaaatgttgacatgacaaaatcaggagaagattttatgctggtcttgtgctacaagcttgctattcttttttcaaaaatcaaaatctgtttgggaataattttcctgaaatgattccaagggagacactgtagagggcattaaagtgaatgggatttaattgagagcactaaatccaactctatgtcattatagttattaatggcatatttgctaaggatgatgtctttttttggcatatcaattaagcggatggattttgcttctgttttttcctgcatatgtctgagaccaatttggcggcatggtgcataattttgcatgctctaatagactaatacaaccccttggtttcctcactcagtcgttccctttctctcacccattcaacgtgcgcgcgcacacacaaacatgattttccggctgaaaataattcccctcaaatgattaacttgcaatttccctctctttcaatgcaattcatgtttacttctatatgcttctcattctataattatttatggcctccagggcaatagaaaaagaaagcaacctacatcttcaggagcagcaaatagtaccggaacagcaaatacagttggtccttcgaccaattcaccaccatctactccgtctactcatacgcctggagatggacttggaatgactggcaatatgcgccatgttccgaaaaacttaatgatgtatggtgtggaaggaacaggactgccatcctcgtcaaacctggttttgcaccttctcttttccatttaactgtactgctttatctatgtaattattcttctatgccagatatataagcaaggctgtcgtttacttacaggatgatcttgaacaatttggtgacatgggctctttggatgataatgttgaatcattcttagccaatggagatggagatgcaagggatatttttgctgcacctgaaaaaagtcctgcagagcctaatccagtggcttcaaaaggtgatccttgacgttctgtgtgttctgtaaacattgaatgtttccatgtttacatgaaataacgttccatgttttttaggtttcaccttcagtgaggtaaattgttggcgaacaaacaatagcaaagtagtttgctgccatttttcatcagatggcaagatactggctagtgctggacatgaaaagaaggtatcggtaaatgcacttcttttcagcatccgacttttctgaatattgtggcttattttctgctgtcttttaggctgtactttggaacatggagactttccagacacagtatactgctgaagagcatgctgtcattatcactgatgtccgtttcagacctaactctaatcagctggcaacatcatctttcgatagaactattaaactgtggaatgctgcagatgtaagtcatgatttttcctgtgtgtgtgaaagtgggaaggagattacccaattatgcctggagttatgctgtccataacactaattctttctgcgccgtagtactgactggcacacactttcatttagagtactgatcattgcagtatatgtcataacaaatataccatgacactactgtcttggaattgacagtataaggcaagaccaatttgcaaacgaactagtctgtaagctatagtatatgtgtgattatggttttggtctattagctaattgtaaagttatttggcacataagagttcagtgtgtcgagactatggtatatattcaatgttggttctatatttacttgatttggtaccgtgttgattataaaagtccgcttgttttgcagcctggcttctccctgcatacatttgctggtcattgctctggaatcacatcactagattttcatccaaagaagacggaccttttgtgctcttgtgatagcaatggtgaaatccggtactggaatgtgt

SEQ ID NO: 9297 - DNA, 6059 bp, Oryza sativa
aattcatttaaatggctcgaaacttctaaaattcatatctaattcatatgaactccgaattgagccattcaacttgcaaaattcatctaaaattgagctctacatgtttgtttagtttttatgtactttttcgttggtttttattagagtttttcctcgttttgcgtgccagtgtgtagaatccgtcgttttgaaagttcgcggtcgcaaggataagagttcggaagattgtttgaagaagcaatgcaagtcacacattccccttgagcattttgatcctaatttacaaatattttatcgtttgcaaataaaattgcatgtcttgctaattacatgggatccgggtattacgtgccatgtttacttgatatctgtactttgtcaacattgggtaataaatcgactagctcatgttacttatgtgacctagctagaactttatgcttagccatgcttaattaccactagctcagttgatgcgataattacagtattagacctttttagtatcagaatgagctgcgtgctcgagacatctggccatgcttcatggtcgtaattatccaactaaaatgcgactgaatggtgggctgtaggtgtatggttttgctagtcgcacccatggcaattaaggaccggttcgcgggatgccctggaagaacttatcgtacataccacaagccagcgtgggcaacggctgggcttgtagtgtagctttcctctagctgacgcatccaggcaagggtgggcgtgatggagtttggatgggccctgcgacggcctatgcggcttccggattcacctaggcacgagaggggactgcccgctgccttgcgaggagtgggggtgaaacctgcggtgtggtgtgcttggttagagggagttatgcgaagggtcctgtcatggcctctttccggtatgtcatggtggcatgtcggcgcacggaaacgtgtcgtggggctgtgtcttgtgggaacagttgtacacctctgatcagagtaaaactattcgaatagccgtgcccgcggttatgggcggttgaccagattcaccgtgaaatagtctcacccctaataaatcgacctaatgcactgtagttcaggtgggttgggcctgttcaatgtggtgtagcgttgatcagtggagatctaatttactttaattacttaacagttttactgttttgctcaataaaatattttacaaccgcctttatgcaaatagccacaaaccgtccttgtgttccccttgcacgtctgcatcgttggtgtggcttgctgagtacagtggttgtactcagccttgctattatttcccccttttcagaagtgcagtgcttctgagctgaagacgaagttagaggaccaaggctcagaccctagttgagttttgcctgtggagtggagctgaagccccgctaggatcgtctttttccgctgctgtcgttctctttcggtgtgaggactaagtgcctcttctgtaagtattttacgctttatttacgtttagaactctatattacttgtcgtttttgtgtaccctgactggttctggatatggatttaaaatttgggttaaatttctgtgagtgacaccatttctccatggtcctcctctctggccgagcctttacctttgcttccgtctcttcgagctgctgctgccacctttcgcagtgatgtgagagatggccaagctgctgctgctgcctgctacggggtagctgtctttcacgtcagcccgttgcatgcttgcttgctgccctctctttagggtgtgttcggacccaagggttcccaacccttctcaattgtatttaacgtacatgctttttaaactgctaaacggtgtgttttttgaaaaagtttatgtatgaaagttgcttaaaaaatcaaattaatctatttttttaaaaaaattagcaaatacttaattaatcacgtactaatggaccactccgttttccgtgttcacttttccggatgggaacttttgtagcgaacacagccctcacgtttgtttttaccagcacagttggataacatggatgcacgtacgggatcaaagacagatactccctcgtaaaaaaaaaacacatgtgtccaagtacaaacacagtatccaagtacaaactcaggattagatattttttgacagaggaagtatatacctaccagcaaggaacacgatgacgggaacgagggatgatacactcgtctctactataactaggtccaactcccacatatacactatccgtctcaaaaaaaaaaaatcaacctagcaggggaggggatatacccctcctaggatgatccctcctaggtcacatctccgcctagattttctttttgagacgtagggagtacaacttttgtttttatcgtaaaatataatagattttattcaccaaccctcttatttcaaccaatcacatatacttccatctaggggtgaaaacggttacggaaattcccgatcgaccaagcgccgtttccgtataagaggtacctttttagctatttttaagttttgttttttcttatttctttctgtatcatattaatatcgacactgagtagtttaaatgataaatatgatcaattatctttcttcttttcttctcttatgaagtcatatcaccttaattttcctttagatgattaatgtatattatcttccttattttccttttctcattgagacacattactttagtattgcttttaaatgatcaaatatattatttaaactgttataaaccaaatcattttaattgtttatagctttttcaatagtgaaaattatataaaggatataaagttatgtcgtgtagctatcttgcaggttagttttacatttggatgattaatctatgttatattttttccctaatctcattgagctaatacattactttggttttgctttttattgatcaatcataattgtttatagcttttttttcaataactgatcaaagatgaaaatcatataaagttatatcgcatagctacatttaagttatttctactattatgataaaaaaattcccgcaaaaatttctagttagaaactcctatttcgtaaaaaaagtgtaactctagactactatgggttcatttggttccactagaaaggctaaatatttggaaccagtaaaaagacatgcttttaggagcaagctagccttacagggtgagaaaaatcccctggccagggagagccgatttagctcgccttccatggcaaaactccaattgcaaaaacaaaagagaggaaaagctctactcgcacgaaaaaattaggataagataagaacgacccaggcttctctgaaatcagaaatcagagatatttctcgacaactcggcccaatctcataggcctcttctcccacctctcgctgacgaagtctttccctgaaagcatcctctccacctactcataaaagtcacagccatctggagaaaaatcgattagggaagaggcgaactcatccgcaaactcgatctgaggcaaatctattcacacggccgctcctggatcttgtttctctttttagaaacaaaacgagaagcaaaataatcatcggcagagcaagaatttcgtacacgatccaaacagctacccactatttcttgcctcaggaagcaaactaaacacaggaggtacgacaaggcaagcaaactgacaatgagatggtttaacctcaccgagctaggttacttgcgccaagatccaaatataatgtaccctatctctccctttcaccaccccttgttcaatttttttccatctgaccactaactaggggtatgcattagatggtttgttttattttaaacaaaattggtcatctaaaagactaaaagtgtctaagaccgagtaattgttcggtcttttatcaaaacagaaatggttgacagtttcataagagcaagtttaatagtatagcccactattagctccaaatcatctatagccaatgcaatagccaattcatacaataattgtttactatactattaatacatggtcccacatgtcatatacacattgcgtcttggagtccgtgctgcagctggctacagatctgtagcccgctacttttctctctcatcgtttatcgtattaaaatatgtttatagctggctaatagcctgctattgtacctgctctaatgctctaagattataattaaattttggcaacacttctcttcttttaagatttctttactgctctcttgaaatgatcatatatatatatatatatatatatatatatgtatgtatgtgtatatatatatgtatgtatgtatgtgtatgtatgtatgtatgtatgtatgtgtatgtatatatatgtatatatatatatatgtatatatatgtatatatatatatagacacacacactgcatataggtaggagtaggatgcgacactgtaatctgacgtggataacaagatggattgggagcccctttcccatagattttgtgagcaagcatagctgcatgggcattgggcaagctagcagaattgacgtgtgtgtgctgcctgctggctaatgaccggtggtctcaactctgaagagaggcgtggcagaaaggggtatggtttcagttgggattctttccaagcctcctgcaagattctcaccaaaaggcagcgatagattcgaaaggcaggggatactctcgtgaccattgaggtctttgacgagagccttgatggcgtgaggatgtcacgacatttttcttttttttgttaaaaggaaatttggtcttgaaggattggaatgcaaacttgttctaattaatttgtgtttgggaagtacattaacagaaaagtgaagcacgaaggtacttaacatccaacccaagaatcactagggctgtgctatcgatcgaccacatcatagtttaggacaggctttccttgaacaaggtatctttacctctatatgtttagactttagaggagagtcgacagtactaaaataatcccttcaaattgtaattttcaaaaggctcagagaagcaataaaggaataaaaatccaatgacatcaagccgtcaaagggcttcatctttttcttatgcttatacttatcatccaagatttaaattttcaaccatcaaagtttatttttcagtcgttgcttttagatcgctaagaacacgtatataaaagttttattcataatttacttttcgtttgcaaatacgccgtttcgcgatggctccgaatgatttgccactggccccttcctgtgagtgttagagcgcaacattcataggtgtgcatgtgtgcatcatccgtgtaatagaaaaaaatgttcaaagagttttgaacggtaaacaatatcttaacaacttaaaaattgataatgttccattcgtcacatcattttttttccataagtctgatggagcgatggcctccgtttccacacgcgcgagtaacgcatcgcataagacggataaagcacaaattcaaagatagatcaattttttttcagtccgtcattctcgcatcattccgagcccacatcaaattagatccggtcgggatttcacataatcagtttgtgttacacctgtcctagaaaaatccctaatttgtagaaaccctaattttcaaaatctcctcaaattagatcccaaatacaagaactataaagaatggcaggcaaaaaaaaaaacctaaatcatggtcacaccggtttagatcttcggccgcaaatatggcatgatttcagaaatccgattctcgcccttgactaccgtgcacgcaccctagccgtgcaacactcatgagtagaatgccagcagcagcagtgaggatgggcacagccatctgtattcgggcacgccggttggaatcgggatcaccattccctgaacatagcccacatcggaatcgggcacaggccaggattggaagattaagaacaccccagcagtttcagatcctgcaattgtgcaggcacctgaccagaaagctcattgttcggcaaatcaagcgtgctcatcttatccataccataccccc

SEQ ID NO: 9298 - DNA, 4450 bp, Oryza sativa
ccatgatgagtttgataatcttttgatgctattaagcgataatagttaccagttttatgtatgcttatccttgtgcattttgtctattataatcgttgatcttaactgctccggtccacaaacttgtaagatgggtgcagtttagtacaatgagttgtaaaatgctcaaatcagtgcaatgacttgtgtgtgtgtgaaccaagggtgagaatagtccacattttggttaatcaaatcatttgagtgctgactaggatgccataccagcaagcatgtaaatgcgtataaggcatgtgagtgaacagtaacatgccctcccggaacttgcttctttcctgctagaggctaccttctctttgaatattttttacatgacgcatggggcccactcatgcagtgtggcacaaatagtgcaaccagggcaccgagttgtgagatgaaagatttgtgcagtgagggagatcaatcaggataaagaaactggaatttcgttttttctgggtggaggcacgggatgtccgcaatgatgacagctcaaggatgagataacgattatccaaagacaaggcacacaacctcatatgtatggtgactcattctaccatcattatcaggaatgtcaggcaccgctatcaatcttctgcagatttccctagcaagataatttccaaaaggcataggagaactatccctatcttttctggatcacaagattcatgcatgcattcagcagcataacgctccgattcgctaacatggactattttggccttgttcgcacgcaccatgcaagtagttgaactggctcaaatgttttttagttgtgctgaattgcacctaccatgtaggttcatgcatccaaagtacaattttactctttcggtaattgctatattctctggattaagcactgtcagctgtcttgcaaatgtaacatgcaacctacaccgtctgtttttagccatttttctgtttatatactattatactcattcttgagtactgttctcaggaaagtgtggaggcgaccgctgaggtttctaaaacctttgatgagaagataaggaattattgtgacgtgacactgatgtcgctggcatatgctgggacagggaacgtgcttaaggtgattcccaatcaacagaagaattgtgcatggattataggattacaatattttttagtgcctatttgtttttgacgaatctttccgtttgatttgcaggttcaaaaactccttggaatctgttccgagcatcttgagaaaggtgaaacccaccaaggaccagcagttcttggaatctccctaatttccatggctgaagaattaggggcggaaatggctgtacgttcccttgaacgtcttttacagtatggcgagcagaatattagaagggcggttcctctagctctgggcttgctttgcatatccaatccaaaggtatggtacatgatttgttatttttgtagtaacgtcaaatgtttgttatctttgtgccgttgcacacaatcattcaatatatagaattgctgataaagaattattcgataccatgccatgacagttagttttgcactctgctacatcatcaatttcaattcactactcttgagaatgtgctttgtcacacgactactatttgatcctggttattcgaggaaaagtagcatatttctagttaaaattagtagattgtatcatttggctagataaatatctcatatagttttctgatgtctacatttctaccacttgcctgtcaattaggtaaatgttatggacacaatgagcagactgagccatgatgcagatgcggaagtttctatggttagtaacctcactaacaaaacctaccatattaagttctatgagcattgatatttattcaatcaaattggtacatgcaggctgcaataatctccctgggcttgataggggctggtacaaacaatgcccgaatagctgggatgcttcggaacctctcaagttattattacaaagaagcaggacatctgttttgtgtaagttcaaatctaaaataaacattttttatctttgttttgccaattattctgatctcatgctgttgtattcaagtttcatatcagtttttttcatttgactttcaggtgaggattgctcaaggtcttgttcaccttgggaagggtttgctgaccctttcgccatatcactctgaccggttccttctgtccccgtgagtaacttgcaaagttgttgaatctccttcaatcttattggaaccacattttctaagagagtccattcttcacttttcagcatagcacttgctggtcttgtgacggttctgcatgcctgccttgacatgaaatccatcattctggggaagtaccattacatgctttatatccttgccctagctatgcaggtatatatctcgttcaaagatcttggtagtggacatattagctaaaccagtcacatggattctcagttttttctctactgaaacagcctcggatgctattgactgtggatgaggatctcaagcccctctctgttccggtttgtgttggtcaagcagttgacgtcgtcggtcaggcgggtcgacccaagacaattactggattccagacgcattcaacgcctgtattacttgccgcaggggaacgagcagagctggcaactgaaaagtaaactaaaacatctggagaacaattttcaaatttgtcagttgatctttgcttatgcttatgttctttctatatgcagatatcttccactgacaccagttcttgagggttttgtgatcctaagaaataacccagagtatcatgaagattaagggatagatatggcacacgcaaaatgcaggaagggcctggagtattaggaagaggcttggatcaatatctaattgtcacacaaagcaatgaacaaatagcacgatgaagacaatgcatacttgatacggtgaggactgagttgtaacaaagagttcaggtataatggggccaatatgacaggagaactttgtaagaattaggaatagaatctgtgggtgtaatggcatggccgaaaatgtttttgactataccagaatgaaaatgacccaagagtttgttgccacgtccatgtatatgcagccctactactcggttgtctgatgtttcctttttttttttgaattgatcgttttttgtttgggtcatttgttacagtggctcgcactctagcagcagaaacgctgtactttatgtgatgttgtgcactgagtacagatatacagctggggatatcctgatggtaatatgccaccgactgcatgaatattagtttgtccgtatcaaaatatagtaatctagcgctgcatcgagaagctgagaaatttgtgtttgtgttgataggggtaggttgctagagcggcattaattgctgcatcacagaggatataaattcccctggtttctcgtgccgttttcttgggaaaaatttgggctccatctcgtggtggacatcatcgtcgtctccggggaataagttcactttaggtccttcattttgacatccaatttgaattgcatacctaaaccgttaaaccataaaactagatacaatgcattcctccaaaactactgagggagttaaattttacggttgggaggtctaaatattgtggtttagagatatgaatctattggtcactagtaaagggagtcaaataaacttattcttttattacagctttgggctttagttcgcattaatatggcaagtttgggcttgttaaataagttacttttggtgttggcccagtgaattttatgtcttgcagatggcccatttatatgcagaagtttgatttgcatgtacattttagtgtatcaatcctgtccattcgtttattttgatccaatggccgaaaaatcgtgtgagccctaagaaaaaacctcagtttactcgagtatcttcccctccttcccttcggcgcaaaagaacgagaaatctcccgtcccgtggtctcctgacgagccgcggctgaacaggggaggaggcgccgatctccatccggcgagcagagcagagcaggggatcctggtgagcatccacatcctcctcctgattcatctctctctcccaccgggagtacttttgtctggaatttgcttgcgttcgttaaccctagcttctcttctagatctggaagaagctcttcttttaatttcagagccttaacctgtataacagtttgtttgtttgttccccaaaaagtttgggggttcaactgaactgaacgccccatgtcccatgttggatccgcccctgcttttaggatttctcatggttaaatctcgtcggatcgaacgagtctaaggcttggagagtcgttgatagtcctaattattaatttgctagtaatggagtttgggggaacacaaatgcttggggtgagtattttgcgtctatttt

SEQ ID NO: 9299 - DNA, 3648 bp, Oryza sativa
ccggtgagctccaaggcaaagccttgttcccctcgcgccactgcctctctctctcttccccaattctggccaacgccgtccgttgcggcagcgccacctccacgccatcacagagccccgtgccgcgccaccgggttagcctccatctcctcttgctgacgccaacgctcgtcgcggcagccatgcgccgtcaccgacgaacgccgccgcgccgccgccatggcagagcacggccagggagccatggctactctgcctcctcctccttctctcacatctggttgcagccggacctggtcggcttatacaaatggcccatgggcaaaattgtcttttatgaaagtttctctcaccgtttcagccagaaataataaaataatgggaggagtgtccgccagcaaattaccacattttttcggtgtccaagagcaaatacatgatctttgggtgtctcacagcaaagaccacaatctttaaatgtcctgtagcaaatttttccaaaaattaacatccatcaaaactaaaaaaaaaacatccaacaaaatttaaaaaaaagataaaaaaattgcaagtcacaaaaaaaacatccaacaaaacttaaaataaaataaaaaattacaatccaacgaaacttaaaattaaaaaaatgtccaacaaaactaaaaaaagttaacaagtcacaaaaaaattaacatccaacaaaacttaaaaactaaattaacatccaacaaaacttaaaataaaatatgcgtccaacaaaacttaaaaagttaaaataaataaaaactaaattaacatccaacaaaacttaaaataaaatatgcgtccaacaaaacttaaaaagttaaaataaaaataatttgtctgagcccaggttcgaactggggacctttagtgtgtgagactaacgtgataaccaactacaccacccagacattgtgattgaagaaaaaaatattgatgtaatattgtaattacaaagaataatctaccaactgtaaagaacggagagaatactggagctcatataatttctgttgttctgtaagaaacaaatctgtaaaaaattttattggctcaaaatgcatacaaattttcagactttgattactcgtgagtcgtgacacgtccaacacgagaaaatcgttttcgctgatcagtcctgtccagggcccaaaagtgctgaaccagctgattcgcccatagaggcccacaacgcccactaccaaatcagaaaaatacactactctgcttcataaatggactaatatcttctgattattaggactgctcagaaataatcccagcatgcaattttctgcatcagcttttcacctttggtaatcttgtctatagaggcagataaagttccctctgatctttatgaactgttttgtatgccattcaatgaggttcaacttttcaaccgaagtactccacttcctacactaattcatatacgcacaaatataaattcaaacatctactacttggtaacatttgactaataattatggggaaatatcctgggaaaaccatcaaataagtgaaaacctatgaaaaacatacctaaaaaatctctaaattaataaaagtattagtagagatatgtataggcatgaaatactttcatgtcaaatctcaagtccaaactcaacttcctctgagagttactcccaaataaagttaagtttgaatttaagatttggtacaaatcatgcatatacttctctccaataatttttcatgaatttagaaaacttataaatatagttttcatgggttttcaccatatatgtccccaataataccctaacaaattataagtttacagttataaaagtggtacagttcgattcatattttaaactcatttcacacgatgttaatttcgtaattgttgataaatgtctcatggaaaaggaatatgggcccagcgaaaaaaagtaatattgcaaaaattgaagcatggctgatgtgatactgtaggagatgcacatttggagtgggccaagtcattggattagcaaaagggaaagagggaaaggtcattgtttctatgaatatgatagcaagcaactaagcaagtgctccaacagttgcttttcttctcacttgtacaatcctactacatcacaaccccctgatggttccttctctttttctacttttttcttgtttcgttttgtgttggatttcaccatcataagggtgggcaatgacaggattccgcgccgacacccgcgtcctattggctgccatggagacttaaattggcagctccaagaaccctagtggtgcagacaagacttttatcaggaggaaattcttggagcccacaggcatgcagctctgaatttatcatcttggggactccatgagtgtcatctcaattggggtccatgcagattttgcattcatgagaacaaatagcacatttgagttgattttgtgaagatttgacatgttacacttgtactaatgcataggggaaacaaaaaaactcaatttgctcagtactccatgtatatgaatatgatctggatatcaagtgaatgcaaatattgtgatcatgatctcggagtaatttaattcacacatttgagtagttgtgctaagatagctgtaatctgtataaaaggatcatccaggattcaaatgctagaacagtacggaaactatggaaatcaacataggagtagaacataagaagctactacctccctcctaaaataaaacaacttttagttataaatctaaaaaaatgtacagctatattctaagacggaggtaataataaatagtattagtaagacaacaaggacatcatataactcaatatgagaagcagcgaaaattggatccatttgtcctgctaaggcttgatgaatcactgggacccatttaggtgtcctacgttttctctggacatatgattcaaaaatatcgaggtgcattcagtgaagtttcggctgtactaattacatctttcatgtccttgctatgcttcatttcaccatataaaaagaacagtgtattcatcctcgcaaaaaaacaaaagaagtaaagaacgagagtaaaaggagtaacttacaatttggactagggggtaggagttcacaaatacaagagaaataatcggagcttcagacacggcaaaaatttggactagggggtgggagttcacaaatacatcaggcatagttactttatgtttttcagataacgtatcaaagattcaaaatttatgtgatactccatactcaactttgccaaaaggcacgtgcaagatatagttctctggcccacaacaaaatagtctcagtagcagagcaatgatttctgaactgcggaagctggtgaaaaaacagcttcttttgatgactagtggcagtgcattgtgcagcttctgttcattctgttcctattgcagcagccagtctctgcttgtctgaatgtgattcactgcagcaatgtctgcttacaaggacaaacagagaaacaaaagcagcagccaaaagggaaagaagaaattcagacaacagagccattgaaattcaatcactatcacaggtgcctttttgttactagcatggttgcattttttttttgaaggaaaaaagaaagaacatttgtacgggcgcagga

SEQ ID NO: 9300 - DNA, 7876 bp, Oryza sativa
tttggtacttgagctactgtagcatgatttagataagtcatgcaatggcaaaaaggtggacagcaaatgtcaagcgctatttttctccctaatcatgctgaagttcatgagtgtcttgttggctcactttgcatagcagcatctccataagatgttccaaagtatcttactgcgagattgcaccatgtggaaaggttgcaaaaacataacaagggcacctttcaggatcagaaatggacacagaaagatgcaactatactcaatgaggaaaaaaaaagattaactagtcatgaacatctaaactttgccacacaaagatagtttgatagcaacatgcacatttcattcatgcagagctgaacccgactaaatatttccaacattattaggttatcaaaatgctaaagtttcagagatacctagctgctatctggggtgcacttcttaggactggatataattccaacggtttcaagtacattgtccaagaagagcacatactaccgctagtagtatcatccgttgcctgaaatcatgtggcagggagcgcctccgtaatcttcatcgccttcggtttgttctctcccttgatgtcaagcaagaacttcaccacaagcctcatcgacgggcggttgtttgggaggttcttaacgcagagcagcgcaatcctcagaactctacacatctcatccttgaaatgttcagcaatcttctcatctagcactgactctgccccattctgctccacattggtggctgcccatgccaccaggtccttgtcaccaatatcggatgacatgggactctttccagtaacaagttccagcatgaccacaccaaagctatatacatcgctcttctcagttacacgtatagtgtaggcatactctgcgatacaaaacagacaaacacacataagaaactaggaagaaattacggtgacttatgacaatttttagccaattacaacaacccacaagtacaaaaagaaatcctaatcagaacatatggaccaaaaaagactgtctgaactgatcatcaaatcaatctcaaaagctacattcatatatactctaattaggaacacttctcagaaacaaattaggaacacttctcagaaacaaattaggcataaggaactcaccaggagcaatgtatccacaagaaccagcaatgacagacatggtggccggcccatcaccaatagacttcgcgacgccaaaatctgctatcttggcacgaaaatcagcatcaagcagaatgttgtttgacttcacatctcggtggatgatcgcgggaacaaagtcatggtgcaagtagctgagcccctcagcagcatcgagtgcgatgttgtacctcgcaggccaatccaagatgccagctttggcactgtggagaaagtctcccaggctgccattaggcatgaactcatagacaagcaaccggcatgcctcgttcgtaagacagcagaagagcttgacaatgttcttgtgcctaactttgctcaatgtttccacctcggcctcaaagctgtcgatcttcttgctcgccaccgtgctacttgcccaaagcttcttcacagccaaggtatcactcctaggcctgacaacagccttgtacaccatccctgatgaacccttgccaatcaaattgttctcagtcaggctattcacaatgtccctctcattgaactccaccttgtggaaggatgtgagtacccactctgaattctcgctgtcaacttcgatggcgcgcttattgtagctcctatacttgtaaatgaaccaggcaacactcgtgagtagaatgccagcagcagctgtgaggatggctacagccatctggattcgggcacgccggttggaatcaggatcaccattccttgaacatagcccatagcacaggccaggattacccaagaagcacggtcggaattgatcagtgtcgaataagattggaagatgcccagtgagcttgttataggacaggttaagaacacccagcagtttcagatcctgcaattgtgcaggcacctgaccagaaagctcattgttcgacaaatcaagcgtgctcatcttatccatacccccaagctcttcaggtatactaccactgaggtggttgtctgaaagattcaacaatgtcaaattcttcagttctccgatgctgcgcgggatctctccagaaagggaattgttgctcaaatcaagcaggaaaagcaccgaaagagatgcgagtgacggcggcactgtcccggtgaagctgttgtccgaagccgacagcaccaccagctgggttaaattccccaattcagcaggaagaacaccggtgaatcgattgttatcaatgatgaggttggacaggttcgcggcacggccaatggcggcgccgacattgccagagaacgcattgccacggagctcgagcaggtagacatggggcaatccccagaattccggcggcaccgggccggagagccgattgcagggcagcctcaccctcatcagcgacctgcatttccccagctcgtcgggaatggcgccgtcgaacatgttgttcagcagcaggagctggctcagcttcccgccggcgcagagcgtcgccggaatccggccggacatgcggttgtccgagacgtccagcgactggagcgggcagttcttcccgaactccggcgggaacggcccttcgatctggttggcgaagatcatcagctcggtcagcctcgccgccgccgcgagcgtcgccggcaaccgcccggtcaggttgttctgatacatgtgcacgctctccaggctcggcgcggcgaacatgtcctccggtatctcgccggagatgtggttcatcgagatgtccagttgctggagcttcttgaggccgcccaaccccgccggaatcctgccggagagctggttggagaagagctctatctggaccaaagaactcaagttcacgatgctcggtggtatctcaccggtgaggttgttgctcgagaggtccagatcgacgaggttggtcagcttcccgacggaaggagggatgctaccggtgagggagcagttggcgaggaaaagcacgcggagcgcggcgaggtcgccgaggttgtccggcaatggcgacggggagaacgagttgtaggcgagcagcagctcctggagcgcggttacgttggcgaggaaccccgggaacgcgccggagacgaggttctgtatcaggttgagcaccgccagcgacgggaacccgccgccgtaggccgccgggagctcgccggagaagttgttcgacgcgaggttgagcgtctcgagcgcctggagccccgcgaggcaggcgggaagcgggcccgtgaggtcgttcgacgacatgtcgaggtgccgcagcgaccgcagcgagcagagcgcgacggggaaccccccggcgaggtacagaccgccgaggtagagccccgcgacgacgccgtcggagacggcagcgttcccggccgcggcgtcgcacgccacgtgcggccagcggcagaggtcgtcgccgcgccatgccgagagcgcggcggtcgggtccgtgagcgcggccctggcggcgaggagcgcgcccgcgtcgccggacgcggcgccgccggtgcccgcgcggacgcccggcaggaggaggccggcgaacacgacggcgaggtggagcaaccgccggtggagcggcgccatggtggaggtggtggaggtagagtggggagcgtgggtgggaggaggagaggtttaaagggagggaaggaagttgcataggaggattggaagcatctcctcctggggtggttttgtcttttagatagacgaacacattgaaagcgatgagggttggggattttggctacagctaccaagggaagtgtccacacagggagtattatcactacgagatacgcttggatgtggtggtccgcatcgaggggaggctggatatagcgagaggttgtacggatcatgtagcaagtttggaagatatctatgtggtgaacgtggcaatatatagaatatgctgctttttccgtacatgtaaagtcaatgcgcttggctgacgtatgagaaacgtatccggacgttgagttacagttagatgttggtaatggtacgctggcgttggaagaaagcaattgttccgatttttctatgttgacaagatgattgtggctttggctttcccaaataaaatatattattttagttgcttcaaatagaattagaaaaaaaactgcaaaaatatcttacgttacaaaagcgtcgataagataacgtcggataaaaaattattcaattttgtccatcttttcttaaagaggagggctatatttatctcaataatttatgatgttcttgctataccgattgccattaaaatagtataacagctaaaaggtatccgtatttcaagtatgagattattcctcggcattgtaagagcacatttagttagcaaactttaatagaacctttggatgtggcatacgattgagtcatgattttattttcaagaaaaaaaaagcaagaatatatcatctgggaacctcaccggttccaaattaaataagtatgaaaaacaaaccgttcaagatttatctcctgtctctactctatcaatacattcatattcctctaaaaaaaatgcattcatattttttttcatcagttttggtagtggtggtggcccttgtgtgcaaaaagaaatgtgctttgctggggttcgtctcctctgctattagggagtactagtagcgttttacagtgaaaagtaccgtaattattttatgggattactgtagcaactactctcctgcattcattcaaatttgatccaacggctacaaatagctattgacatggatcagagtatggagttctctaccattccggttgggatggcagaggatactatcccactttgctgtggagtacacggtcccgtgtggacgcagcgatatttgcggttgcttaattaagtcagtgtttgggcctgggaaatgcgggaagcgtggtttggttgggcctcgttttccagcgttaaacagtaacagcaacgcctcgtcttcttcttcctctcgcctgcagtcgcacgcgcccagaggcgccatgcacgccggccgcaagcaagggaccacgtacgtactgatcactctttctctgcatgcagctatagccagcttcaagccttgatcggtctgctacgatctggacgacgcgctcgctcagctggatggatggatgcatcagcgtttcgcgcgcgtggccttcctgctccaggtgattcttttgttgcttgcgctgtgccgtttcttaatttgtcttgcacgcgcggctcgatcccctccctttctatctctgccttggccatctctgccactgaattgagaagtgatgcagggatggatgggttggaactgggaggaagacgacgacgacgacggctcaagctgttggttgtagatggggggcgttttggaggattgagatcttctgtagccgtcgacttcaccatgccattatcactgatatgtgagcccgataatatatcgggcctacatgtcagtggcaaaggtacggtgctagataatcctgatccgtttttggatggttgtgcagcagcgagggtgcgggaggaggcgcccgccccggccgccgccgcgcgcgcggcgtgagcgtggctttccgcgcggcaactgtggctacgggagtggctgatcctggccggtgggctggaaaagctagctagctcgttgtttgtgtgttgtgtacttgtgtgcgggaaggttgtgacagatggaccgcatgccacacgcgcacggcgcgctagcgctactctcctcctccctgcatgctccttatatggtggtttccggagctgtttggcttcgttgttcgtatgctcttagagctagagctggtacaataacatactattagccaaatgtaacatattttaatgagataaaagataagaaagaagaatagcggactacagatctgtagccagctgcagcgtgaactccaagacgcaatgtgtgtatgacatgtatggccatatatctatctattatattattaaaggaatagaaaaaggagcctccacgttcgctctcatagcctagaaattctcacattaatcggagaaaaagaaaagcagagtccatatagaaatacaatttagaaatagctgaaattcgaaattaaaaaataaggaatattagaagaagagactagagtccatatagaaatacaatttagaaataactgaaattcggaattaaaaaataaggaatattagaaggggagactagagtccatatagaaatacaattaggaaataactgaaattcgcaattaaaaaataaggaatattagaagaggagactagagtccatatagaaatacaattaggaaataactgaaattcggaattaaaaataaggaatattagaagtagagtatagagtccatatagaaatacaattaggaaaagtcgatagaaatttgtaattaaaaaataaggaatattagaagtagagtatagagtccatataggaatttaaaactaactaaaatttggaataaacataataaaattaaaagtagagtctagagtctagagtctagggtctagagtctagattcagagttaaaaataaagaaatattgaaagacgagtttagagtccatataggaatataatttacaaatactaaaatttgatattaaaaataattaataactaacacgtatatataataaaatataaatattacacattagtagtttcgtaaagttagtataaaatttaaaattagaatatcatttttaatatatttgaataatacattgagaaaacatatatgctattacatgagaaaaaaaatataatgatgctagccgcgcaatctgcgtgggccaccgtgctagttaatagtatagtaagcaactattatataaattggctattaaattgactatagatgaattggagctattagtgggctatactattaaacttgctcttacatgacacggaaaaagatttttttgaaaaaaaaaagcaattagcgtacgattaatataatatggagtaatttagtacaaataagttaaaaagaatcgtttttacatatcataataaaacgaacgaatggagttagctgcaccagtgatatatgccaagctatttagctgtcccctagcttggtgtggctaggctagtaatccgtccgtcttattttaagtgtaaagatttttctatatcaaatatttgaccgttcgtcttatttaattttttttaaaaaaatttcacacataaaaatattataaaatttcaaataagaccgactgtcaaacgttgggaacagaaactcacaaatgcacctaaaatgggacgtatggatacgtgcagtaaccttttctggttttgaaacgatagtatatttcatgattaccatacggttttcacgataaccgcacggttaccacagtaaccacgaaatcaggagtgacgatgacgataatcaccctaaacggtttggtaaagtattgagagttgtgcagtataggagactagttactagtatagttgtacagtcatacaaagctatgcactctagcttgttataaatgatttgctggtcatttctgaaccttttgcagagtttggcaacgaatagatttcttaggcattgtttagttcccacgcaaaaaactttcacgatatcacattaaatatttagacacatgtatggagtattaaatatagaaaaaaaactaattacacagattgcgtgtaaaattgtgagacgaatattttaagcctaattgctacatgatttgacaatgtggtgctacagtaaacattt

SEQ ID NO: 9301 - DNA, 5438 bp, Oryza sativa
cggcggagctcggggcgaggatacgatggcaccggcgctgggaggcgggaggcggcgacggcgacaatggtttgaggggcgcggcggcggagctcggggcggggatggcgatggcggcggcggctcgcgacgacgaccccgacgacgacgacggcgccccgacgacctcgcgaggagtacagttgctgcgggccggtttggcgaggcgttttggctggccaaatctagccagccagccagcgattttggccaggcttggccatccggttgaccagtctgttggacctcgtttttgtggttgaatggctaaaatttggcttggagaggctagtagagaggccgttgaagatgctctaagaaagtagcgaatagcaaagtaaggagtgagctggtcacaagcgtccgacgtttttttatctaattggacgttccaactggagcattttcggagttttgccctctcgttggtggggtgcagcaatcgtgtgataaagatatgaaaagaagaggcgaatgtcatggcaagcacacaagaaaggatcccaacgggccgcgccgcgctcctctcgctccctcgcctccgcggagctcgattcctaaaccctacctcgccgcgccccgccgccgccgcgggccggggagatcgccctcgccatgccgccgcgcaaggaccccaacgggggcgccttcccctcggagcccgccccgccgcagccggccaaggccaaggggaagaagaaggatgagaacaaggacgacgacctggtgagctagccaccccccgattcgccgtctccttcccccccaactctctctctctctcacggatttctttgcgtggttgcagtcggaggaggaccaggcgctcaaggagcagctcgagctctacgtggtgcgggcgcaggaccccgatcccggcgtccagaagctcgccctcgagagcatgaggtaacgaggaggattttctgatggtgtgtaactgtataattctgatagttcgtgatgacttatgttttagtgtgatctggtttgggtggatgcatttatcacactacttatggtttggatgagagaggagctagccaattgaggatgatcatgtcatctagtagactataagactaattaactcataggtattttggttgcactgcttacttgtcctgtgcaagagttcgttgttctgcaaacttactgtcgtgagaatttaaaatgcgcataaattcggcccaagctattggtttggcggcacattgttggaggcttgtttatccttttgcccttaaatcttgggtacaatactacgtaatcacaattaccatgaggtcatgctttaactgttcaatttctccaatctctactgcatcatggtgagattgttttatctgctcagctggaatctcgcatcctagtggctactgctgctattggtggcatcactttgcattattcaaccagttagtgcatacacagttttcacatttgtcttattgatctcttgttaatggtgatttatgcttaacaggcaggagatccgttctgcgacaagttcaatgacctctgtcccaaagcctctcaaattccttcgcccgcactatggaattctcaaggcttactttgagacaatgccagaatctgagctgaaggtatcaaccaatcttcgatctctaggttgagtcatggttcaaatactacttgatgcttatatggtattcttcaattattttgcagaagtatatggctgatatcttgtcagtattggccctgacaatgtccgctgaaggagaaagagtatgtgaaaatgccattctgatgtcttttccttgtgtcaatttcctagtgtttttttttaatttgcttgtatgctaacttctgagaatgatttacttctgtaaatagtcatacattttttgtgtgtgttttaaatgatagacatatagagtttaactttttctcactgttaactgtacaatatcaatccttcaagaattggctaatatgctttctttttttgtttcaggagagcctcaagtaccgaatgataggctctgaaggtgacattggttcatggggtcatgaatatgtgaggtaacatcaattgccaggcctcctaaattttttagcactcacttttattcacgagacagttacttcttgtgaatcttaatggtaaacatttattcctgagatagtttatgatgaactaccaaacagtaccttcatatcctgtttgacaacttgatgtttttccctgttatgtttgaagttgaatccttaggcttatttagaatttatggtacggtcaaatatttaactgttatcagtgtattaaataatattgaatcgtaactcaggaaattatagataagaagttattcttttcaggttttcaagtgcatgcttatttgattagttgatttaatcattaatcaaaagaaatgattggttagtaatgctgcggatttaggttgtatctggaaataactttggagttttcagtttttctgtttcctttgtttgttattgagaataaggttgttgctgttggaaacttggaatacatatgtttgtctttcgaatctagattggattttctaacaatgtcaatgtctcacttgctagaaacttggctggtgaaattgcacaggaattccagaagcgccaggttggacccttatccatatcatcatatgaattgcataatatttcttcaccccaaagaaagaaatattttaacttttgttttaatccctaacaaaactttaattccattagcaataggtcttaaagccacaagataagatcacccttgtttatattatctaaatgactatattctttagtttaacatccattgtctagtctagctgctgttgattttaataacaagtgtttttaagtgatcttccctcagacctttttgatttttgtaccccacatctatattgtactgattgatgtatacaccattgttatttggcaagaattgagatagcttgattgctttctttttttttggttcagttagaagccccacacatgttttcttctgtcaattatgttatcacatgtgtatggactaagacagtgaaaagtttaggtgtgtggacctcatttttatcatcctaactttgtttttgcactttgcaggatgatggcatgacaactgattccctgaaggaactggtggagcaaattgtttcattccacatgaaggtcaattttgagtagagtccatgggtgtcattttttaaaaaaatttcattgcaaatgtcttgttacacttggtgtaatgcattaaatattagcaaataaactactagtgctcgatcaatggatggactgatactgattatcatttatattgcagcataatgctgaacctgaagctgtggatctcctaatggaggtatgtgaaacttctatttttaaacgtataaaaaaatgttcctttgtttgcattaagagttctcattatttgttcattggttcacaactgatgtgtgatatcaaattacttcataggtcgaaaagcttgatttgctagttaagcacgttgactccacaaactacaaaaggacctgcttgtacctcactagttcttctaagtatgccactgaaattgatctcacttgattaaagcttagtattctctagttttactgaattgaactttcttcactcttttgtgttgggatgcaaacttgcagatatcttcctgctcctgatgacatgtcggcacttaaaatagcttttgagatttacatgaaatttggagattttgcaaatgctttgcgtattgcacttctgcttgatgacaaggtgggtgaatgaatgttatcattcctgtttgctgtccagtacataatgacactgacaaagatttcattgatttgttagtctctggagttgaagcagatttttacagcaactgatgattttcacctgaagaagcaattccgcgtgtatcatagcacgccatgtgagcctcatcccatgcacataaacatgcaacagaagcaaattttctattgtgttcttgtctacaattcagtattattggtagtctgcattgttcacatttcctctttgcttatgtgttcaatggtttctttttttcctctgctgaagggtttaagcaccgacattgatgatgacatagctgcagatgaaaatgagaaggaggcttttcagcacataatttctaatattaaattgagtgaggggtaccttacacttgcacgaaatattgaggtcatggagccaaaatctccagaagacatatataaggttaacttgtttccccgaaatgctgtctgctgattgcatgtatctacttatttatttgtttatgaacttgctattaatgattaaaaaatgcatgctaatttgttaggttcatttgattgatggccgaggggctacaagctccagtcttgattctgcaagacagaatctggcggcaacatttgtcaatgcattcgtgaatgctggatttggccaggttagttatgcgaatttcatcaaaggtttccagggcaagcaaagttctcaatgttcttgttgcgggataaactcatgaccgcaccatcagattcttcgggcagtggttcttctggaaactggttattcaagaacaaggaacatgggaaagctagtgcagccgctagtctggtaatgcaatgcaacagcttggtttatttccttatacatggcatttaggttattaggtgatcatagtgatgataaaacaatctttttcagggaatgattcttctgtgggattctgattcaggacttgcccaacttgataagtacctgcacagtaatgatattcatgttgttgctggggctttgctaggtattggaattgtttcttgtggtgtgaagagtgactgcgatccggtatgtccatattctaaaacttctaatgcgcaagtctctgtacatcttctaaaacttctaatgcgcaagactctgtactgatgttgtgacatcttttccaggcatttgctcttatttctgagtatttcagcagggatgagtcaattatacgaattggagcaatccttggtcttggtattgcttatgctggctcccagaaagaggaggtcaaaatccttgctcttggccttgctatcccactggttaaaaactattaaccatgtgttattttgtgttaacatggtttccaaacatttcaggttagagagaatcttacagcttttctgagtgactcccaagtacctctggaggtcttagtcttcgctgccatctccttaggtttggtgttcgttggttcttgtaatgaagagattgcacagacaatcatatgtgtcttaatggagcatagtgagccagagcttgcagagccaattatacgcttgcttcctgttgcccttggccttctatatcttggaaagcaggtaatttgactg

SEQ ID NO: 9302 - DNA, 3183 bp, Oryza sativa
gccgccggggacgcctcctcctcttcctcctcggggaggctcgaaccggaggtgatccggagcaacaaggccatcacggcgcacatgcgcgccggccgcgtcgccgacgccgagcgcctcttcgccgcgatgccccggcgctccacctccacctacaacgccatgctcgccgggtactccgccaacggccgcctcccgctggcggcgtccctcttccgcgccatcccgcggccggacaactactcctacaacaccctcctccacgcgctggcggtctcctcgtccctcgccgacgcgcgcggcctgttcgacgaaatgcccgtgagggattcggtcacctacaacgtcatgatctcgtcccatgccaaccacggacttgtgtcgctcgcgcggcactactttgatcttgcccccgagaaggacgccgtctcatggaatgggatgcttgcggcgtatgtcaggaatggacgggttgaggaagcgaggggtttgtttaattcgaggacagagtgggatgtgatctcttggaacgcactgatgtcggggtatgtgcagtggggtaagatgtcagaggcaagggagctatttgataggatgcctgggagggatgtcgtatcctggaatattatggtctcgggttatgcaagaagaggggatatggtggaggcaagaaggttgtttgatgcagctccagtgagggatgtattcacatggacagcagtcgtgtctgggtatgcacaaaatggaatgttggaggaggccaggagggtgtttgatgccatgccagagaggaatgcggtgtcttggaatgcaatggtggcagcctacattcagcggaggatgatggatgaagcaaaggaactgttcaatatgatgccctgcaggaatgtggcatcatggaacacaatgttgacagggtatgctcaggcagggatgttggaggaggcaaaggcagtttttgacacgatgccacaaaaagatgcagtctcctgggctgcaatgctggctgcatattctcagggtggttgcagtgaggaaaccctgcagttgttcattgaaatggggaggtgtggtgaatgggtgaatagatcagcattcgcttgtgtgttgagcacatgtgctgacattgctgcacttgaatgtggaatgcagcttcatgggagattgattagggctggttatggggtgggatgttttgttgggaatgcactcctagctatgtactttaaatgtgggaacatggaggatgctcggaatgcattcgaggaaatggaagagagggatgtagtttcatggaatactatgattgctggttacgcacgacatggttttggaaaggaagcacttgaaatttttgacatgatgaggacaacatccaccaagccagatgatattactctggtaagaatttgtttcttggaacataccacatacaattagtgctagcacaccaatttgccgataactaaattcagtttatctcctataaatggttgattaaatctgtagaaagttcacccactttcgataaaatatttattataaatgctaacagtgagaactgtcccagtttagtaaaaagcaatagtaaaaagaactccctggttttttaaaggtaatggagatttcattaagcaaatgaaagcatctagcttctgcacaaaagtgtactcagccagcctgttttcttttttagtagtaataaacaagaagatttgttcccttattctatactcatggttttggggtaactttaactttcaggtcggagtgcttgcagcatgtagtcattctggcttagttgagaaaggcatttcatacttctactcaatgcaccacgattttggtgtgacggcaaaacctgagcactatacgtgtatgatagacctccttgggcgcgctggacgattggctgaagcacatgatcttatgaaggacatgccatttgagccagattctaccatgtggggtgcattgctcggtgcaagtcggatccaccgcaatcctgaacttggcaggagtgcagctgagaaaatatttgagttggagcctgaaaatgctggcatgtatgtcttgctttcaaatatatatgcatcttctgggaaatggcgagatgcgaggaaaatgagagttatgatggaagagcggggtgtgaagaaggtgcctggattcagttggattgaagtacagaataaagtccacactttctcagctggtgattgtgtgcatcctgagaaagaaaagatatatgctttcttagaagaccttgacatgagaatgaagaaagctggctatgtatcagctacagatatggttttgcatgatgtggaggaggaagagaaggagcacatgctcaagtaccacagcgaaaagcttgctgttgcttatggaattttaaatattcctcctgggaggcctatccgagttataaaaaacctcagggtatgtggagactgtcacaatgctttcaagtatatctccgcaattgagggcaggctgatcctattgcgtgattctaaccgatttcaccactttagaggagggtcttgttcctgtggggattactggtgatggctaattagatttcttgtgcaatgaatccctgaagaatctgtagttgacaacgcaacaaagatggtgcaatgcaggctacaaacaaaatattataggcatcttgatgactcactcggtccacaggccttctactaggccaccatttcaaaaagattacatgagttggtgattgtttccatgctgagtgaagaggtgatacctagacaaaagcataatatacaagatcataattccagtgtcaagtgatagactgatggtaactcaggtgaacagtctcaaaggacaagtttgctgaggcaggtttagattggaagaagtttggacaacaaggtgttaatcctcccctgttagtgacatcttaaggtaccaattcaactgagatatactgaaaatcaaggggtcatagttgtttttaggccatcaacaaattatctttgtttctatgtgaccaggtatgctattaaaatcaaggatggtgtaaatatcagtgcaagtattctctgttgaactcaaatattggtgttacaatggatatttgttattccatttctgcgaaaataagcatgccagaaaatggagcgcctgacggtcttacacgagcagttgggg

SEQ ID NO: 9303 - DNA, 7825 bp, Oryza sativa
aaataactgaaatttggaatcaaaaaataaggaatattataaggggagactagagtccatatagaaatacaattaggaaataactgaaattcgcaattaaaaaataaggaatattagaagaggagactagagtccatatagaaatacaattaggaaataactgaaattcggattaaaaataaggaatattagaagtagagtatagagtccatatagaaatacaattaggaaataactgaaattcagaattaaaaataaggaatattagaagtagagtatagagtccatgtagaaatataattagtaaataatataaattcggaattaaaaataaagaatattagaagtagggtatagagtccatatagaaatacaattaagaaaaaaaaatagaaatttggaattaaaaaataaggaatattagaagtagagtatagagtccatataggaatttaaaactaactaaaatttggaataaacataataaaattaaaagtagagtctagagtctagagtctagggtctagagtctagattcagagttaaaaataaagaaatattgaaagacgagtttagagtccatataggaatataatttacaaatactaaaatttgatattaaaaataattaataactaacacgtatatataataaaatataaatattacacattagtagtttcgtaaagttagtataaaatttaaaattagaatatcatttttaatatatttgaataatacattgagaaaacatatatgctattacatgagaaaaaaaatataatgatgctagccgcgcaatctgcgtgggccaccgtgctagttaatagtatagtaagcaactattatataaattggctattaaattgactatagatgaattggagctattagtgggctatactattaaacttgctcttacatgacacggaaaaagatttttttgaaaaaaaaaagcaattagcgtacgattaatataatatggagtaatttagtacaaataagttaaaaagaatcgtttttacatatcataataaaacgaacgaatggagttagctgcaccagtgatatatgccaagctatttagctgtcccctagcttggtgtggctaggctagtaatccgtccgtcttattttaagtgtaaagatttttctatatcaaatatttgaccgttcgtcttatttaattttttttaaaaaaatttcacacataaaaatattataaaatttcaaataagaccgactgtcaaacgttgggaacagaaactcacaaatgcacctaaaatgggacgtatggatacgtgcagtaaccttttctggttttgaaacgatagtatatttcatgattaccatacggttttcacgataaccgcacggttaccacagtaaccacgaaatcaggagtgacgatgacgataatcaccctaaacggtttggtaaagtattgagagttgtgcagtataggagactagttactagtatagttgtacagtcatacaaagctatgcactctagcttgttataaatgatttgctggtcatttctgaaccttttgcagagtttggcaacgaatagatttcttaggcattgtttagttcccacgcaaaaaactttcacgatatcacattaaatatttagacacatgtatggagtattaaatatagaaaaaaaactaattacacagattgcgtgtaaaattgtgagacgaatattttaagcctaattgctacatgatttgacaatgtggtgctacagtaaacatttgctaataacagattaattaggcttaataaattcgtctcacagtttataggcggaatatgtaatttgttttgttattagtctacgtttaatactactaatgtgtgtccgtatatccgatgtgacacgccaaaactttttacccctgaatctaaacacagccttattttgagctataggttgtgaagttctacgctcgatgaaaaccaataagggaaagcacccatgcaacacaattgagcatttcctactactttctaccccttcgtctaaaaaaacaaccaacaatcctacctaagaaactgacacactaggatttttttttatagattagcagtaagtagtaagatttttcttaggattcaagtttgacagatgccaccctaattttcactggctttcctgtttgtttttcaaaatccgtgttctggcatacagatacggtaggccgaaaattgctaagaaacggccaagaaaattcagttaaagttgcaaggcagtttctgaatgatcggtagtatagctctgttcaaaatgatctgttgctagctgcctgctgcatgtaacgtgtactcctacgaacgagcttagactgcagcagcagcagcatctactacagtgcataaggcacatgtaccatgcagtacccggggtagtttgacgctagccatgaaaatttacgttaaattattttcctttttctttggttgcatcggttcatcacatgagttgtacgcttggcttttgcacggttgcttgttgttttggtggcttgcggctgcaggggttttgcactgacacgtatcgatctagaggcatggtttcagcttcggtgaataattaaaccgtcaaatttaattagaatatgtttcttttgtcactttttttaccctcggttccaggtacttccaatatttgaattttattgaaaaactagaaaggaagcccgtacatatgcacgggcatatcgtatttattgctaagagaattaagtcatatctcaccatatacatataagaatagatttggcctcgtaataaaaaaaatatgttgtaaaatagaccgtagacttttatataaatgataagcatgtctcttatattcaaacaaaaatcacttttgtccaggtaaagtgtaaatctcctattatcaccattactaattatcatgatatgtttttaataaatagaacttcatctgtaccatcaaaataaggctaataaatcattaatacataaaatgttcatttcaactacgtacataaatgttatgtcaacacttatttctaaatctacgagtaaatattctaaaactaccgcttctattggttattaggataacaccatttaaacacatttaatttgttttttatattgatctggtttaacttgcatatttatttttggagtactaaaatttattttattgtatagaaaatcctattttgaaaacatctatattccgatggttctaccaacttatattagtattttttttgggtgttatagctttattatggtatgcacataccttttttttgttttattcaatcgaacatccggtaaaatggtttctctcgtatacataggagattaagagggagcgggccgatctaatgatctaaaataatgggtccatcattttgaatgaaaattgacaacgaaattatagagtgccacgtggtattctaagagtgcttgcagaaatgccacatgaccatatttgtggagtaataaattttatttttatagtatagaaaattctatttttataagaccgtctatttttttcttccgacgcacataaatttttttgggtcttatagctttttttactcatgtaactgtacatacttttttttaagagaactaaagggctttattttgttttatagtctttttatcgtagtacatactctgatatataattttttggtctttatagctttattatcgtatatacgcatgtttctttgtatttttttttcaatcgaacatccggtaaacattttctctcgtttacacaggaaattttgaggaaataggctaatgtaatgatataaaataatggatccatcattttaaatgaaaactgatagcaaaattgtaaagtgtcatgcatgtagcagtctaagattgttatatagtatagaaaattctattttaaaaaaccatctatattttttcaaccgacgtacatatattttttttataggtcttatactttttttattactcgtgaaaagtgtcatgcatgtgacagtctaagaagagtgtttatagaaacgccacgtgaccttatttgtgaagtaataaattttgttttcatagtatagaaaatcctattttaaaaaaaaaccgttaattttttctactgatatatgtatatattttttaggtcttatacctttttcttattactcgtgcatacgtgtaagtttttcaagtgtaggtacgtatttatcgtaggtatgtactttatggatagtactgtacgtacgatcacgatcacgatgccatcggcaggtttagtttttttttttttcccgtcgtatgtatatacgccacagtaagtttttccggtatatatattgaaaggaagtattagatttaatctaatggcttaaaataatgggtccaccaatttaaatgaaaattgatgatgagattataaactgccacgtggcaacctaggagtgtttgtaggagcgccacatggcggcttaggaatgtttataggaagattaatggatttttagtatataatagatagatagatagattgatagatagatagatagatatagctactatttctaaatctcttatctcaaccaatatttacaacaatcttttatttaattttttcatatattttatcaacccaaccgatcactatcatttctcttttagtttcacgtcccttcttaatcctgtgaaaaacatcagaagtgcttgtgttttttatatgggaatcatttttcaaccttgatttctggaccgtttatgaatacaagtagtatatgattacagtatatgtcagggttatggataccacatatctaatagtagttgactaaatctcgacaggacccactacataccatgttctatacagaagcaatcttcggatataggaagagttccggataaggaaagacaaccagagttctacgtgaaaacgacaaggactactcggattgtatccatattggtttccctagttctacttgtataagaggacacctatgggtataaatacaagcccccctaggaggaggagaggggggagaatgaacacccaacataatcgacatagaagccacaacatagaagcctacatacgctaagacacgccgccggatatcgacttcagggataaacacggctagtaccctacggtgtctccggatactgtcaggagagatgaaagcgctatctctgatctcgccgggcacggattcgaggagaaaggctaccctgttgtcgactacgggtcagatcgtcagaccgctatgtcgacaacagttagataggctaccctaaatattatactggtatgattatcatgaataagagcaatactggcttcagccaacaggatatagggttattacctgacaattcaggggcccgaatctgtataaaaatcctcgcctccgtctctttacctcagtctcgcgtatatcctagtaccaacgatccctataccatgcaaataccgtagtcgagacatcaaacgtcgacagtggcgcgccaggtagggggattttggtgcttcaggatttcgacaagatgggtttaagagatggactctccgacaacaagctattcgacgacttcggaccaggaagatccaacccggccagagtacgtctctcgatgaggttggaatcatcgtcatcaactatttgatccggcgagatcgatcaagctccaagatatcatcgccgcgaaggataatagttcaatatcgccagatacgggacttcggttcatgtcgactacaacggaacttgccgatctacgatcataattggtcccgaccgagtccaaatctgattacgtgcgcctgtaaattctcaaaaccggctggcggctgcaccttgtgcctggatagtcctactcggacacgatgacaagaggatgcacactatacgtgaagtctgtacagggaactgaagcacgtgtccaccatgtgacgggatgccacccgttttcaggtatttgatagattaattttttaaattaatctactaattttgtagatatatccggtatatatctacacaggtacacaatattttcgtacctatttttacaatctatacagcattgtcagatctatattatgtttacctagagcatgttttttatacaatatctattgcgcgagtgtccccgatgttaaatcgacaacggtttaacgctggggctcgctctattttcttctgtataaatcatgcttgtttacggtttacataatgcctgatatttatatctgctcgttatatcctgataatactagaagatacatgcagttttttgagtacatactcgatattctctgctatatgtcttgccttctagaaaatatttttcatgaacaattgagcacttgagtaggttgtggtcaagtacatcgcattgtcgagaacgatctcgacaaatgcagagtcgttgcgcccaacctaccaacaaagaccgacgacctatctcatagcaccggccatggctggactactcgagaaaaggttgttaacggataattcctcgggaacgccgttggcttgatcacccgacatgattgcgaacggacatccggatatgctacaagttgggtgtgtgagtcatgctggccacatgacacgcacatgtaataaaccaactctagcacctccattggtgttcgagagataattctacacgttcggtggttctcgaaccagtacgtagcaatctcccgcaccgcagcttccattggtgttcgaaagatgattctacatgtttgttggtcctcgaaccagtatgtagcaatctctcgcaccgcaacctcagatggtcgaggtacgactacagcaataacgcagcggtcctcgcaccacgacttcaaataatcgagagacacctacttactggttctcaaccagtcaatcgtagcgatctatcgtacatttacttctagtggtcgagtttagactacatctggttctcgaccagcggtgtagcgattctcccactgcccttaattctagtggtcgagtttagactacatccggttctcgaccagcggtgtagcgattctcccactacctttacttctagtggtcgagttacgactactacctggttctcgaccagcggtgtagcgattctcccactacctttacttctagtagtcgagttatgactactacctggtcctcgaccagcggtgtagcgattctcccactacctttacttctagtggtcgagttatgactactacctggtccttgaccagaggtgtagcgattctcccattacctttacttcaacaaagttgatatcaggtacacaatatcgccaactgttttacccagagatcccttaccacgatgacacctagcgttgaaacctatcctactgttcctttacgctgtcttgacaaggcctctgaggaatctaagggaactttagctgggacgcccagagccgataaggccttgtcggatccttcagagacgaaagaccatgtaagatctggtcgtgtaagagttctcgccgtgcgtattaaccaagctgtgtaatcagaaatggattttccaacttcacggctgggggctaggatcagtgcttattcaactaaggcaggtcaaaggtccaagagccttatcctccgagaacgattctccgacgacaatgctgggggctagggagagtgtataactcaacaaactgactgatcgaagtcggtaaaagagtagacgctcatatacaaaacattggtctgtaagtttaattcattttcggttttccatacatattataacatgttaccctttgagcgttcgctcgggggctat

SEQ ID NO: 9304 - DNA, 8528 bp, Oryza sativa
acaatttcaaccaatggttttgaatcgtgatttatacggttccagggcagtgtgcccaaaaggcggttagtaacatcacaacagccctcaatttttcattccacagccaccacgattttatatacacatgagcttatcatttgaccaccaaaaaacatgatagcgccatgacagcccctgatttgaaaaacactggttgcaagtttcaacatcttgtttagaaagctgtgtgccaaacatgcttcttagttctcagccacaccgcaagcagaaacgtgcacgcacgcacgcacgcactggtaacagagtgtcatcatcttgtcccaaaaatcactacgtatgcgtttctgaactttgactgatcaaggttcattcactttgggcagagcctggattgagctgatgctgaaagtatctggcagaacattcccagcctgaaccggaactgaagaaaaggatcagaggaacatggcctgccggaatccggcaccgatcgccacccatgtgaaggagaagaaggctggccgcatcgccgggtggacgcatgtcgccgcagcccgcatgtgttgggtgcagggatttagctttgcgaagatttcaaagtaaaaaccgctcctcaccggttttccaaaatctgataaaaaacccggtaaaaaccaatgactttgggttgacgcccgtgcgaaaaccgtctaataccaatcggttttcataaaccaagacctagcggtttcacgaaagtcgatcggttctcgctaaattccatcggttgggtgcataaaaaaaaaacagaaggcgaaacagccatcagcagggaaacctgattaactgacagctccaccccgttttgctattccaggggggccctctgcaacaacacaaggtttgcctccacctctcttgcatttcctattctctcaaatactaggacgcgcaccccgcgcgccattccgcttccccctcccctcctctcgctctcgcttgcggccgcgcgcgcgggcccccggtggtgcgagcagtcgtcgtcgtcgtcgtcatcgtcttcgtccggggccaggtggtcggggggcgaggcgatggcgtacagggcggaggacgactacgactacctgttcaaggtggtgctcatcggcgactccggggtcggcaaatccaacctcctctcccgcttcacccgcaacgagttcagcctcgagtccaagtccaccatcggcgtcgagttcgccaccaggagcatccgcgtcgacgacaaggtcgtcaaggcccagatctgggacaccgccggccaggagaggtgaggtcccttctctctctctcttttcttgctcgcgttctcttgttgtgccgcacgccctctgttctgatcggttcatcatccagcattgcttggttcggcactgcggccaattaggttgatcacgcttcgtttcttcaggaaattcaatgtttttctgtaggattcagtctgcgcgatttgtgcgtatagtttaggaaatgcgcaggttgtttctggtgcgctctcttctgtgtggttcaggattagtaggcacagcatattggtttaagattgatatttctttgttttttttttttgccccatgcattggatatgtggatagtttacatcacgtcgtgtacagtcagcaaaactatagcctttcttaattatgctctctctcatgcgtcattatttttgtttttcatgtaaaatcctttatttacctatctttgaatgtgagccagtggggcatgctatcttcctgtgaaggaaacgttgctctatgacttatgttctgagagagattctagtttattttctagcatcgctatcgtgcagttttattctacacctgcattggtgatgtcctgttgttgccatgtactatttggcatttgataattcgtatggacatttacatgatttcaatccaactgtctcctcacattatttagaaaattgttctgctgcaacatctgtttgtcttatggctctaaataaaaccttttctggcagttgaccatccatccttcaaatagtaaataccatgagtggtcgtccaataactatagaatcactaggaatattctttttttatttacagctctatgctgatgtttacagtattactcttgtgccatttacaatcaaattgctgtccctagtgtctcaaagaacttcatgcatttgatatggagtattaggcatatcctttgggatcaatttctttggaatctgctccatgtatttgatgacatttcagtcatgttgatagtttcagtgctcggtatggactttgaagttccttctgtactctctcaacaggtatcgggcgattacaagtgcatactatcgaggggcagttggcgcacttgtcgtgtacgacgtgacacgccatgtcacctttgagaatgtagagaggtggttgaaggagctccgggatcacacagatgcaaacatcgtcatcatgcttgttggcaacaaggctgatctgcgtcaccttagggccgtatcggttgaggacgccaagggcttcgccgagagggaaagcaccttcttcatggaaacgtccgcgttggagtccatgaatgtagaaagtgccttcactgaggtgctaactcagatctatcgcgtggtcagcaagaaggccctcgacatcggcgatgaccctgctgctccaccaagaggacagaccatcaatgttggtggcaaagatgatgtttctgctgtgaaaaagtctggatgctgttcatcctaaatccattatgtccatgagaaggaaccatatgctcacctgattatatcatgagtaattaaaaggataactttcttttgctgcctaacctggttgcctgtgagattttagtgttacatcaagaaggttggggctgttaaacccaggttgggaaaaagctaactttgaagtgtcagtggttttatggtttgcatttgtggtttcttcattggtgtactattgttccatgtaaattgacaggatttgagatcctccccacctttcactgcataacatatcccagtaaaatgttgttgtaattggatatcagactgtagctgattggcagcaagagttctaattagaagggctattatattctgtaactcctactcacaaatgtacaaaagtttgcatccttgaacttcttaccagcctgtatattacggtactgaaagattgtttaagataatttcttctatttcagtagatgtgcgtaaaggcgtaaactatagcatttatcattttctgcatatctctgttttgcaatattactacagattgtgactgacctacaagatgtttcctttcattttatcagtattaatagagtgaaatgatcagctttgaatgtctgttgtgtaggagtactacattctggcagatatgaacaggttgcactggttaaatgacctttcgagagggcagaagaagagggtatcaaggtctagttgcagtggttaaatgacctttcatgagcagtggttgcaaggtagccttaatacaattcaaaggacagcaacattggttaaagcaagttcaatttagtggaatatggttggtccggtgattgcccatgttctgtagttacattgccaagtgtaaggtaggatgcaatgcaatggttatggcatgacaaacctaactgcattgctttagcaaaaatgatgaattcctgatggccatgcctggcgccatgatcctgttaaagaagtaacctatctccattttgtgaataccgttgcattttttttgaccgatttaagcagcactgatctgacatcatgttatcagccaatttctgaagccatacatttttctgtagcaaaatttgcattttttagaagcacagatcttgagttctttgacattaaggacttgttcacattgttaccactttcaaccatagtaaattttggtattatcaaattttagtactgctaccttgccaatgctaacaaaccaaacaaatccttgccaatgctaccttaccaaactttggtaattataaaagttcccactcttaaaaattctatcaaattttgataagcattcaaactaaacacaatcaacgataccaaaatttggtagcagtaatgccaaaatgtgctaccaaattttaagcaaagccagtgagaattcggtgcttccgaagaaaatgcaatttaattcttccatggtcattcagctccacgcaattctcagctacaacgaaaatcaccaaacaaaaaagaaaaatctccacacgattttcagctaaaacgaaaatcacaaaaaaaaaattgtaagatgagtcatggaaactatttctcactatcagcaaagaaatgtagccgtggagaacgccaccgtgttgccattgcctgctctgcctccccttgccacggctgatctcgcggcggccaccggcgccgtcgccggcgacgcgtccgtgctcctcgccgtgaaccggtggtggtgcagcggcatggagttggcgtcgaggcggtggagcgcggcgacggtgagcacggagcaggcgagcatcgggacggggccgaacacccacatgagcagcgccgtggcgaggtagagcgcgcggagccccgccgcccagaagttgccgccgcggaccacggcgcgctgcgcgtcgcccaccggcggcgccgcgtcgccggcgagcgcgctcatgaggaagctcgcgtgcacgaagtaccgcgccgactggatgaagcaggtgaaggaggcgaggaagcaggcgaggagcgcgacgcacttcaccgtcgccgtcgcgtggctgccgtcgccgtagccgaggacgacgacgcccgcggcgcccggcgccggcgagctgctcacccacgcgccgatcagcgagcccagcgcgatgcacagcgacgccagcgtcgtcgccgccgagatgttgtccgagatcacgcccagcgccagcgccgactcctccggcgccgccgcctgcaagaaaccactagaatctttcgtcaccattgatcagttcttgaacaaacaaattgaattgatcgaacaagatgatgaacctgcagcatgcgctccacccaggcgagcttgttgtgattctcgtagccgatcacggtggtgtgcgggtggcggagaatccggtggaggagcatgaggtggtagccgaccatgatcgccagcccgcatgggacgagcaccaaatccatggagctcttgtcaacaagcatcatgaactgactacctcaatttctgtctctcaatttctcaacctatatatcaattaacctctacctagctagcttagctctatagctaatttttagttgctgaatcttgctgttcttctcttctactcttatcttgattcgatcttgctccctttctctggcatgattgcaacacgatggacagaatgtgtacaaactgtacttgccattgcttagattgttaggtcaattaatttgtgttaacttggtaatgggcactctcgttttcattctgtccgtgatacttgatagtagttgcttgtgggtctcagcagaaaaaaactattgttgtggctttggatgcaagagaaaatgacaagatgaaaatttcatcctatgcaatgtttgcaccatctcaaaaggaggaggaaaaaaacaaaaactgtactttgcagttaggagagagtggcttttgcttgcacttaaaagcaacatgggattacaagaaagaataatttcttaatggacttcctcaagctaagccagctgcatgaatccaaatttggtactttttttcgtattttattttttttctcgtgcatgtgctgcaatactttggctctaaaattagggggaaatctcacaaaggggggtatttgtgcatggataaaaagtttggggctgttcagattgatgccattttcaaccataccattttttttgtaaagttgccaaaaaaatgcttacgttttgtttgttactaaatcctgccaaaattggtaatgccaaaatttggtaagatttattttggtaacaatctaaacaagtcctttataccttgcagttgtgcatggtttgggctgtccggcccactactgagctgcatgcctcatgatcaatcgcacctgtatcccaaggcccaatgcggtcaattaaacaagaggtttttcctacattacagcgattttgctatatatttatcgataaattttcttcctaaaatttgacaaatgtaaatatacgatcatagtgtaattacattataacttgtatgtaactttcacataattttaaaccgttatatttgctttaaatcttatatatgcaagcgagaaagaaaaaaatcacagcgtgcgcacatatgataggatttggtcctccactttacgaaaataatatgttaatgaggtatttttaaaagttatatacgagttatatgcaagttacaatataattacaatttttttagggaaatttgtcgacaaatgtacgagcaatcccacattacaatatttgggtttagtttttctaatatgcaaggacttaggacagttgaagttattaagcaaattaatttaatatagtttacctttcaaactctacaagcaaacatttttttccgattgcacggatgatgcacagatgcacacctatgatgttgccctcttactctcgcaagaaggggccagtggcaaatctatgacggcttgatttaattggatttttgttcctttattgcttccctgagccttttaaaaaattactatttgaatggaaatgtctgttattatgaaggacaattacgttcttatccatgttacgttcattcaccaagagggtctcttcaagatttttgctcatatccatgatccatccacagattttgagcttgtttctaaaaagggacatcgagaggaaatggattaaaatttggaagtacatatactgatattttatacccacatattggtacaaatatactcgagaatgtttggaaaggaacgagaaaatcgtgaattcagaaaagatttctgttgtattctactagcttcagttgaagttcggagacattggatgtagtacaatttgtgaaataccattaaagatcccggttggtcaggagacataataatggcccagtgacaagaacagccggatcataacaagaactaagcttctccagtactgacatgtgactgactcgctttgcatatctgtcgcctccgttattatctctagcggtatactcgattcatttcaggaactttgtgtgggaagcagaaggtgtgttatcacttacctggtatatatgtgtaaaattaagattggttgtatttcagggggggtatttagttgttccacattctttaagttggtcatcaccatgcaatgaaatataaggaaagtatattacctctgttgatcaaaatgattgaggctaattgaacctctcaaatttctatatacatatattcttgcatcctatatctataattttgtacggcactaatgcagtttaccttttaggcgtccacatgttcagctgtatatagaaactagtagaaagcttcttgtcctgtaaaagcagtctctggatgttgcagagtgtgtatgttcacttatggagttcaggagaattgtatgttccagttattccccttcttgtagatcccggattactggctacctcgatgaatagaaaggcaagaatgtttactagtaacaatttaccaggtgggaagtccatgacagatatgttgggaacttgcaagtctggaccggaaaatgttggcgtgagcaccttgttgagatgtcggaagcactggtaaactgaaagatttttcaggagtttccatgcaaggcacaacatgagaacaccacaacctggaattccaggtttctgcattgttcaggcactgccgtttatcctagcatatgtcatcagattaccactggtttgttctgacgcacctcaaccacggcaacaaactgaaggatatggacgcagtctgcaacttacacagtagagttctcactaacagatgtaaatcggactgttcagacaagcggtcacactgttcatcgtacagcaacaaaaacatggtaacaagggatattattgagattaattttgcgcagtccttaatccttaaggcatagtggcacttataactgcacctgatctgaatcgtttacctagtatagcctactacggtgctcctccccttaaaaaataagtttatttttcatctattccacacatactactttcacaaactttaatataatgattactaaaagataagatttattttaaacaaataagatgaaacaaaatgaacatgggagggtaccagatacccttgctacttggaaatatattggcacaacgttactacctatccttgtgtacaaatagcggtacatttcgatcagtgtgacgctcagtatccctattgagatcataatacatactgatcagtgtgtgaatttcagtttaagtatgtagattagtacacgtcgaacacagcgtgacgctcagtatcagcagaaa

SEQ ID NO: 9305 - DNA, 11642 bp, Oryza sativa
ctccgagaacgattctccgacgacaatgctgggggctagggagagtgtataactcaacaaactgactgatcgaagtcggtaaaagagtagacgctcatatacaaaacattggtctgtaagtttaattcattttcggttttccatacatattataacatgttaccctttgagcgttcgctcgggggctatttctatctaatattcttttctgagtattgatttcaggaaaattctatttgacattatcgaagattccatgtctctatggttctacaccaagatcaactaaggcgagtatgataaatgttgacaaggctccgtcgcagactctacgcctactcgattactcgagaacggttggtggatctcgacaaggaatacggaatgaagagatggtgtaccgccgagataaaatttcttgacttcaatccaaattctcgattacagcaagacgggagacttagtcgtatgctttgtactttcttggttgacatcggagattgactcagacaaaccctttaggtgtccgcacgaggctgataaaggaagtctaacgttatctctgaactcaccgagaacggttacgtgcgctcgataacagttcctccaaggtctgcggttgagaatatgaacttgttcatttgcattgaagtcgggggctactgtcagggttatggataccacatacctaatagtagttgactaaatctcggcaggacccactacataccatgtcctatacggaagcaacatttggatataggaggagttccggataaggaaagacaaccacagttctacatggaaacgataatgactactcggattgtatctatattagtttccctagttctacttggacaaggggacacctatgggtataaatacaagcccccctaggaggagaggggggaggatgaacacccaacataatcgacatagaagccacaacatagaagcctacatacgccaagacacgccgccggatatcgacttcagggataagcacagctagtaccctacggtgtctccggatactgtcaggagagacgaaagcgctatatctgatctcgccgggcacggattcgaggagaaatgctaccctgttgtcgactacgggtcagatcgtcagaccgccatgtcgacaatagttagataggctaccccaaatattatactagtgtgattatcatgaataagagcaataccggcttcggccaacaggatgtagggttattacctgacaaatcaggggcccgaacctgtataaaaatcctcgcctccgtctctttacctcagtcgcgcgtacatcctagtaccaacgatccccataccatgcaaataccgtagtcgagacatcaaacgtcgacagtatatgattataaaataaaaatcatatacagtcataaaatcactgtataaaaaaatactagttatgggttttatctagtagatcttgtacatgatccatactactaattattactttattcgtgtcaaaataagtttatttttttcctcccatttatcttaaaataaatttatttctaagcaatcgtcatattggagtttataaaagtagggtataaatatattgaaagtacataagagagtaagtttgtgtccttttggacactttgtcaactcttaaccctcatttttcgcacattttttaaactgttgaactgtgtgatttttgcaaaaaaaatataaaaatctaatttaagaaatatttaatactaattaatcatgtgttaatccattgctttatttgcgtgcccatatgaaagggttaccaacactggctatcgaacacatcctaatgattgcataaaatatgtagtcttttcgatttcatattggtatgctattgaacacaatccaatagttgtatcgagatgtgataaaataaagatattatagtatttttaattttgtattggtacgtgtagaatgtgtgaaaaataaacttattttgggacgaagcgattacgcaatgatcgtattgttcaagttagagggagagaccacgagacaccgtgttcagaacacaatagtctcgcaggactcgcagtgaaaatggttcaaaacggcagagaaagtatacggagataaggccagcagagaagcacggggcatgtcgagtctgagattcgagaaaggcatggagaaagaagctgagcagcagggtttacgattccaatatgaacttcagtttcgggctctggtgaaatgacggttttcatgaaatctggtgaaaagccggtaaattctgaacaaatttcataaaccaaaatttgaatacaaataccttgagtttatcgataagcttgcgaaaaccagtcgactttagccaaattccgagcgaaatcatcgaaatttaagtgttttcctttttttagtttgttattcttttctttcctactataaatttcagtaaatacacagaatacacctttttttcaaaaattacgaaaatcatactatttataagatttcaaatttgaatttagtcgtgtttagacacatgtatggagcatcaaatgtggacgaaaaaaccaattgcacagtccgactgtaaattgtgagacgaatcttttgagcctaattacgccatgatgtgacaatatgatactacagtaaacatttgctaatgacagattaattaggcttaatagattcgtctcgcagtttacaagcggaatctgtaatttgttttgttattagtctacgtttaatactttaaatgtgtgtccgtatacttaaaaaaattttggcacacgaactaaacatagcctttaaatgaaactcatcaaaatctcaaacggcttctactttcgagtctcgtcaaaatcttaaagttttacggaattcgatcggttttcgtcgaaattgagaaccctgctgagcagaacaaggatttccaattgtaacgccccgattttcatttgggataaaaatcatttaataatgcattttctagaaattaaataaaagttaaatcaatttaattaagtgaaataatgggagaattaaaattttccattaaaaatcattggccgggaatattttgtaatattctttgtgccctaatacaccctccggatttttccgtgaattttcggagctcaataaataattttaatgccacaaagttcactaaatcaatttaaagaaaaagaaaaaaaaacaaattaaatcctccttcctcccttttcgagctcggcccaatcctctctccttcctctaccgtggcccggcttgcctccccttttgacgcaagtctgcttttcctccctctcggcctcccctctcactcaggccgacaggtgggacctgtgggccccacctgtaatccccgagatctagccaggccggcaactgccgcctgagccgctcccgcgtcctgccaccaccgcagccttcgccgccccgcgggcaagcccggagccgctcccccattccacccccgagctgccctctccacggtgaacccgagccaccgtcgccattgccgcctctggccgccaatcgctgccgctctcgtccgtcccgcgctacaccgtcgcctccctcggctccgcaaggacgaggagaacctcggccacctcttcccattgccgaaaactcactggacgtccgttttcccgtacaccggtgagaccttcctcccttccttccctctccggccggccatgtcgccgccccgtcctccctaacgcctcccctcccatcccagggtgcagctgccgctcatccgcctcttcccgagcgccgcccgccgtcggagacgccgtttcgccgcctcccgtgccaccgccggctgcttccccggtgtcatctcgtcgtcgccgccctcggggagaacccttcctccctctgtctccccttcaccggccgccttgcgacgcgccaccactgccggtggccgtccggccggttcatcaccaccgcgccgctgccggctatgctgggcagccggttgccgcctccccttgctgcgccgcgccaccgccgcccgcatgcgccgctgctccccgcgccatcgccggccgtcgtcgccggtggccgcgctgccgcgcgccgtcgctcggtcgggccggcttgagccgtgcctgtgtcccggctgcgccgccccgtggccgcccgatcggctaggaccgatccgggccgtcggttcccgtggaccggcagtggaccgcctcggtggtcccggtccacggtggaccggcgcccttgtgtcgctgaccggtggggcccgcttgccggcgccgcccctcccccttgatgacgtcagcgcgtcccttttcctttcagaaaataattaataattgcgcaataaatcagtaataattctagaaattcatttaaatggctcgaaacttctaaaattcatatctaattcatatgaactccgaattgagccattcaacttgcaaaattcatctaaaattgagctctacatgtttgtttagtttttatgtactttttcgttggtttttattagagtttttcctcgttttgcgtgccagtgtgtagaatccgtcgttttgaaagttcgcggtcgcaaggataagagttcggaagattgtttgaagaagcaatgcaagtcacacattccccttgagcattttgatcctaatttacaaatattttatcgtttgcaaataaaattgcatgtcttgctaattacatgggatccgggtattacgtgccatgtttacttgatatctgtactttgtcaacattgggtaataaatcgactagctcatgttacttatgtgacctagctagaactttatgcttagccatgcttaattaccactagctcagttgatgcgataattacagtattagacctttttagtatcagaatgagctgcgtgctcgagacatctggccatgcttcatggtcgtaattatccaactaaaatgcgactgaatggtgggctgtaggtgtatggttttgctagtcgcacccatggcaattaaggaccggttcgcgggatgccctggaagaacttatcgtacataccacaagccagcgtgggcaacggctgggcttgtagtgtagctttcctctagctgacgcatccaggcaagggtgggcgtgatggagtttggatgggccctgcgacggcctatgcggcttccggattcacctaggcacgagaggggactgcccgctgccttgcgaggagtgggggtgaaacctgcggtgtggtgtgcttggttagagggagttatgcgaagggtcctgtcatggcctctttccggtatgtcatggtggcatgtcggcgcacggaaacgtgtcgtggggctgtgtcttgtgggaacagttgtacacctctgatcagagtaaaactattcgaatagccgtgcccgcggttatgggcggttgaccagattcaccgtgaaatagtctcacccctaataaatcgacctaatgcactgtagttcaggtgggttgggcctgttcaatgtggtgtagcgttgatcagtggagatctaatttactttaattacttaacagttttactgttttgctcaataaaatattttacaaccgcctttatgcaaatagccacaaaccgtccttgtgttccccttgcacgtctgcatcgttggtgtggcttgctgagtacagtggttgtactcagccttgctattatttcccccttttcagaagtgcagtgcttctgagctgaagacgaagttagaggaccaaggctcagaccctagttgagttttgcctgtggagtggagctgaagccccgtaggatcgtctttttccgctgctgtcgttctctttcgtgtgaggactaagtgcctcttctgtaagtattttacgctttatttacgtttagaactctatattacttgtcgtttttgtgtaccctgactggttctggatatggatttaaaatttgggttaaatttctgtgagtgacaccatttctccatggtcctcctctctggccgagcctttacctttgcttccgtctcttcgagctgctgctgccacctttcgcagtgatgtgagagatggccaagctgctgctgctgcctgctacggggtagctgtctttcacgtcagcccgttgcatgcttgcttgctgccctctctttagggtgtgttcggacccaagggttcccaacccttctcaattgtatttaacgtacatgctttttaaactgctaaacggtgtgttttttgaaaaagtttatgtatgaaagttgcttaaaaaatcaaattaatctatttttttaaaaaaattagcaaatacttaattaatcacgtactaatggaccactccgttttccgtgttcacttttccggatgggaacttttgtagcgaacacagccctcacgtttgtttttaccagcacagttggataacatggatgcacgtacgggatcaaagacagatactccctcgtaaaaaaaaaacacatgtgtccaagtacaaacacagtatccaagtacaaactcaggattagatattttttgacagaggaagtatatacctaccagcaaggaacacgatgacgggaacgagggatgatacactcgtctctactataactaggtccaactcccacatatacactatccgtctcaaaaaaaaaaaatcaacctagcaggggaggggatatacccctcctaggatgatccctcctaggtcacatctccgcctagattttctttttgagacgtagggagtacaacttttgtttttatcgtaaaatataatagattttattcaccaaccctcttatttcaaccaatcacatatacttccatctaggggtgaaaacggttacggaaattcccgatcgaccaagcgccgtttccgtataagaggtacctttttagctatttttaagttttgttttttcttatttctttctgtatcatattaatatcgacactgagtagtttaaatgataaatatgatcaattatctttcttcttttcttctcttatgaagtcatatcaccttaattttcctttagatgattaatgtatattatcttccttattttccttttctcattgagacacattactttagtattgcttttaaatgatcaaatatattatttaaactgttataaaccaaatcattttaattgtttatagctttttcaatagtgaaaattatataaaggatataaagttatgtcgtgtagctatcttgcaggttagttttacatttggatgattaatctatgttatattttttccctaatctcattgagctaatacattactttggttttgctttttattgatcaatcataattgtttatagcttttttttcaataactgatcaaagatgaaaatcatataaagttatatcgcatagctacatttaagttatttctactattatgataaaaaaattcccgcaaaaatttctagttagaaactcctatttcgtaaaaaaagtgtaactctagactactatgggttcatttggttccactagaaaggctaaatatttggaaccagtaaaaagacatgcttttaggagcaagctagccttacagggtgagaaaaatcccgctggccagggagagccgatttagctcgccttccatggcaaaactccaattgcaaaaacaaaagagaggaaaagctctactcgcacgaaaaaattaggataagataagaacgacccaggcttctctgaaatcagaaatcagagatatttctcgacaactcggcccaatctcataggcctcttctcccacctctcgctgacgaagtctttccctgaaagcatcctctccacctactcataaaagtcacagccatctggagaaaaatcgattagggaagaggcgaactcatccgcaaactcgatctgaggcaaatctattcacacggccgctcctggatcttgtttctctttttagaaacaaaacgagaagcaaaataatcatcggcagagcaagaatttcgtacacgatccaaacagctacccactatttcttgcctcaggaagcaaactaaacacaggaggtacgacaaggcaagcaaactgacaatgagatggtttaacctcaccgagctaggttacttgcgccaagatccaaatataatgtaccctatctctccctttcaccaccccttgttcaatttttttccatctgaccactaactaggggtatgcattagatggtttgttttattttaaacaaaattggtcatctaaaagactaaaagtgtctaagaccgagtaattgttcggtcttttatcaaaacagaaatggttgacagtttcataagagcaagtttaatagtatagcccactattagctccaaatcatctatagccaatgcaatagccaattcatacaataattgtttactatactattaatacatggtcccacatgtcatatacacattgcgtcttggagtccgtgctgcagctggctacagatctgtagcccgctacttttctctctcatcgtttatcgtattaaaatatgtttatagctggctaatagcctgctattgtacctgctctaatgctctaagattataattaaattttggcaacacttctcttcttttaagatttctttactgctctcttgaaatgatcatatatatatatatatatatatatatatatatatatatatatatatatatatatatatatatatatatatatatatatatatatatgtatgtatgtgtatatatatatgtatgtatgtatgtgtatgtatgtatgtatgtatgtatgtgtatgtatatatatgtatatatatatatatgtatatatatgtatatatatatatagacacacacactgcatataggtaggagtaggatgcgacactgtaatctgacgtggataacaagatggattgggagcccctttcccatagattttgtgagcaagcatagctgcatgggcattgggcaagctagcagaattgacgtgtgtgtgctgcctgctggctaatgaccggtggtctcaactctgaagagaggcgtggcagaaaggggtatggtttcagttgggattctttccaagcctcctgcaagattctcaccaaaaggcagcgatagattcgaaaggcaggggatactctcgtgaccattgaggtctttgacgagagccttgatggcgtgaggatgtcacgacatttttcttttttttgttaaaaggaaatttggtcttgaaggattggaatgcaaacttgttctaattaatttgtgtttgggaagtacattaacagaaaagtgaagcacgaaggtacttaacatccaacccaagaatcactagggctgtgctatcgatcgaccacatcatagtttaggacaggctttccttgaacaaggtatctttacctctatatgtttagactttagaggagagtcgacagtactaaaataatcccttcaaattgtaattttcaaaaggctcagagaagcaataaaggaataaaaatccaatgacatcaagccgtcaaagggcttcatctttttcttatgcttatacttatcatccaagatttaaattttcaaccatcaaagtttatttttcagtcgttgcttttagatcgctaagaacacgtatataaaagttttattcataatttacttttcgtttgcaaatacgccgtttcgcgatggctccgaatgatttgccactggccccttcctgtgagtgttagagcgcaacattcataggtgtgcatgtgtgcatcatccgtgtaatagaaaaaaatgttcaaagagttttgaacggtaaacaatatcttaacaacttaaaaattgataatgttccattcgtcacatcattttttttccataagtctgatggagcgatggcctccgtttccacacgcgcgagtaacgcatcgcataagacggataaagcacaaattcaaagatagatcaattttttttcagtccgtcattctcgcatcattccgagcccacatcaaattagatccggtcgggatttcacataatcagtttgtgttacacctgtcctagaaaaatccctaatttgtagaaaccctaattttcaaaatctcctcaaattagatcccaaatacaagaactataaagaatggcaggcaaaaaaaaaaacctaaatcatggtcacaccggtttagatcttcggccgcaaatatggcatgatttcagaaatccgattctcgcccttgactaccgtgcacgcaccctagccgtgcaacactcatgagtagaatgccagcagcagcagtgaggatgggcacagccatctgtattcgggcacgccggttggaatcgggatcaccattccctgaacatagcccacatcggaatcgggcacaggccaggattggaagattaagaacaccccagcagtttcagatcctgcaattgtgcaggcacctgaccagaaagctcattgttcggcaaatcaagcgtgctcatcttatccataccatacccccaaactcttcaggtatactaccattgaacccgtcgaacaacggataagatgagcatgccggtagacgacgtactcgtcgatagcgagacgcctatgattacttcatgaaccacaaaatatgccggcccagccttccagatgtgctcatagcggtagtgcgcgcgcgttatgagcatctacgtttctattgtgtatccaaaaaagaaaaaaaaaatatgctttatttattagggtacactgtcccgtgtggacggagcgatttaatttgtggttgcttaagaggaagtttaatagtatagtcaactgttggctccaaagtatatatagccaatttaatagccaattcaaacaatagttgtttactatactattactatctggtcccacttgtcatatacacattacgtcttataatccatgctctagctggtgacaaatctgtattccgctgttcttatctctcatattttatcttttaaaatatgtttatagttggcttatatcctgctattgtactcgctctaagagcaagtttaatagtatagcccactactagcttcaattcatctatagccgatctaataactaattcgtacaatagttgcttactatactattgatatatagttccacctgtcatacgcacattgcgtcttgaagtccgtgctgcatctggcgacagattatagcccgccgttcttctctctcatcttttatctctttaagatatatttatagctgatttatagtatgccaatgtacttgctctaagtcagcgtttgggcctgggaaatgcgggaagcgtggttgggctcactcgcttggcagtagggatgaaagtggttcggatactttccgtccgtccagaccaattttcggattcggaaaaattcggtcggaaatatccggaatttctcggattcggaaacggattcggatttttttctcggatacgaaaacgaatacagtaacggtgatatctgacggaatcggaaaacggtcggaaactatccggcatttttcatcagatatccggagatatttttcagcaaaaaaaaaccagaaaccctagccggctagccggtcgcgctagctgcccgctgccgccgccgcccgcgcgagcctgccgcggctcccgcccgccgacgcccttgccggccacagcttcc

SEQ ID NO: 9306 - DNA, 6543 bp, Oryza sativa
ataagcctttttcatttaactcggcactccacagctatttcagtgtaagtagcagtttcatgaaggaaacaaaatcttatttgtttatcaagcacatcattattaattctcaagtatttggttgtacaggcttcaatttctggtgtttcagtgaaaggtctcaaaggttgtaagaccctaaataaggatcccgatcccaaaaaccctttggaggggaaagaagagaggtcagttttgcattttgatcagtcttttgttatttttgtttatattttgttcttctatactacagtaacatttgaaactcccatggtcccacatttttccaataatatatttctttccctgaattgttcactgcattggtggaaaataagagctatattctgaatttctgattcctcctaggtgtgttcattcttggttttaacgggttgggaaaaaaataacatgacgtcatttatttgttcctagatcacatatgtccaatcttggagggttatgaaaaaaatttaatgagcaaccctagttcttgccttgtcttatcttactggatttgtcacttttctagacggtgggcactgttagcagcttggtgctgttggccattgcattgcttgtctttttatcctaccctgtgttgaacttgggaacaaatgtgcactccttttaattgtgtaatatgttgaacacaacgtaaatattagatatacttctcagccacttcatatgatacagggaagaggtgacttttccaggatttgtcgattgcatttaccttggtgcaccgagtgagctcaccctggacaatggattgggtgacaaaattgtgatatcaaatgcgaagtatgctaaattgatttgttacaagaggaatcgtataaactctgtaaagattgcatcataaaattgtggttaatttttaaatacagttggtcagatgcagtgctgtggaatcctcacttgcagatggaggcttgttacaaagattttgtctgtgttgaaaatgcaaaggtatgacaactaatacaacaaatgcacatgaagtttcgctaacaattatagacaccacaaatgaaaatttaagaaaaacatgttgataattagtatgtagttttctctaatgatatgatcaattgctgatgcagattgaaacattacaactggggccgaaccaatcttgggtggcagagcagaaaattgaactgatatgaattatgaagctaaactgggcaaaacaatagagtacaacaattatgttgcaaaaatgaacttctctttttctttacatcatgaaatgcaaatgtcatagcccctaatgtatcatctagtaggtggcataagtcatatttttgaaattgttttatgtaataaataagtaaataaataaattcagttctcccattatttcatcctctcctttttattaatgagcggcctgctaagttttaagtttcaagctctgtttttcgcatatcttgcagtatgcaattggaggctttgagcttcagatcatcttttttttttccataagatgactgttgaagtgcactggaattagcattttgttcatgttttgtcgtagggaagtgttgcaatcagcttattcttctctgttccagttttcctggatgtccatctttaagtccgtgaaatcttttataagttcattacaaacactcttgcatgcagtgtggttttaaagtgaatcacagctcataagatccttaggttcatagattcagccagtgcaaaattgttttctgcactctcataatcatatatcaagactccaaatgaaaattaataatgatatccagcccatttggaaataaaactagttgtgtttctgttaatttcctttctgaatgctggttcatattcttcatacgattcattaccaggagatacttactgcaagcatggacatgctatcatacaatatttattcagcaaaatgtatgttacacttacatcccagctctcaaacagccaaaagtgagagcaacgagcgataaaaaggggaaaaaaaagtaatttacaaaggcaaagtgaagcaagattacaattcaggggattcagtagctaagccgtaagctagtttcgctgagtcaagtgtattcgcaagaagcatcgcaatggtcaccggtcccacaccaccaggaactggagttatagcagaggccaacttcacagcttcttcgaagcagacatctccagttaatcgatagccgtaatcactggttggatcctatgaaagagtatcatgagtactaaatgggcagaaataagtagtgtaaaaaaaaaggggaaagtgcattgatgcacaaatccagaactgcactcatgaaaaaagttcagtaggaggcatggttagctgtctatatcaattcacattcaggacatatcataggtagagacaaattcatacatagaataccaactaaaccggaagggttcaacaagatgctattaaaaatggatgtgctaaataataacaccaataatgcagtaagccagtaatgttgtaaatcaagcatttctgttctcggcccgaactactataaacaacatttcctttacctcaattgggtttgttccaacatcgatcacaactgcacctttcttcaaccagcttcctcttacaagattggccactccagcagctgagatcacaatatcagattgacgggtaatctcttctggatttgttgtgaaagcatggataatactaacagtggcatggtgtctctgggagaaaaaaaatcaaaaatactattagtttgtcacaatactggccttgtaataatgaagaataatcaaggtaatagcttggctttacctgtaaaagtaaagaagtgggcaacccaacaactttgcttctcccaatcacagtgacatgtttccccatgagttcaatcccagactggagcaataactcaaggcaagcctttgcagcacagggcacaaataaaggcttccggcttctgagggcaagattaccaacattcaatggatggaaaccatcaacatccttctctaggctaatagcgctcagaatcctttcttcatccatatgctgatttagccaaaaactagcatgttaaatagctagcttgatgttcattatgtcaatattgaaaatgaaaaaggcaaagcttggatgtaaagtaaactgaatcttaacaaaacatactaaaatgaaaacaaaataaaggatagctgaagttggctgtctattacaatgacaacaaaagtagtttgcattagtcatcgaacaaaacaatcatctaattggtgcaaatgaaaggttttcataatataaatctacaaacttaatccaacttcctgcagctgcaacactagaacactagacagtaattacctgtggtagaggtagttgcacaagaatgccatgaacagatggatcttcattgaatcttgacacagaatccaccactacgtcttccgtacagttcccaggcaactccgccaacaaggactttattccaacctcctcacagcccttaattttgtatcgcacgtatgactcagagtcccttctatcgccgaccaatacaacagctaggccaggcacatgccccactgcatttttcatttgacgaacttcttcagcgatctgaaaccttatgtcttccgcgacagacttgccatcaataatggtcgcagtggagtcataatcaactacaacaaagacaaaagcacaagtacagaacatcaaatcattaacataagaagctaaacgacaataacataaggctccctgtatgaccaatcaatagtgaagaactgaagcttcacagtcttttcatggaaatggaagcgtccacaagcatgaagggtatcaacctagaaatttccctacaacctttgcaccaactaaaccaaagattattgcagccgccaaataaaactactctatactctacagcatggtttcaggctttcagcttggcacaagtaaatctataatttttttccccactgcacctttccatttttcagccttacactagcattcattccatttgaattaacattctgttctaccaatagctccattctcggatgtcatcattcattagcaacaacagcaagtctttcgacactaaactgctacaggatctggaggtgggttcagcaccactaagctgctaatctccaagtgggttctgcaccaatcaagcgagaaccactgaatttaagtatccgcagcacgctctcaaaacccatgtactaaaccccaaaaccatccgaatacttcgaatggcatctcccggcgaaaccactggtcgacgaagcgcacgcctagcaaaagcttcacatcagcaagcccgccggttacctccggcgccgctcgggggagacggccgcgccgcggcgcgcgggggcgagtcccaggtgtcggggatgtccggcccgagaaggcggctgctgctgctcctcctcctccgcctcctccgggtcctccccttctcctcctccgccgccggagcagcagcctcgtggagccccgcgcgggccgcgcgagggaggaggaacgccagcgggcccgcagcggggcgccggcgagtggccgcgagcagggccacggcggcggcggcggcggcgccgcccatctccgtcgaagcggcggcgagcgcaacgtgtgtgaactcggaagcgatgtggatgtgtggatggaggatttgggccttttgggccctcgacaaaaagagatatttttgtcatgattgttttcccttttcttttctttttgaaactttttttgtcacatttttgggccacaggtttgagtttttgatgcattttttctgaaaaaaaaaagatctaaagtagcaggaagatactgtgcttgtggaagatgctgtttctgatgtcattgtcggggtatattctgatgaaatctttgcctgatacttcacaacaatccatcgaaatcgttgtcgatgtatttattttgaatgaaaaatccttgctaagaaaatagagaacactggattgaattgtaaatttaaaattatgttttcttaaaaggttttgaaattaaattaactcgaaaaccaccatatactttatgctcggaccaaaagaaaaaccaaggggtaatatgtttggtgaatgtccaccatgtcaaccatgagtcatcttttgcgtttcaacttactagtcacaatcaaaattcaaaattttacagttagttgattttaatgtttctttattttaatttaatttctaaaacacaaatataaaaagttttatgcacatttttttcccgccaataagcataacggcttatgggcaaaacgatggaactgaagtcatgtacaacactaatgtgaccagttgaggtattttgttgtaaatcatgattcattgatttgaagtaatttattttagcactttattttgatgttgttttctgtatggaaaatgagataattcaacatctttttatggattgtcattatgcaaagtttatatggagagcagttcagttatcttttataccttcctattagcatatctcatattttttatgggcggctgttggggtgaacaataaaaagagtaaacttatattagtgggagcttatgcaatatgttgggctttgtggttgagtaggaatgatatggtttctgacaaatcatcatctattttatatatgcagataattttcagggcaacatatttgctctggttttgggcacaactacaaaggtgtgatgaactcgaagagttcttaaaagttgcacgtcgtaagcttgagacaacggttatgcaacttttgccaattatagatggagattcacaaatagacttcaataatgtgttctccttatcttatattggttaatttttatatttgtgtggtgtttttttttcttatttgaactaaactcattttagagtgttagattgtaacaataaactgtaactctcctgagcagaggccaggacgttatattccattattaaaaaaaaatagatctcaccctctttagaatttattataaccccgtcacgattggatagaaattaagtaatccggctagggctgagaatactcgttagtacaaacagatctcaaagatggtctgaattttagtgagtactctacatgatacattcaaagtcgctcgtaagaataaggtgcgcgcgtgttacgagagtttctttttctcgcctgtctttggaaaaaaaaagttcacccgtatatattctttccgacctgggccctgcaaaattccttcgaagcccacacaacaaaatacgacaacagtcgggccactccgcgagttgggcctagcagcccaacctcttctccgccccactgccggtcgccgcctctcgccgtctcgcgtcgcgcgagctctgcctctgctccggcctccacgccccatcgccgccgccgccgccgccagcctcgttttgcgccaccgccatcaagaatcggtgacacagatgctgtttcctacggagtttgaactttgaaggcgccagccaaccatgctcccttc

SEQ ID NO: 9307 - DNA, 10322 bp, Oryza sativa
cctcccagcaccgtcgccatagccatccctgccccctaaacagttgtcgtcgtcgccgccttccgcctccttacgccgactcccgccgccccgcgccctccgcctccctcctcccagcgccaccgtcatcgccgtcgccgccttccgcctccccacgctgactcccactgccccgcgcatgccgcctccctgcgccgcctccctcctcccagcgccgccgtcatcgccgtcgccgccttctgcctccccacgccgactcccgccgccccgcgcctgccgcctccccgcgccgcctccctcctcccagcgccgccgccatcgccatccctgctccccaaaccgttgtcaccgtcgccgccttccgcctccccgtgccgcctcccgccgccccacgcctgcagcctccccgcgccgcctcccgccgcccagcgccgccttccgcctcctcgtgccgcctctccgctacgccatgcgtcggccgcctcgacgggaaggaaggggaaaaagaagtaaagagagaggaagggggagagagagagaggaagaagaggggggtgaggctgacacgtgggtccgattttatttcggagaggattaatagagagtctgttggagtgagtatctagtttgactagctaaattagatggaaagttggctatatgggtgtttggagaattcgatttggagatgctgttggagatgctcttagagcatcaccaacaacctctccatcccactctccaagccaaattttagacattctagttaaaaatcatgctccaacagcctttccaaccggatgctggccaaaaccctccctccactagccaaatttggccactctatttggctggccaatggcgggccccacacaacccatctcctccatccctagttccccacaccacaaccgcaaggaaggagcacgaggaggaggcgctcgccacaaccgccgccccgctcgccgccgccgccggcccccgcgcggcgcggccgctgtcccgcgcccacggtgcggccaccggcctccgctcgccgtggccgcccgcccctgctcgccgcggccgccgtccccccgcgtggcgcggcccgccgtcacccgctcgccgcggccgctggcccccgctcgccgcggccgcggccgccgtccgccgcacgccgcacccaccgcctccgctcactcccagcttgtcggcgccgcctgcttccaaccaacgcgagaaaaaagagaaagaggggaaggaaggggagaaagaagaagggaggggctgacatatgggtcctgatgtcatagagtcaaagtagaaagggtagatagagaggctgttggagtgaacaactagtttgactagccaaatcaaatggagagttggctatatgagtgtttggagagttagatttggagaggctgttggagatgctcttagaaaatactacaaatcggtagcctgtggattggacgaacccctgtcactgtaacagtgacatacatgcctagccgttttttttttcattctttcctcatctctttaaatattttttctcctaaattatttatccgatctatgaaccgatcacaccgttgtattcgttgcaattaaatctttacaataagatatcacatgattatattatgtcaaaagaaaaacatgtgtttcaaaccgttataacaaaatgtttcatacgtgatgaagcatctaggcccccggtgttaattttggtaattcatgacaagcactaattgtggactaactgttgtctttgagctatatattttaagttaggttcacatcatgtgtgcgcatggatgattatcgatgaattaaaattgacggcacaaagcaaaaggaagagaagacgataaactagtgttttcatttttaattgatcgatgcgttgggcgatcaaaattatggtagtttatttatagctttgccgtactattaagaggggaatgacctagcaaagagatgattttaattgccacattaggtcattatgcattaagacgtgtgctcgcatttagactccccatatttcaatttacgtattcactgtgtggcctgaccagagccggtctgaccatggcctaatggctagtctgaccggcctatgcagccggcctgaccgcagggtcactaccggtctgaccgctgccacatagccggtctaaccggcaggtgttgcccggtctgaccggccggtcatatggccgggatggcatgctctgggatggccaatcccgagccgccggagccgtattcggtcagaccgagctggtggcggtctaaccgagccgaggccggtctgaccggccaccccatgtcggtctgaccagtcgaggcagtggggcccaatgacaaccctacaacggctagttttagagcacggtctgaccggccacatacctcccgtcagactggcagagcactgagttgggggatttcgcccccaacggctagttttggttggtgggagtataaatactccccctccagcagcaaggggactctcttggcacccaattcaattgtatacactccttgcacctctctcacacacctttgagcttagtgttcatccattgtagtgattgaggttgttctagccaagagtcaagtgcattgtttccatttgtagagctagtgtggcactcgattaatcatctccacgccgggtcattgtttgttactcttggagattgccgcctcctagacggcttgtgaaggagttgctcggtgacctctccgagaagattgtgaaggaggcccggtgccggtttgtgagtggtttggagttcaccaccttcggagtgaagaaagaactaccccgagtgatcgaggcttgggtagtcctctccgtgggccggctcccgccttgctcaccccttgagaagggggcgtgcggtggcttcgtggttgagcggtggagttgggctcgcctcaacggggagtaggaaaccggcgagtttccgaacctcggtgaaaaatttctggtctcctttttctcatttgattgtctcatttacatttgtgcaatttacatttctagagactttcttgagatcatatcaccctaggattgctaaacattgatataggagtgtaatttactttactagagatataattgagccactatcaccctaggtttgcaaaacataacttagttgcttagttagagttgaccctcaccgagcctaccatcttaggttagttttgattaggtgtcatttaattttaaatcgcctattcaccccccctctagtcgacatctcgatcctacacgtgatagtgatatgtttcaatatgtgtcttcagtgtgtttcacaaaattcctgaaactacctattactactctctctacctcatccatgcatacatatatgtattttagcaagtttcaaaatgatttttctcttaaattacttatccaatctatgatctgatcacattgttgtattcgttataattaaaagataaacgcatgtttcaatccgttaatatttattgtttcatatgtgacaacgacatgtttcaacgtgtatcttcaccatatttcataaaatatataaatgtttcagttgctgattttttttgtttcaccatatataacttaacgtttcacttgttggtcaactgcaacatttgaccgtcagatatttttcgaggcatcggacatccgatggatagattcctccggcaaaactcttctcatctatcccttcaggtcctatttggtagagctccaactcctaaatttagctttaggaattgggtttggagtaaagttgtgaagctgcctaaacccagctccacatctctagttcattttgtgaaaaagctccactcaactctgcttccattttaggtggagctgaaactgtttggctgagctctaactctaggagaggtggagctggagctggagctggagctgtaccaaacagaccctcaatatatgcatatgagattcactcatatttcccatatgcatacattaagggagagtttttctcacttcttctcattcaaaattaaatttatactcattaagaggaagcgattttgacatcctatcacaccaagcctacgcaccaaaggtttacgcgtacagacattgttgtggtttgcgagacgtgcgtagagtcgtgaaaggtttgcgcgtgcgtgtgactcgcgcacgtaaacacatcgagcctatgaatctatgggtctttcaaacatgaacatatcaattcctaccgtgcttcgcgaggggcataaatggaaagcgagctcaacccatcaaggtccatgtcgctaacatatgtaaacgattttgttcatagtgcgtgcatgcagaagtggggggcccatcccacaaggtggtcttatcgctgtccctccaaacaaaacgaccagatgtgacgggctcatgtaccagctgacatgtggaacaggggatgcaagtttcaatttaactgtccataggcccaactgtcagtcaccgcacgtgtcccgccacattgcttcaccgccaagtctaagcaccgggccctttggtgcatggcaaagttgctttaacaaaagaatttcacttttccaacttttaactctctcattttatatagaaaaatggctttaccaaatcattaattcatttccaagttctttttcccttactccaacacctaattctagctatctatctagtatagattcatcgttaaaagtagtcatatattatatcatattccatactacttagagcaagtacaataaaattttagctagcgatagtgcatccacgctgacgttatcgatgaccaggataggagagagggtatgagccggcgactaattagtcgccgactgcacacgagatccaaggcgaaagaaacaatagaaaagagcaggacgaagcgatggcgacgggagcaggctgtgacgcgacatgccaaattaaaaaaaatgatatattaatccattgaagcttgtgcttatagccggctgctgtatgtatctagctttttgctgtctccactgctgacgtattcctttttaccaccaccagccatctgttgatgtaaaaacacgaggcctgggagatctgcttaactccagtgcaggtccaaagcttgcttttagatgtatgagcgtgccagttgatttgatcctgcaatcaacaagaaataaagacagagaaaccacggttaaatccataaacgatagtcgatcggctagttgccgatgttgtatcatttatctttgagccgatgtcatatttagatcgatcggcggtcatgaataagtaagaaagagctaaatctactcgatcggctgtagatattaacaatatataatccttatgtcgatatatacttaaatcaagtgattgggatagattggtcaccatgccgagacagtataaatcacttagatcgaaatatatactaacaacgagactatatatgttcatactatagccgatcaaatagatctagcatgtatcggctaatactccgataccactctatattaagatattaaagcaagtagaatatatcaaatgaaagccaaatatacttaaatgcgacaagatcttaacataaagggcagatttaacatgtcaatcgagcatataagataaatatagttaaatcagataagatcggctgaaaccccgatactaccctaatcggcaaccaaaagcaggctagagattgagactctaatcacgacttataaggtcaaactcaactgatgcagctataagtatgaaaagaaggacaatatctagacaatcaagccgttggatgttttatagagtggtagatatcctatgtaatctaagtcaatgtcggtatttaacctaatcggctgtcttctagtaacagacgttagccgattgacggttagataacaatattgccagagattacataagatatatgataactcgaattacataaacaagattagagtatcataaagatggaagcactaatcccgagaacgcaagccgccataacaagttttacctctagttgaagatcgaaatcgatgcagctcaacccaaaagtaagaactcgtcgaaacagaacgaaagtaaaaagggtggcgatgcgccgagattgtattgaacgtgtgttagattgattacatggggctcagggtctatttatacccgagattacaaaatacgtccatgtcggacacgactcgcatttctaacaaactctaagataccataagtctttgcggcagattttgcccaaacatatctctaaggaaatcttatattatattatatattaaaagtccattaaacttcctacaaacgctcctaaaccgccatgtggtatcctataaatactcctaaaccgccatgtggcactcaacaaataaccattgatttttttttaaatttggtggacccattacaaccattagatttatctttttaaaaaaatccacctcctaaatcgatccagccccaccaagcatctaggtcgtaagtacgttaaatatgtataggtacgtacgtatatgtataagttacgtaccttctcttccttcgattccttccgtattccaccaattcctttttaaagcaaaagtttatattaacaaaattaagtaacaacaatatctaaatcatacaactaactttttacccgcgatgtctttgtgctcctagaccactgtggcattctacaatcccattatcgattttcatttaaatcgatggacccgttattttacaccatcaaattatatctatttaaaaagtatatgctttctatactcgagataatccgtttaccgaaaatatttatgtacgtacgttgaataagaaagatatacatttaggtaatgtttattcgaagagaaaaaacaaagaacatagtacatacgataaaaaaaactgtaaaagcaaaaacaaacattaatatactgttcgcctagaaaaaacaatggatatttatcatctacacacgattaaagctctaaaggaaaatatatatatacaacgttatataaccattgaggccttttaaaataggatcttatatactataaaaataaaatttattactcttacaaacatggtcatttgctgcttctactagcgctcttaaaccgccatgtgacactatttaatttcaccatcgatttccatttaaattaatgtaccccgcattttatacctttacattacattacctcgcttccttttaatctcctttttatccgagtgaagctgtttaccggatgtttgaaaaaaaaaactaaagtaacatacgtacataccattaaaatgcatatatatatgttcgtacaaccatcaaaaaaaatatagacagttctcaagataggattttctacactgtaaaaccaaatttattactctagaaatatgcaagttaaactagatcaatataaatatcaaataaatatatttaaacacccattttttaattatttttaaatttataagatgaaattataatccattgtattcaaatgttgatgacttatcatagttatattatgatgctaaatacattacaacacatggagataatatataataattaatattataataattttcaaataatttaggtgacatataataattaatttcatcataatctttgaataatttcacatcatattttgtggtgtcaaatatcacttggcaaatatatagtacactaactgaaatctacatgtgtgaaagcgaaacaacattatgttttgtcaattatatatgatttaattttaatttatggagactaagattctcaaatgttttgtttcagatttttcaaaactatttcattggtatttctaggcaataattttgctataatacgaccccttaatccatacctttttccatattggtttggtaaaaaacgaaaaatcatataacatgtgcattaaactactcatgataatatattttttttatagtcgagtaactctaatatatcgggcataagtgataattgatagatgtatgctatatacactccaccgacgtgactgcaagtgccctccaacaaattagttattgtaaataattttgataaataaataaattttaaaaatagtaaaggtgtatgatgcaattacgaacaataagtgacaaaaacaaactagaagctaaaatataaatcttagtcaaaatataaacaatgatatgatgatatgatacattgaagatgattacggtcatatatctatttagcgatacattttttaatgatcaacctcactcatttcaaaagagaatattgtatctataccataaaaatttgggcagtactgattaataccataaacaaattatgactacacaaaacatgaaaacaactattttttatgtgaagaattattttcattacatccatttattcttgctttctctaaagggcattgagcagcttttacaagtataggaggggcatacatatggttgagtcgaggtagccccagtggagaccaccgttgacaatagtgctcaacttcctacttactaatgcaatcgtctttgagggtgttgatagtgaattaagccttaaaattacattatacgctagccttgagaggcacgagtatgtcgatacagaacccatgtttcaaggcaacaaagaaaaaaaagagttggtagctccacctgttagagacgacattcatatctaattggtaacggtgatatcccattaaccaatagaagcatcattttaagaatattatttatagatttagaaataagtgttgacataaacaatgttatgtagtggagacaaatgtgttatgtattaataatgtattaggtttattttggtggtgaagatgcaatttcatttattaaaaaggcatctagcgacaatgataataagtaatggtgacaataggcgagtttacataatttggacaaaagtgattttttaatataagaaacattcgtttcgtttatattaaagtatgtagtatatttcacggcatagatttttgttattatgaggtaaaatatacaatttcttatatgcatatggtgagacatgatttaattctccaaacacataataaataagatgcccacgcatctgcgcgggcttccttcctaattacatgaaatatcctaattaatatatacaattatcttctcaggactctatacatacatggcaatccttatgaagcacattaactcaacccgacaacatatgtcgtgtcatattatcggattcggctcaatcagctaaccttgtccaacttggactctgtcgatcctggtcgcagccgattcggactttagtccattcttactctgtttgcggaacgatctccatcttgaattctgcttcgactttatcaccatctccgatactcagattaccaaatttggttgttaacaccatcgtcattattaatcttgctcttagtccaattatgatgataattaatgatgtaccctatcctactatattgatgttcatttgtccagaggtgcaacgcattgttctctgtgtcgcgaagtaaaagtctaatcaatgcctgcaccctacaacattgcaactcatttgattagacagtggagtgttgcgacgcatcaagcttgattcgatctgggaggttgggcaccagcactagtaataatatggttgtttttcctgatcttattgttgtggaagcttctctctcctactccacacacgcagtaatttatactcctatattgccacgtacgcatgccaaaaatttaagggagaacgtcccagaatgaaatactctgaagagaactactcccgcttcttatgtcagcttaactggctaggagtagaaaattactcctactccaataggagtactttagttgcgggaggtgaattgtgatttgtcaaatcagtaaaatcgtgattattcgaatcaaaattactcacatcagcctacaccaaatcacaatcgactataatacagtcaaaaacccaaacaacgtactatacccacagcgactattgcgtaaatgacgatgtgctcgattcggcaccaatatatacgaaccgatgtcacgtaacccatgaacctctcgatatgaacagtgctagcggcaatagggtacgtaaccatagggcaatcatgcgatacacatgatgtaaaataaagtacgataaatacactaccaattcatcttcaaggttaagatttaactaaaatccaaatttggcttataagcaaaagcataattaccatggttgagcctatcatacaatgtattttaaattagagtagtagtagtacaaaagagaagggatatcatcgag

SEQ ID NO: 9308 - DNA, 4728 bp, Oryza sativa
  unsure (1)..(4728): unsure at all n locations
agcgatactaaatgaagaccgctttcttggccccagaggatggagcatgtctgaagtctcaggaaatggacaaaccaagtcactgaagggtcagattgtagggctcatctatgccacacagttcttgaggatgccgttgatagcgcttaatgttcttatcattgttgtgaagttggtatctggctgagactgcaggtttcagttctggggtttgatttaatttctgttacagcgtaatgtaaaagtaatcacagtaaagattgctgcagttatgttaatttgtctctaatgtatgctgttactgttctagtaaattaattctgagccgcaaactgtttctttggcacataaaccatgagagtatgtggtctggcgatgtgttgtgagggctccttttccttatttctgttctgaatcaatcacacatttgtttgcttgttggtgtgtgttatgctcaggggttatctgacattcagattttcagccttcaggtgccgtttttaatggaaatattacctactatggtcatgccttatgtccggccttaattgagtattatctttgccaattgtatacatgattcccagagatgtatttttatccaccctcttatattatgtagtttattttgaggaatgttttgtagtatatggccatgctcaattagctttaacattgatcaatgatatcactgccatctgttattaactcatcatggacttgtttaacttttagataactagcaaatatgcctatgcgttgtaaccggtgaatataaaacaaatacagatggttaagattgcatgtgtacttataagttataacacatgttcacaaaatctcgaatttgtacatatctcgcaaatacaaaagttactgcaattttatcttaaaataatagctcaaagtgattaaaaattaattctgtaaataataaatggtatttttggcaataaagggaaatgaataaggcccgaaacctggcggtggcccaaaacagtgtacgccagtatgataattcacgaggcttggtcggcgcggctcgttaagcgaggacgcccttcatcgcgcacggaggcacgtgtggcccgtaacgcgtgcaggcagtcgagtaggccacgggcgagcgcgatggcctagacacgagcgaacgtgcgcgtaggcctattagcctgtgtcgttggattgtaatcaacggccaggattgcttgcggcagtgtgagtaagcacgattgatgagtttatacatgacactaatttattcagctcatgtcattttgaatataaatgatatttttttccagtggaataataattgatcatctagggaaaatgttgagttctgctgattgcatatgttgagttgttgcttctagggaaaatctacttgttgtcaaaatcataaaattctacaagagaaaatgatataaaatacgttagtactgtattcttttatcttttttatattcaagtaattgcatggtattntaccntgnacnaatcctttagcggtgtttgaagaggtttctgaattcttgtagtcctccatgcattggtagaaagtttttaaactattttctgattattcttttaatattttttgcataataatacatacattattgccttgcaatccaatgcaacgagtttggcctacatgttgcatcatattgtgtagctgagtcccccccccccctccctgcccccggaaatgttcatattagtagtacatatttttgaatttagttacactagcgaataagttttttttttctttacaagccttacgtccgaatttagtaagccatatttgtcagggttatggataacacatacccaataatagtcgactaagtttggcggggcctacaatatacaagtcttatacggaatcatatctcgtatatagaaggagttccagatagagaaggacaagtagagttctacatgaaaactataagtactattcggatcatatctatatttgtctttctaattctacttggacaaggaaacatttatacaagaccccctaggaggagggggagggagataagccagcacagaccaacacgctcagtcagaatagacaccaatacgtgttgccagatatcgacatgagagattagcctagacatacccaatcaggcgcctacagaggccgacgagggatctagcgttatctctgatttcgccgagtacgtattcaaggaggaagactaccccgtcgttgactacgtgttagtgttccatgtcgtcaagtcgacgacgactagataggttatcccaaatattgtacctgtgtgattctaatgaataagagcaacaccggcttcgaccagtaggagtagggcttttaactgccagttaagggcccgaatatgtataaaaatccttgtccctgtctattttacctctatatcgcacgtactccggtaccaacgatcctataccatgtaaataccgtagttatgatctaaaacatcgacaatattcatcatatagcatttgtccaccataagaataagatccttgtaataccgtagttcctgaaatatcatatgaactcaattagtagagcaaatccctgtctcctgcaattgaaaatgaaataatagcctatcaataagtatacgaagagaaagagaaagagagagaagaggaagaagaggaagaagaggggataacatgtggaccccacataatcagtgggtcctacaatttttctttgtgtgaatgaaaaatggatcccatatatatttttttaattctaataccacctaaacaccacatcaacgccacgtgggacaaaaaaaacaagtcaacaccaccatgcaatctccatgctagccaaaacactcaccaaaactaccgaggaaatcaaattacaccgatttcaatagttcggggtcgagatatgtggtaatgtggttcatggatacgaatcggacccactagttaagggagcaaaagtggacctggtgttggcccagtgaattttatgtcttgtggatggcccattaaatcccgtccattcgttcgttttgatcctacggctggatgatgtgaaaccctaggaagaaaatccgtcgaaagataaaaagtggagcagtcgagtgtcttccccttcctacattccctcggcgtgaaagaaagagagaaatcttccccatctcgtcgtctcctccgctccttgcgcccaagacgagccgcggctgagcaggggaggggcgcgccgatctccatccggcgagcagagcagggtaggggatcctggtgagcacccacatcctcctcctgatccatctctccccctcccaccgggacttaacttttgtctggaatttgcttgcgttcgttaaccctagatctggaagaagctcttctcttaatttcagagccttaacctgtatagcagtttgtttgttcgttcccccatgtcccaagttggatccgcccttgcttttaggaattctcatggtcaaatctcgtcggatcgaacgattctaaggcttggaaagtcatttgatagtactgatttttaatttgctagtaatgggagtttgggggaacacaaatgcttgtgtgtgtattttgcgtctattatctgtgtgtcagctcggtcatgtgatgttgggtggatgattcatatactcaggctcaggctgttgcagttcatccaacttggattgttgtgcctcgtgtagttttttcagttaatactgttgtacttcatgctgctaggatgtgttaaacatgttgcgattgcattggttaccatctattggttagattttactatcattaattattgttgtgattgttatgaaacttatgactgttcatcgaatgtagaactctgcaaaagacttgtgtctcctatatttcatagtatgctgaattagccagtccagtatttagagagtgatctatcattgtgtaaatgaatcttgtagtagttgtactggtacattgcgtttcatcgtgctaatacaaccatttcccagttactactgcaatggtttgccatctgaaattgtttttgccaattgctatcgtgttccttatttgctatccttccttttgtattcatttattccatgatgtcatcaatctgctaggctgagtttatttatggcattgtttactatgccaagtgtgcacttttgatgttggccagcaaaatcccagttttatttgcttatgcatggttacttctttactcatagttatgtcgcacttacgagcttctgttttctatttttcctgagtgatagtctccttgtctatttagctatggttacacttttgatggatacggttatgctatttgttaggtccatagagtttctcagtggtgaaaggtttgatattacagtagtaagcagttgagctagatgtcacattaatccagtatatgctgaatgcgacaaatgtgtaatacgtgcttcagttgtataatggtacggactgtttgttcagtgtgtctgatatattagagctttcagtatgctttgtggttttcaacttttgctggcatcgtaatgttcactatcccaatattttatacaggatcatgcaagtaaaataaaaatagatagattgtttactttgtcgatggagtgaatatttatgtgattaagtgatttatagtatttgtttgaactttggtatcatatatgcatcagatatgttgtatattgtatattttacttgcatttgaattat

SEQ ID NO: 9309 - DNA, 22483 bp, Oryza sativa
cgccttcgtcctccctctcggcatctctcccgtgcagcgagttggtgtgggcacaggagccgcagcggcggctcctcggcgcggtggtggcgcggcagctccactgcacatgcagcggcggcgccgcggctcctcggtgcagtggcggctccttggctaggccgtgcctcctcggcctcgtcgtcgctgcctgctcagtggctccccggcgcagcggctcccccatggctcgggacctccacgacggtgaggtggcgaggaggaagttgggtgaggagcagcagaagcctcccgctcacccctccttcctcctctgtgatgttggattatctcctatcctggaattttttttttagctgatttcgattggattgggttagatttgtgatgatttgggattggtcgtgggatcttcagagcggatgaatcagagggaggaggtgcgcaatgcatggactaagacggatttgtgcggtttttattattcttctcgttcgatttcgcttcctctacgttctatgtttggttagattttgtattcgattgaatttgtgtaatatcgatgtgtggcgcgtgtgggaacggagggctcgattccgattgggattgtgggggtgggggtgggggggaggggattgcgatggacggatgaaaaggcgaacgttcgaggtgacgaacggaaaaatccaaatcttttaattagttaagatttaggttacatgcaagagggttggaaacactttacctttttctagaatataaatagaatagtatatactcctatatcgtatcaatagtaggatattaaaagtttcattattaggctctgttcgtttcctggagttcccaactcccccatctcattttccgcgcgcacgcttttcaaactgctaaacggtgtgttttttgcaaaaagtttatatacgaaagttgcttaaaaaattatattgatccatttttgaaaaaaaaattagcaaataattaattaatcacgtgctaatggactgcttcgttttccgtaccggagggatgggttcccaactcaaccaaaagaacagagccttagtgtttttcacgtattttggtaaaataataggacgccctgtaccaccctatccttcaaatctgtattagcgcactctgcataataattgaggccatatttctcatagtagcttgcttatatgaaagggtacctggaggtaaatctatatagaattttcatgtagtggcggagccaaaaataagatttttgagcccagacaaactttaatataactagtatttgagataaaaatttcaacgtcaatttacttatcaatctaaagttgtgttctcaccaacgagcctgggcggccacccggactagccactgttttcatgtgggataaacactcggacctaacggtttaaaccggaaccggaacataaattaacatgctgaggtattacacgtcccttgaacagatcaaagttatatgtacatgcaccatttaaatacgtactggttttcaaatacatagcttcctaaaatccgtagtcaaaccttaaaatcttgaaacattaatatgcaaaatccattatactgaatggtcttaatagatttatcatgaaaaatgataaggactaaattaaacctgtccattaaagatgtgtccttgcgaaagggcctgtagcctagtggttacaagagcctcagtagcacctgaggtcctgagttcgactcctcctgggagcgaattttccaggatttaacggcgttgtgctttcagtggtaggcgacgtacccgtcgacagcgaggcgcctgtggtgacttcgtcaatctctccaggatttgccggcccagtcttcgaagatgctcgtaagggtagagtttgcgtgcgtagagtttgcgtgcgtgcgttcataggggtgagtgcgtgtgcgttgtgagtgtctgcgttgtactgtgtaattctcaaaaaaaaagatgtgtccttgtctaaaagaccatatctttacctattataaaagtttaaaatgtttttgtctacttttgcacgtcgttccagtccgattccggttttttcatccggctttccagagtctgtcgcgagcacgtacgcatagccgtccgaccgccggccaatctagcatcactagccgatctcctcaatcggagcttcccttcctattccctctcaccaccagctccgccttgctgagaagaacctatttctctacgtttcccctccatctgccgccaccatgaaccacaccggagcctcctctctctcctcgggacagagcttttgccgaccgcgttcccaacttctccctcaatttcactgtttgccgccaccttcccagggtacacagcgagtgggaacacgttttgcctccgacgtcgccgcctcctggctacaggagcgccgccgccctgctcgcctcccctctccctcctctcgcctctctgaaagaagaaagaagaacggagggaggaaggagcagagaacgagagataaaaaaaaatactgacaggtgggtctctggacagtgcattttttctaaatttcatccgtcttttttttcgccgtttttccttcttcttttttttccatttttcttttttttctccgtttgttttttttcctttctttctgttcgcttttttttatccgtctatttttttctttctttctgtctttttttcgccctttttcttttttttcttattttctgtttgtcgtccatctatctttttcgctgttattttatcggtcttttttcacttctttttctgtccacgttttttaaaactttttttcgtcgccttttttccgggttttttcatccgcttttttcttcgaccgaatttaacgggaggatcgattttggcatgtacggacatgagattatcttccggtggttgaagatggcaatcgactatgcgagttggatctatatcacgggggatcgctaactagcgattgattgtcccaggcaatcgtttttttcaccactttttcttttcttcaccatatagtttttttagtttatatatccaaagtttatacatatagggtttacacatcttttataggtcaaaagttgatataccgatttaaatttgaatttgaattcaaatacaattaaagatgaatttgaatctgatatataaacttttgacttataaattttaggtctacaaactttaggggtataaattttagatgtgtaaacttgatttattgaaatttgaatttgaatttaaatacgtttaaagatgaatttgaatctgatatataaacttttgacttataaattttaggtgtacaaactttaggtatataaattttagatgtgtaaacttgatatgtataaagttagtaaaacagaaaagtagagcggtgcaaaaaaaaatatcgcgtggggcaagggaaccgatcgcgccataggagtttcgtatagctccacttgtgagttgggtcaagaggcaggcttgtggattgggtcaagaggcaggccaaataaaacgatgtagcgggctcggctgagattgaaaagtaaggaatgaatgaatttttggttcaaaaccaaagagtaaaatgtacgataataaaaaaaaggatgaaataaacttttggtctaaaaccaaagaataaaatgtacaagtaatccaaaaatattttacccgtgcaacgtatgagcatgttttctagtactacattaatcttcaaaggagtggcacactggcacaatacacggacgattataatttctcagtaaaaaagaggccattccactccagtataatcttcaaatgagtggcacaattcaaacgcacccccatccttcattacggctccatttgctcaagaaacacgcgttcaaggtcaccggccatggcagctcgtacggatacgtcactacaccaccggcgtggtgcttgggctcatcgatcttcatggtggcgagctcgatggagatcacccgccgccgccgccgccgcttgtccacctccgccggcgccaggaggacgcgtcctgctccggcgtcggcgatcaccgcattattaccagcgatgatgaagctctccggcgccgtgtgcgccggtagctggaggcgcttctccatccaccactgctccctgcgacgggcgaagaccgaggggacgccgctcatcaaccaggcaatgcgcacgtcgccgtcggcgccggcgacgacccggaacgccgacgacgtgccgtcgtcgcgccgccgggcgcccttcatcgcctccggaagcgccacccgcgagaacgtgctgtaactgtaagtgtaacaactatgaacaagcatgcggtcgccgtcgtcgtccatccgccagtagaagccgcccgatgcacgccccacgaagtggacggactccgcgccggagatgtgcacgccggtggccctgcccgcgagacgccagcggctccaggggcggtcgcagggccagggccacctctcggagccgaagacgaacgccgtggcggtgccgaggtcggcggacacgccggcgtacccctcttagagggcgacgaacaccttgagagtgggcacgggcatccggctgcagacgtggtggtagtggtcgcggcgcaggaacgcgccgatgcagcggtggtgtttcatctcctccaggcgagggatcagccggtaccgccgcgtcaggggctcgcagacgacgaggtccgggaagcaatggcgcatccagccggacttcctcttggcgaggaggaggaggctgccgctgctgtcgacgagccgccatgaatcgctgtccgggaggaagccgagggagaagtggcggccgtcgacgcggggctggagggagggagaggccgacggaacgaagactgcgccgccgctgccgcgtccggggtagtagtagtggccgacgatggggttgcggccgcggcggtggaactcgaccgcacggcagggggagccgccgccggcgccgatgatgcggcgccaccgcttgcaggtggcggccgcgcggatgaaccagtgcggcgacgcgaggcggacgaggacgcgcgtgaggagagcgtcgtcgaggtcgtccacggtcgtcgcacggcggcgcagcggcctcctcgtggacgccgccgccatctcgcgacgccgcccctgacctcccgcgcgtggtacccggggggttttggtgcgctttgctgtaatttccattcagttacgcactgatcacggagtctttgttacaggattttttttgtggtttttagagagaaactgatcaaatttggatgaacgattcgattacaacgaaatttatttgaacctccgagcaatgaagattgaaggaacaaaatctgatatcgacaattggcatttctttcattgatgcaatggttaaacttagagtaaatttcacaaaactacagatactatgaccaaactatcacaaaactatagatttaaggagtggtatcacaaaactacacatttagcaccaaatttatcacaaaactacatatttaatatgaagtgtcacaaaactacatgtttagtaactaaattataatacaattataggtttagaaccaatttaatcacaaagtaataatgtttagagctccaccataaccatagtgcctagggatttaaactctaaaagttgtagttttgtgataagttcaatattaaatatgcatttttgtgatacttaacctaaaatctgtagttttgtgataaatttgatgctaaatgtgtagttttgtgatacaactccttaaatctgtagttttgtgataatttggttaaaatacctgtagttttgtgaaatttactcttaaacttaagattgcaatgatcagtactatgccttgggtggagaagtgcgttggatatctccatatttgcaggcatcgagttcagccttcgtttgaagtattattcggcatctgatcaacgagtgcgaagacgtcttgtggatcaggcaccaggatgtgatgtcttttcgtcgtttattccttgtcggcgtctggctactagacaggggtgaagccatttatagttaagagggtgtgggcagggcgaaaaagtcataagtaagagtaagcaatgctaacgataaaacaagacatcatgtgttctgccataaaaaaagcttgaatttagctctttagttgtatcatttgatatttgacagtttgagacttgagacaccatgctcgacagcgagacgcaatgggaggacggagagagtgtgaagccaaagcaatgaagacgaggagttgatttacgttgtctctccgtctctttcttattaattaattttctatatcatgtttattgataatggactaaaaaacatgctaatgtgctagttagtacagcagggaggatggtcggataggggggtgttggccccctccagcaccctccgtagctgcgcccctgctcctatagattacttgagagtttgctgccttaggaggtcctcgagaaaatgatgtcgtcagcaccttcctcttagattggttgagagaggtagtcgactgaggattgttctccgtcaacttagtcgatgctatctcgatctcagtggttgttgggtaaggagagatcggcacgactgcgtagatggggaagatgatgatccgacttgcattcatgtaaatgcatgttgccttggatctcccaagcttggacggttgcggatgttctcgtcagaaaatcttgagcttgaagccatcttgtccaaaccttttgcaccaaatcctactacttggcgcactactgtcgatgggttatatcgcaactacgatattcagaagtatcagggaacgatggtgctaaggtctatatgaaactgtatcaagcaaagaaggacaaagatttatattggttcagacccctcgtaagataatagccctaattttgtttacatgcgattatggatgagaattccaaaaaaaaattacaatgggaataaactaactaccctaatccgtcgtctaggatccgccgagaacagcttagcgagatctagtagacaaacacggcttcagcttccttcggtgtatctcaatgtggttggtggctacggcttataattcaatgatcctccctgagcaaggggtccttgtatttatagcatggactgtcttcttctctaagtagaactcggagagtcgcggttgaacacgagacgaaggagaccttatctcatccgagtaggactttgacacattctactcgcgaagataatttccttcctatcaccatatttccttactataatatcaccttgttgatgcgaaaaacacacactggcctggaagatctgcttaacttcagtacaggtccaaaaatcttacctttaggttcgtgagtgtgccaattgatttgatcctgcaatcaacaagaaataaagacagaaaaaaagtggttaaatccataaatgatagccgatcggccagtcgccgatgacatatcatttatctttgagccgatatcatatttgaatcgatcgacagttataaataggcaagaaagaactaaatctattcgatcggttgtagatattaacggtatataatacttctgtcgatatatacttaaatcaagtgattagaatagatcggtcgtcatgccaagatagtatgattcacttagatcgaaatatacattaacaaggagattataagcattcataacatagccaatcggatggattcagcatgtatcggctaatactccgatattactctatattaagatattaaaacaagcaaaaatatcaaaaaagaagcttaatatacctaaatgcaacaagatcttaacataaagggcagatttaacatatcaatcaagcatataggatataaagtagttaaatcaggtaagatcggctgaaaccccgatgaaaccctaatcggcaacaaaaagcaggctagagattgagattctaatcacgacttataaggtcaaactcaactgatgcagctataagtatgaaaagaatgacaatatctagacaatcaagccgttgaatgtttcatagggtggtggataccctatataatctaggtcaatgttaatatttaacctaatcggttgccttccagtaatagatgttagttgattgaggattaaataacaatattgccagagattgtataggatatatgataactcgacgatttacataaacaggattagagtgttataaagatggaagtactaatcccgagaacgcaagccgtcatgacaagtttacctctagttggagatcgaaacgatgcagctcaacccgaaagcaagaactcgtcgagatgaaatgaaagtaaaaagggtggcgatgcgctgagattgtattgaacgtgtgttatttgattacatgggtttgggtcatatttatacccgaaatacaaaatatgtccttgtcggacacgactcttatctctaacaaactcttaagataccataagtctttgcggcagacttttgcccaaacttatctctaaaaaaattacataaaatatcctaattaatatatacaattgccttttcaagacccaatccgtgcgtggcaatccatatgaagcacattaactcaacccgacgacgtgtaccgagtcacattgtcggaatcggctcaatcggctaccttgtctgactcgaactctgctgattctgatcagagctgattcagactttagccgattcttattctctttccggaacaatctatccctgggattccgcttcgattttatcttcatttccgatacttgaattaccaaatttggttgttaacacaccttcgtgtatatctgtaggtatatggcatccatatattaccacgaacccacgtataggagttatgccttatccatatcctgagaaataaaatgatgattcaaatgtaaaagtaaggtaatgtggtatttttgagccaagaaaaacaggaagataattttaacatagattaatcatctaaggactaaaaacaattcaggtgatatgatttaatgagagaagaaaaggtgagagataatttggatcatagattaaatatctaagggataaaaacaattgatgtgacatggcttaatgagagaagagataaataacattaaggaagtgaggataaactctataggtgtataagatactaaaaaaataatggagacatatattaaaatgttatatgacttatgtgggataatgatttaacatgcttttattttaaatctctaaaatttaataaattatagaattattgataatatagcatgctcgtatgttatttaagatgtaataattgttagtggcttatgatgtggcatctttacatgttaagctttagaatttagtaggttgtaaatttataataagatggaattggtacctgagtagagattatgcttgatgatccaatttttcatgaaaaaaataggtgaatagctaatacgccctgaagttccattataggatcagtttagtctctgaggtttcaaatcgtcccaacaagtttctaaaattaattgtttggcttaacatagtctttggacaaacaaaaacaccatataagcatgccacatcatcctcgcatgcaagggcaatgatgaaaatgagcattctacgttggtgttgccctgtgccgcggcaatgcgacttaactggagctatcgtcgtgcaatgttgcgatgacgcggccatcgcttgccagtgcccaaaccctagatggagaaaacaaaccgcgaatgggtaataacgggccgagtttatttctgttgtctcttttttttcatttactttttccattttatttccttttaatatggtatataagggtagaatggtcatttcaaccatatccttgcatgcgaggatgttatggcatgcttatgtggtatttatttttgggtttaaggactatattaagctgaataattaattttgaggtcttgtttagattatttgaaacctcatagactaaggctcagttagtgtcttctatagataaagattaaaagcgagtatgcaaaacgagaaaaccattaacgcataattaattaagttttaattattataaacttgaaaaatgaatttatctgatattttaaagcaacttatatatagaaggttttcgcataaaatgcactgtttagcagtttgaaaagcgtgttaacggaaaacgaggaaaaatatgtatcttacaaagttagaaagggcctaaactgatcttggactgaattgactattaaaaaaataatccctaaaatagattagttctcgttctgttatgcatagaggtgcccttgtaagattcaatgttgcaaaaagcagaacatttctgaaatatccactaaaaaaatctgaaatcgggaattttcaccatatatcgtgtagaaattttgaacatttttttctatatgattaaaatcatatatttttggttaaggaaatggggaagtatgtggagtaactttgataaccacaaattccgtctcctcagtgaggaaaaactaaaaaaaaaagagagacaaagtcgcatgtataaagtcttctttctctgttttaacttgtataggtgaatttaaatatggatgtttactataagtgatgtacctcatcctccttccgttgtaaaataatttacaacaggtactattaattttctcacttaaaccactcgttttttatttcaaagctttccaacactaaaaaaggtgttgtacttttaaagtgtaatgtcataaatataagcatatattttttttcaatttagtgtaacaatctaagacgaaatagtggttaaaatagcaaagttaaagctgttagttattttaaaatggagggagtaattatctaccatttctgtttcaaaaactatacaaaatagtacttctccatccacaaaagttacacatatttcatattttgagtttttccaaataagttgtttctatttgtagtctttatgtattcaaacttaagagataaattaagtgttttattagaactcaaatagtcatctaaatactcattggttacatgtatgtattcacttattgattttgtaatatctaaggtgatttaatttttttcttaatcttagtgtcaaaagtaatatatgtaactttcgtggatggagggagtacgtgacatggaaataacgagtgtatttaagggaatcaccttgatactaatatatacccgtggaattaatttaccgtgtgctatctatctatctatctatctatctatctatctattatatactaaaagtccataaaacttcctacaaacgctcataagtcgccacgtggcactcctacaaacgctcctaaaccgccgcatggcacttttaatctaaccgtcgattttcacttaaattggtggacccactattctagaccattagattagatctatttagaaaagtcccagcttcatcgaaattatttaccagaaaaattcaaaaattaatgtacacaccggatataaaccttccgtattgttctcttaaaaaaaccaaacacacgtgcgtacgtacaaagattaaaaaaaaatcaaaaaaccatatgtatgccgtaagaacaatacagtctttcgaatatagtgtagtacgtattgtgtatgcctttctctgtcttttatttatcaacgaacagcaagtacatacttaagacttatctatctatccacggtctttaaaataggatttcctatattataaaataaaatttattactctacaaatatgcacggttaaactagattaatataaagtaccaaatcaactgtatttaaatgtttatcttttaaattatttctcaaatatatatctaacttataatcctttgtctttctttaattaaataaaatactaatcacttataatagttatatggaactgctaaattcattacgacacatggtgccgacatataatacgtaatgtgataattatttttcaaataatttagctaacatataataactaatgtcatgatcatttttaaattaatttcacatgacaaaaatgatcaacttggtgtcaaattcgcttgacaaatatataacactaattcaaatctacatgtagaaaaagtgaaacaacattgtggtttacaatcagatttgattttattttaatttatgtgatattaagattctattttttttaaaaaaaatagaactatttgatgggaatttccaggcaatgaccttgctatattacgaccccttaatccatcaggagaattacggtcatatatggtttttctttgcgaaattggtttggtaacaaatgaaaaatcatttgcatcaaactattcatcatatattttttatagtttagaaattctaatatatcaaacataattgataatgtatgtcatacaccccactgaagtaactataaatgcactccaacaaattagttactttaaataattttggaaaatatattcttagaataagtaaagatgtcgcatgtaattatgaacaatacatgaatgaaaacaaaccgaagctaaactatatatcttattcaaaatataaagaacaatatggtactcctagatgtcacggttgtatgtctgtttagtttttttttatcaacattgctcatctgaaaagagaatattgtatctacacaataaaaaaaataagcattactgattaataccatgcataattttgtctacacaaaactttgaaaaaattcactagggaaatattttcatcacctacattccctctttttctcccataaagggcaccaagcatgctgtgctaccacaagtgtagcaagggtcatacatatggttgagttgaagccaccccagcaaaggccgctattgacaatactgcataactttgtacttactgatgcaataatatatgagggtgctaatagtgaactagacattaaaattacgcttcatgctggcattgcggggcacgactatgtcgactcaggacctatgtttaaaggcagtggagaaataaagcctcgacggatacggtcagcttcaaccattaaaggggacattcatatctgattttaacggtcatcaaaattaaaaaaaatcttataagttataagaaaaaaaatatgatcatcggtttacttaaattatttagaaaaaaaatagaaaaataaagtccccaaaacctcgtcctccccggcacatgcacaaaacattgctggtccccttcaaccttggctcatgctctccgctctccattcctcccccttcctatgaataatactgaaaagaccttatttttaatatatacataacatttctaatctaattgttgatctgttaaataattaaaccaacaattctttatccataatgcctataattttaatctaaaataagacttgtataaaataaaatagaaaagtagaaaaaaaaagtcaatagggattgaatcaaatcaattaaagagaatatagtaataaatttctaaaaaatagaaatgccataaccatccatctaacgtggtattatgagtttctcatatattattgcatatataagacatactaaggtagtcggacatagtagtacttagttggttaaaaagttatatatgtgctactatcaactttaaatttaggactcatggtgcctaggtattttttttaaaagaacaccataaatcacatatataaaagggaaaggacgcgtacaatatatatatctcctatgtatttattgtctcattctttcaagaaaataaagaagatcattgataattgcttatagtaatgaattaaatattatatagttcaaaccttacaaatatcttgtaaaaaaatatctaagcaatagcgatgaagaaaatttataaagaaatactccctccatcccaaattatatcaactataatcaaactcggtagcttttaactaataatcatactaactatatctaagtattatgcatgttacatcactagatttatattttgaagtacttttatgtaatgctaattttatatttgttgggatagaatggaataaagtactggtcaaaatatattattaaaacctatgtaaaaaaaatataggtcttgtaatttgagacagaaggagtcttttttttcaagcatatcaggtatcgtccgtttgatactccatcatccgattgatattcccagtgtaacctactttacatgcccgcgcgaatgcgcgggctacctttctagttattataaaagaatccacagagttttgattggcagttccgatgtaatccaaaagtcacctgcggactcacacgatactcgacatccccatcactcaatgaccgagacgaacatatacccgtcgacaaaattccaccgaaatttcacggaaccatctaaaaatcctgcgaatccaccacccaccgtctccgctccacgcgtggcacccggcgaaacaagagcaccagaacccacgattctgtcccatcttttcccctattttctccccccctccggcacctctacacctgtccaccccaccgcgaccccatcaaactccgcgatttcccacgcaacaccagcacacacaatgacacacacaactatacgtgtcaccacggccccgtttgccgccatcgtccgccgaggtcgcccgccgcgccgcttgaccgcgagaaaccccaacccccacggcgccctcgcacatcccgcgaatcccacgggaaaaaacccgcggttttcccccaccaccaccacgtcgatgcgtacgcatcgcgtacgtgccgtcccggcatgaaagctcgtcttttgctgggtcccttcccgcgctgtgtgtgtggaggacgcgcgcgtgtaatctgaggggagccacacgcgttaggtgggccgcttttgccggggcagagggcagcccaagagccaaccctccacggacccggagccccaacgtgtcaacgtgtcacgcgacgcgcgggaggtcaaacgaaagagacacgagtcgtcgtctcgacgtccacgccaatttccggcgctggccaatcgcggcgcggcacgcacccacccacgtcttccccaccatgcttttctaatccccaccaaaaatattaaacaaaaccgcagcaactttagattgaaaaaaacgttgattattcagacatcgaagactagttgttgttgtggagtagtagtaatactagtaaaagattattactaattgctcattcagagtacccgcaatggtaaaataatatgctatctatagaactacatctcagcaatagactagattaatagtaaaccacttcaatgatatgtctacatgggtatctatagctctctaatccattgtctctttttctctatagactatttccaggttaatagatagttttgctctctctcttcatttaatctcttctaagtaggaaaatatgctgacatggatctcttgtatagagcctataaataaccattgtgagtgcccttaacacaacttcgcttcgtcgaaccgaagtccaaccaaacaatttcaacttcatctaaaaaattaaagctagctaaaatactctcacaaaattaactagagagatgtacttaggtttaaacctacaatagaaagttataaatccacttaatacatagagaatatacaaaaaatataaagaatgatggttctcgtacaaaagctaacttaatacgtgctctaaaaccaatatattaatatataagtgagagagaaggatatgagatgataaattgaagctaaccttattgtaaatatattatatatacgttaactttaaaatatgctaatagctaacagtgagctgtactattaaactcgcttcttaaacagattcacaactttatttgaaacccaaatattagtaaaattaaatttagatgtctgagtctctaccgaacgagctccaagtccaacggagacacacacgttgcagtaagggtgggccccacgggcgtccggaccgtgcgtcgcgtgcgtcgccgtcgaacacggcacagcgacgcgcgtgtccaatggacggtcgccactgcattattccgggtgcgaatgcgattagattaggatttgatctcgcgattagattgggcgtgtactcgtggtagtagcattactactagtacgtggcgacgacgaatgacagcgatatatttttctttttctcttttgcgttggtggtagcttcgtcacgtgtccgggcctgggtgggtggtcgccgtttggtgtggacgcgaaggacacgtgtcgcgtggcggtgcgcggcggggaggcgggactcgtggacggcccggatgcggccgaacccaccacctgtcgcggcatcgacgactgatcgcgacgcgaggcgtcctttatattgcggccccgctttcgtctccgcctctctcattctctctctcgttgctcctgagatcgtctcgtctcgtggtggtggtggtggccattgccggagcttccaaggtgtttgatgtcgatggcggaggtgtgctgtgattctgcggtggtggtcggggcggaggcggaggcgagggcgagggcgcgcgccgggaggcggcggcgggcgggagttgagggggcagggaggtggaacgccacggcgacggctgcgggtgtggcggcggaggaggccgcgacgaggaagcggagggcgagtggtggtgaggccgggttggtggtggtggcgaagcggcacggggcggcgtcggtcgccgggaggaggagggagatggaggacgccgtgtcgctgcgcgaggcgttcgccgcgccggcgaacggggaggttgcggcggcgaggtgtgacttctacggggtgttcgacgggcacggctgctcgcacgtggcggacgcgtgcagggagcggatgcacgagctcgtcgcggaggagatgggcgccgggtcaccggcggcggcggcgcgcgagccggcgtcttggacggagacgatggagcggagcttcgcgaggatggacgccgaggtgatcgccggctgccgagccgagagcggcagctgccggtgcgaggggcagaagtgcgaccacgtggggtccaccgcggtggtggccgtcgtggaggagagccgcgtcgtcgtcgccaactgcggcgactcccgcgccgtgctctgccgcggcggcgcgcccgtgcagctatcctccgaccacaagcccgaccgccccgacgagctggagcggatcgaggcggccggcggccgcgtcatcttctgggagggcgcccgtgtcctcggcgtcctcgccatgtcgcgctccatcggcgacgcctacctgaagccctacgtcaccgccgtgccggaggtgacggtgaccggcaggtcggacttcgacgagtgcctcatcctcgccagcgacggcctctgggacgtcgtcagcaacgaggccgcgtgcgaggtggcgcagtcgtgcctccgccgcggcaggcagcggtggtgcgccgaggcggcggcggtgctgaccaagctggccctcgctcgccgcagctccgacaacatctctgtcgtcgtcgtcgatctccggcgaggcaacgccttgtagagagagtgtcacccagctgatgctgtagcatcagtactagtattgcagatattagctaagctaatggttctactaatctttttttttcatttcccttgtgttaaaaatcattttttttctcttctaattttctccctgaattaaccaagttcagtggagcacatagatcaggtgatggggttgtgcaactgctagttggtgtaaccagaatttcatctggataccaactgaaatgaaatgaatattaagcaagattatttgagaaggaagtttaaaccatgggatttttgttaggcaaatcacctttttacttattgaattactgtttctgctgtggttcagactgtaccacttggggcctgttccctttggtgctattttcaaccttaccaaattttggtaaagttgccaaaaaaaatggctatatttagtttgctgtcaaattttggtaactatataagtaatcctgcgaaaacttgccatcctatagttgccaaaacttgccatcctaattaattactctgcatcttgcaatcatgcaatcttgatgatatgattgcacgatattttcctctgccgtcccggactcaaattcaattaaaataacatctctgaattgattggggatacaaaggacaaaataaaattccagggttcatcagagaagcaccaagggaacattatcctcaattttcaattatactactgtaatttctcatgtttatgtcagtgacaagattcagaacattccaaacgaaatttaacacatcagatatttttttctgtgcgcgattcgtctggaaggagaacatctactatagtatctaatacatcttcttcatcagtcagaaaatctcaaatcacacaccaacacttgcgcggtccagctaaccctgctctgtggctgcctgcctcctgtcccagcaagaagcaagattctctcatttttctctcacgagagatctgccaatgcacagctcaacgattctcagcaatctctcaactcccttttctaaagcgaaattagtactatcaagcatcaacataggctgatgtgattagaccagaaagggattacaaaattggccactccaaacatgctaacatgctgctaaccctgatttatggacgggtttgttgctccagcagacaaagaaaatcttttgcttagccactaataaagagagtttagagagtagggtagagattgcaagcaacattggtgaatgaagtgatttggtgaggctacgagggagatgtggtggcagacatgggggttagtcgccggaggtgtggcgtgtcgacacgtacgcagtatgtcgagaagatcgggcaggattgtgcaatctgcgggcagatcacagatccggttcaatcttcaccgtgtttattactctctctgtttctacatagttgataccgttgattttttacacatgtttaaccgttcgtcttattcaaattatttgtgaaatatgtaaaactatatgtatatatataagtatatttaacaatgaatcaaatgatagaaaaaaattaataattacttaaattttttgaataaggcgaatgttcaaacatatttaaaaaaattaacggcgtcaaatatttagaaacggatggagtaatttggtaaattttattatagcacatggtgagtggtgacttcgcacgaaaccatttttagggaacacactataaaaatatggttatttatcaggagacaattgattaaattaatggtaggggtaccacttttttacatgacttcactagattgctcattctttctctttatcttcctatcttcttcgttatctcttcccctctctccctcatttctctcttctccagcgagtttgtctacatgtggctggctagcggcactgctttccctccaccttgcaacctcacgcactgatcctactcggatcctctcctcctcactgatgcctctcctgtcctcgagcggttggttgatcgatcgatcagcacggttcttcgccagccatgacggcggcggcgatggcgccctcacctccgaagccggtgtccccgaggcagatcagcctgggggacctcagggcggtgtccatgctcggccgaagcgtcaagggcgtcgtattccacgttgtgcccaccatggcgggggaggtggaaggggttgtttcctcatccatggcactcaaggcgatctcgcgggagacggagcaacacaagaagatggggagcggcggcgaggacaggcaccggcggatctggttcgagtgggatgtgctcatgtcgctgagccacccgctgctcccttcactccgcggtgtcctcgccaccgatgtcgttgtcgggttggtcatcgaccgctacggcggaagagacctcaactcgctctgacgccgccagaccaagaagatggcttcaggccaagctggtggcggctaagaaccgccacgccacaacggtggccgagataccgccgctcaagtctaccgtcgagctgacgaatgacgccatcgtcgcgaggatggaggcggggaagaagcgggcggtggtggaggtgctccaccggcgcattgaccgcgagcgtgacgacccgcggcggctgcggtcagaggtcgcactggagcagatggtgctcgtccggcaccaggtcgctcacgcgctgcagttggccgagcgcgccgtggcggcggagacccacgggttggctttggcgtgatcagcggtcgccactaccgagcaggccgcgcgtgctctagtcagcgacgtcgatgttgatgtcgacgcggcccaccacaatgtcgtggcggtcccaacgcggaggccggaggagttgcgcgggggcgtggagggcgaggagagaacggccgagtttcacgtcgaggagattgtggccgccataaggttggccgaggcgcacgccaggaagcaggaagctgctgagcaatggcacggccgtgaccttgaagtcgtgatgttctgcaacaaaatttgcatattaatttttgtggctaaatcctgctcaatttgaatatgcgagcaaataaaagaagatcagaattcctgctgaatctgcaaagagcaaatcacaaaaatgttctacataaaatatgtagagtgagagcaatttttcaaaaaaaaagaaatacaaatccagctcactatgcggtgagcaaatcaaaaaaatgctcaaaaaaaatgcaaacttagagcagataggggaaaataatcgcaaatccccctcaatctgcagcgtgcgaataacgaaatattctcaaatctgcggagcaaatcaaaaaattataacgtgtaaaatcacaaatcctcctcaatctgaatattttgtaaaatcacaaatcccactcaatccgcaaaataatattttgtaaaatcacaaatcctagtcaatctgcagccaaaaatgatcttcaaaaatcgaatgcagccaaaaatgatctgagtcttcagcaaaataatattttgtaaaatcacaaatcctagtcaatctgcagccaaaaatgatcttcaaaaatcgaatattaattgtgtctgagcccagttaattcaaaaatcgaaaaattatatgtcaatctgcagccaaaaatgatcttcaaaaatcgaataatattttgtaaaatcacaaatcctagtcaatctgcagccaaaaatgatcttcaaaaatctgcagccaaaaatgatcttcaaaaatcgaaaaattatgtgtctgagcccaggttcgaactggggacctttagtgtgtgagactaacgtgataaccaactacaccacccagaccatgtgactgaaagtaaaagattattgtaattttgtaagaaaagttttgttgttctgtaagtaacaaatctatacaaagtttggtttgcacaaaatctacaaagtttcatactttttactattagtggcacgtcccaatcccaacacgagaaaatcattttctatgaaaaaagaagtcaattttactccctccaactatttgtcatgcccttaaccacctaaacaattctctctcattttacaccatgagctagtaaaaataattcatctcattgtcctacaacaattctctttctttttttctatttctacgtagtgacttcatcaatgttaagatatgccagctcagtctttggagatgcttacaggggtagaatgtgcgtgtacgcgttcatagaggtgagtatgcgtgtggtgtatggacgtttgcgttgtactgtgtttcaaaaaacaagaatatatcatgtgcacataggtttacgtgcacatttcacgcagagtaagcagcatgtcaaaaagattgggcaggattgctatccgtgagcaaaccttaaatcatgctcaatatgaatatgaaagagaattagaaaaaaaaaaacgaaatcctgctcaatctgcggagagcaaatcacaaaaatgctcaacacaagaaaatgcaaatggagagcaaataaaaaaatcgcaaatccttctcaatctgcatcgaacaaataaaaaaaacatccaacaaaattagcaagataccaaaaaattaacatccaacaaaactctaaaaataaaaatttagcaagtcaccagaaaattaaggcaaaatttgctacaggacactcacagattgtggcatttgctgtggacacccaaaaatcgtgtatttgcttgtggacactgtaaaaatatggtaattagctgttggacacttaaggcattattctattattttcggtgaaaacagagagagaaagagtgttgaaagtaccaaaatgcccctgacactgttcttctttcttttccctttcctgcctctgacacgggtcgcgttcttcgctgtaggtggcggcgccgtgtgggaggtgctgctcacgcggtgggaggggcgggacgaccaggtgctgctgtacggtctcctcccagcaggggtggaccacggcgagctcat

SEQ ID NO: 9310 - DNA, 2623 bp, Oryza sativa
aaccgtaaaaccagataccgagggtcccttaactatacaaaaccggtcagaataggtctcttggcggttttgatcccggttttgtcctacgtagctgctgagtcagcgtgggacccacgtgggccccacatgtcatcgtgccacgtcagcatactctctcttttcccctcttctcatctctctcactctatcttctcaggacggagggggaaggagcggaggccaccagcaagggcggcgtaggccaccggcgaagaagcagccgaggccatcggcgagggcggcgtaggcggaggtgaggctgcgcatggcgtcgggggcctcctagtagaggaactcgaggagggcgatgaggcagaagccctcggcgagaccgttggacaccgattgccggtgccgcacggcctctcactgccgtcctcccacgccgccaccgtcgccgggggaggagctgagcgcgaccgtcgggggaggagcagggtgcggccatcgggggcagagtagtgcgcagccggcgacatggagcttggcgcgggcggcatggttaccaggagaggagctgggtggcggcgggtgagggtgggcgcgggaggccgtcgccgcggttctcgccctctcccctgccccaccgtcttagggtcagagaggcccaggaggtgggagaaagaggaggacgtcggcgtcggcgggggcagcgccgttggagaaggggagggtgtcgccgcgcaggcgagctcgagggtgttgatggcgatgtcgtggccgtggttgagcttgatggcaccgtcgatggagccgccggcgtaggtctggcagaagctgtagaggccgtcgaagacgggctagtcctcgccgacattgaagcgcttgagcgcccgaatctggtcctactgggtctccggcacacccgccgcttcgccccgttgacgccggtcccgcctcgccccaccggcctcctcacatacactcgccttcctgccaccgtcgcagtgcccgggtctacgccagccatggcgaactgggcagagacggcgcggccgtcgacgacgacgacgtcgtcgcggcccacctcacggagcacgtggcgggcggtggcgcgggacccgcgccccactggcctcctccccctaacgtcggctagtctacgccaccctcgccagtggcctccgctccttcccccgccgccctgagaagagagagtgagagagatgagaagaggggaaaatagagagtaggctgatgtggcacgatgacatgtggggcccacgtgggtcccacgctgactcagcagctacgtaggacaaaaccgggatcaaaaccgccaagagacctattctgaccggttttgtatagttaagggaccctcggtatctggttttacggttcgaggacgttcttgtatcccgatttcaagttgagggaccttcggtgtacgttttcctttaagctacgatgggaggccggaggcccagttaattaagcacaacttggcatgggccagggcccgtttagcccaacacagaacatggataaatacaccacccattcgccaaagagcaaggtaggcaaggcacgcgagccctagccgccagccgactcgaccagcgcccggaggcggagcacccgccgccgccgccctcgccatcgtcggcttcacccctcatcggcaacctagtgcaggtgagctccatctccacccctcctcatctcctctcctccccacaccatctttcctagtctccctctgttgcttcctcggatctgcttcgctctcgtgctctacgcctcacacgacgcgctcttcctcgtcgccaccaactttgttgctgcgcgcgcgtacgtcggtgcgctgtgcgcgttctacttagtttgccttgtgatgctgctcttagtcgggttagtgcttcgtgctgtgctcgctggtttggcgcttcagatctgtgtgctgtttgctctcggagacgctagatccatagtcgtcgacttgcaaatgctgcgagctaatatgattcttgttggatttcttcgctcctagcgtgagaaatccgaagaattgggagaacacggtctttttttttgtcccaataaattggttggattgttctagtatatattttttattatttttttctcccaaattgttggaatggcttctccctctttcccaactggttggattccaaattgttggaatggcttctccctctttcccaactggttggattgaggtgaagcgtgcttactgtattttttccacctggatttggtactatctttactctctgaactagttgggaacggatattccaatctcctgtctcttcgtgtgacttctttctgcttccacgtggggttctggaatcttcaattcactgtagtataagttcatatcttatttattctcatagactatgatttggtcgacttcgctcatatattgccgtgtagtagagggtttttacaattattcacgttcttggattgctgagatatcatggttagttgtgctgtttgaactggttatggccctcccgctgtgaattgccaaggtgtctgaatgttggtgattttgtggatagttcacgtgttggacaaagaatgcattataggagtgacaaatatg

SEQ ID NO: 9311 - DNA, 1228 bp, Oryza sativa
aacaagtgatagaaagaaatgtcattattcgtgattgtactgctcatagacaacttcagtcagatttgattgagcatatttggctaaagtttgggaaacgaagttaattaggtgatcgtgcatcattttaagtctagtttacaatctgtgtattacatatactacttcatatatagcttagcagtaacagttgaactaaataactacttatttttttccgtaatgtgattttttaccttacatatactgacatctcttcttttatttccttcctgcagataaggtcatgtctaatgtgttgctgctctacctaatggttgaagtgctcctgtctgctggatagatgaaatgctcctgtctgctggatggatgacctaatgtccattggatgaatgaatttttaatgttgaatgtcatcaggctatctaagttattatacttatgtttctttattttgatgaactgtgtcgacgtttgatatcgcgattccggtatttgtatagtatggggatcgttggtactaggatatatgcgagatgtaataaaagagatggggacgaggatttttatataggttcaggccactgaattgtcaggtaataaccctactcctgttggccgaagccggtcgttgctcttattcaccataatcacaccagtataatatttgtggtagtctatctaactgttgtcgacttggcgatctcaagtgctgactcgtagtcgacaacagggtaaccttcctcctcgaatccgcatccggcgatatcaaagacaacgatatgtctctcctgacagtatccgtagacaccgtaggggactagccatgcttatctctgaagtcgatatccgacatcttgtcttggcgcatgttggcttgtatattgatcttgtgtcttgatctattgttccgtgtcccctctcctcctagggggccttgtatttatacccataggtgtccccttgtccaagtagaactagggaaaccaatatggatacaatccgagtagtcattgtcgtttccatgagaactctattcatccttccttatgcggaactcctcctatctccgaaggttatttccgtataagacatggtatgtggtgggtcatgccgagatttagtcaactactattaggtatgtgttatccataaccctgacaaactgatgttatgaaagactaccagtttgagtgctgctactttgttatttatgggtacctattta

SEQ ID NO: 9312 - DNA, 27502 bp, Oryza sativa
gagagaagggaaaaaaaagggaggggaggggaggggaggggagggggggagtgaatgaggaagaaggagattagttcccatataatgttttttctggaactgtccctattcacatcaattgctcaactggctaggtgagcacttatctttttaaagtagctcactcttttagaactagcaaaggtgttattaaaagtttgcatgcatgtatctcatgggttgggattttaatattctcatagaaattattctctacataggtcttggatcacataataattaattccaccagttaagcctctaatcgttttagactgcacggacccccggccggactcgacgcgcgtgccaaagtgcgtactacggcgacacgttcgagctgttgagcaccgcgaggagatcgatcgattgatgctcctctccgaagtgaagtactgacgttgatatatcgatcactctcgatacatacgtatatgatcaccgcacacaaaactaaacgtgcgcgcgctagctcgatcgtttcagtgagtgtggtacgcgtactgtcaatcaattatgcatgcatggcgcgccgatcccacatccccgaaggccgtacgcaagtcggtacgtggtcaagttgcccacctgagatcaaatcgcatctcatcccatcgcatcccatcgcatggtgccctgctgccgaaggcaaagccatgcaacttcatcccaagcccccaccccccgcgcgcgcgcgcgtgcccgcgcacatttacctcgccaccgcgtctgatcgatctcgcgcgcgcggttgccggagaaatccggcgtgtgtgcgcgcacatgcatgcggtcgacgggcaggtaggattttccttggcgtgtgggaacaccgcgcactgtatcgtggcgcctgaacctactgagatgtggagaggcacatacgagagtattctgcagctcgattgctactccctcctactagtactagataggtataggcgctattagccaaagctagtggctgagaccgcgaggaggccggctgggctcgtgacttccgcgcgcgccaagctaaggccgtaagctaagctaggcgtcgtcgttggcatgtggaacccagccgaaccggagcctcaaattcccatggaagcatccacgaaccttctcatcgcacacctcgctcgatctcatatccccgaaagaacagtatgtgtgatgcgtgctttggggcactttgggcttacgcgagggatcacgagctagtacagtggtccatcaccatcgatcacatgcgtggtggtcgtcacgctaaggtagtttgtagtgtaagactgccggtgccagttgacaagtatactcctatgtcaaccacaattgcatatcgtgccgtctttaggcaaatatcgaagttggatttatgctgatatgggagagaaaatgggcaaaaagatagctttataagtattgaccatcgtgcattatcgaagaaataagatgggagggacgacgatctttctctgcagatgttcgataaaattgaaatggtacatactgatatatgtctaaaactgaagggatgacgtgcacaggtcgaaaaatagtcttttttttacccggcgaaaaattcttgcctagatcgagaagatacaacaagctcatcattataaagcatatagtacatatcgatctcttcatgaattaattagtaatatttcaactaatagtctctgctattattttcatcaaaagaaatattatcctctgttatatgcatgtgtttattgtatttgtaattatatttgcacaatattaattggtgttatttgacaagcaagctgctgctacgcaacccgctgattaccatattgtttgtgctggctgcggcgcagccacaacccatgcagtcgaacaactccatcgctagcaagccttaaaaagatagcacatgctatgctatcctttattgtatgacatggcacatatatatgataaaacaaaaccaattaattaagcatggttaagcagctaactgtgacaacccgcaatgcatggtagctagactttttttttctttttaagtgacaccttactatttacagacgataattaagagaccgctactccctccatcttagaaaacccaactttcccagaagttgtttttttcctaggacggggtgaatacaaatctacaactgcacaatctatgttgaatgcaaaaccgacgatttgatatgtggatgcgtatagctatgaatctatatatttatatacatctggataattgcgtacaatcagttttgctcacctgcccgaggagacaaaaactataaaagtacgtatcaccattcaagggaggcaaaataattccaaaataaacagaaaaacggtggggttttggttgttatcagctgatgatttatccatagtctgactagctatctatagctatagtaactggaatacttaaaaaagctttcacgttgatcagaaaaatctgatgttggttagatatgttgtgttaccaaaaatccatagatcacataaaaatcagtgttaaataaaatatactgttgaaaatagcaaagactcattagtttcgttcctataatttagtaatttataaatttgaaatttataaatatgaagtttctttgtattcattttaaagtctcggcttagtttttcgttgtttagtctcaaattaaaaaatactaattattaagttgtagtaattgatatggactcatttttaatgaccacaaaatagttcctaaaacaactaatgtattcaaatacattaaaattttaattaataattaaattttcttatgttcacaatctggcacaccaacaatattgtccttgcaaaaataagatccaactctcacgagtttacgagtagtactgttaaacacatacatagtatacctataactacttttctttctttttttttttgggggggggggtacctagctagctacttttctcatgttcaacctggcacacacgaaagaaaagggcatatagtacatatatatctggccaatggataaatggataataccatacatccataaggcaattttaaggtaagcgatatgcgcgagtacaacgtgccactttgactagttgcagcagcttctgggctctagctgtggcaacgaaagagaaattcgtgatcaggagatccacaacgacgcaataaggtgcaacttgccccatgaattgtcgatttcacaacctcacagcgactttgcactgattcgttgcggacaagcattggactttccgtttcctgcgcctttctgaagtcttttagtttgagggggtacggggtggagaccccctttctcttgataggcataatgcacttttttgttggtggaaattgatgatgcccatagttgctcaggcacagagagatagagaagaaagaactcagctataggtaggatgacccagcccaattcagagaaaatctaatctagatgattgtgaaatgtatggtgcgaaaacactagccctattgacatgtaagttcatacatatcgggtgctagcttaggtctcagttagttcatttatattaattagcagcacaaataacaccgagtgacagcgattagatggataagatcatgcatgctctttatttagtgctttacatgattggaatggctgaaaaattgagagatctccgcgttcttttaacccacaataatatcaggtagtacactttctgctctcctgatgtcattaattagcaatttactaggtaacacgcgctagtgacagtgagtagtggctaatgtaatgtgtgcaccactaaagtgaacaagctaggcaaacagcgatttcctaattaattaatcagcacattcttcttggctcattttaatcacctgtcagcgcactagcaacggggtgaaatgcataagctaggccagaaagattgatgccctggcatggcctgttttgacttttaacttccctagatgaacaaaaagtctaaacaaagagatttgtctccaaatcttgcctacaacaatctccccctctttttctataaaggggcaggagacctacgcataatctacagcaatctcctgtggtatttgattagggctaatgcgatagctttcgtttcctttctttattactgttagagttgtatggcaaagatctgattcttatgctatggtataggattgtttgaaattgagtaatttgtgctgatcacctattcctaccaaagttttaatttaggcccatcttaaaagtattattttcactttgggctaagtaattctgacaaaagttgaagtttataccaagtaacctacatgtcatgcattgtgattaaccatatatgttactgtccatgtatcaattacatgtggaccacttggttcaaagcgcaacatttactaacaatacctaatcaaagtgaaaaaaaaacacgtcaaagataatccaaagtaaaactttgaaaaatatatagtaaaaaacgtaatttattcaaacatcatctctatgattatttgagatcagtcaaccagtcgaatatttgtgaaactctcaatacaattattttgtgtactattacagttgtctactctctccatccctaaatataagagattttggtttgatatgacacatcctagtacaacgtatctagacatctaaatctagatgagacaaatagtatttcttgatcgtcgaaaatatgtacaagcaccggtgattatagcaacagagcctacacaaccacctgactagctttggagttacctccttcattgtttatggtaccaatcgaccttcccttatgtagactctagacaccttaagttatattcgtaagtacgtttttcaaactattaaatgatacatttaattaagaaacttcaaataaatatatttaattatgaagttataattgttaatacataataattatgtactaatcacccacgtcgtgttattcgtggcatagttaagctaaacctagcatggtgctgagttattatctctactttcccaactaacttcactcgttttttgcacgtacgttttttaaactgctaaacgatgcattttttataaaaattttctatacaaaagttactttgaaaaatcatattaatctatttttcaaatttattttagctaatacttaattaatcatacactaaacactgtttcattttgcgtgctgggacacccgagacactgcattgctcaaaacgtttcgaaatggacgatgtcgtacatatatgcgtctccaaagtccaaacccaatcccatctctattcaagaaacagtaccacagtacagtacaatggtacgggtgctagtgctagtgctagactgcccctagccagccgctgcgcgtgcagaagcagaacagaacggacatgtgcagcttgcgacttccgtcgtcgacgaaacggacagacagagtgctagacgggcagtgtcccagtaggaactagaaaagcaaagccaaacccagggaaaaaggtagaggaaaaccctcggctcggtcggccgctctactgctactgggtgtgaagcctcgcaagcggaaaagcgcgcgcggcgagggagatcggcagcacgagcacgaggaggattgaaccgaactacgtctcgctctcgcgcgccgagtcgagtccgcccgcgttgacccgtccgaacccgcccttgacctgctgacgtgtgtggcgcgggcgctggcaccgccgccgcgtctcgttgctcgccagactgtctttaatttgccgggggccacaccgccccccgcggcggcggcggtgcatcgcgttgcgtcgcgtcgcgcggatcttctgctccgcccacgacgatctccgcatgctccgactgcgtctgcgtgtgctccctaaaccgcacgcaccgtgtgaattgtgatagtctgattagtgatttagatagctcgatcagtgagcatccaacttggcacttggtaatcttacaataataattctccttccagaatgaaaagaaaaaaaaatgaaggggtcattttatacgatttgcgaaaattgacttgctggtactgacacgtcaggctcaggccccacatgcctgaaattccacgtcgctggggccagtgacaatgtccacattggtactacgtggtacgtgattatgcgggaagaaatttccatgcaacgcttccatatttgtctgtcaacaattggctcgccgctcgctgtcttgtgcttgggagttcacagtgagcgtgagagcatgcaaaatgcaacacctactcatgccggcccggcgcctgcgttgagtgcaatcacgcatagcgcggttagtaccgtctagttacagcaacaatctactactcgctatacgtacctgcatgatcactggtcttttgtgaaaaaagaactccatgatcactgatcactagttaagcagtcaggaaagttctaatatgtactctccgttccaaaataattaacttttatacgcaaatttagacacagactatatctagattcatgtgtaaaagttgactttgtttttgatagagggagtacttacataaatattttcaaagaaattatatatacacatgttgatattttaataagggcatctttggagaaaactttaacaagtgtagctagacattttctcgctcccctgaatagtctagatatttcgacttctgagtagatagctacataatccattaaatgattggtgatctaaagttggccaacttatctaggttctcatcaattgtgtattcgctgagtgcttctcgcggaatccagctctccaaatttgagtaaatgaatgtctagatgacatgatttctcaatttaagtactactccttatatctctcaaaatataaggacttttgtcaattttatgaccaattaagcagtgagataaaagttcattatgtcccttattaaacaattaggaattggtggctgaatgttgggactaatccatcctggagtataaattaggggtttaaatctgattgcacatgttatataaattatatccaaatactactatatatatcactaagattgtaggacccaaggtataagttaattatttaagggcggggcttgttgaatttccaaagttcttttataagtaacataaatgatcagtccctaaacttgtgggggtggtgtcatttaggtccgtgaaattgaaaattatacatttagatccgtgaactttgtttaatttaccactcccggtccaatcgctctttgacacagctaactgcttaggtgacgtgccacgcaggcaatacttttgcgcttagacccctccgcatcacagtgcgccacatataccctctttagctacaatgacacccgaatccccctaaaaatatccccaaatccttcctccctctcattcctctccttgcacatacagaaaatgatgccctaattaataatcgtcattgttgtgcactccacaatggtcctcttcttgcacaacgagcactttatcaacggtaccttcttctggcgactataagacgaggacgagtttggagaagccatggggatggcaagtgtgcaagcggcactaccccgcctccccccactaattgatccacactgcgctacctcccgttgctaacctcgtcgtcaaaaccctagccgattcagagatatttgggaggttctgtttggaatgcactgataagggcaaattatgtaagaaaatatatacaaagggggataaagtgcaaaaatgttgtctacgtagcgcgtcatgctggcggtcagccgcggtcaaaaggcgattgaaccgagggtgatacactaaaccaatttcatggatctacacgcgtaatttttaagctcatggatctaagtgacaccactccacacgtttagggaccagtcatgtattttgacatgaagagagtaaaaaaacgatgcaaacaactttgaatttttcaaggttttgttagaaattaattcaattcccgccaaactcctctgaaaattctccattccaaagaactgcttagtcggcagatgaggcacacacttcgccatcaaaattgggttacagccatcattccgttgctggcccaatgataatcatttcccgttccgttttaccagttcaacaatcagcgactagtgtgcttcctttttcttttttggaccaattggcgtgctaattcagagatagatagagaaagagaggagaaaaatatcagcgaatcaacaccgagaaaaccttctcatggaagctgacagttcgcgagtggtgcttaggtcggcccagccacgacaatcgcgcgggggctcttttctcaggttttccacttttccttttccgcttcttaattaatacaagtgtgaaactacgaagaggaaaatgtggctagcttccatgatttattttaaaatattttggttcttttttaaacattttttaggtatacccttagaaaaaattattgtagtaatggatcacttctgacgctagtcaggttagtgccatggaagtggatcagtgatgaatctagaatgaaatttaagtatgtgctcatatttatgtaaattattttagcggcaaagtaaatatatatatgcctatcattttttaaactcaattaattaatacataaacaaaacaaagaaaataatgaattgtataataaaatcatgattcgaaactgttggtgtggtccatggccatgtcaatagtttaactgtatggccaaattactttattggtttttgaaacattaaaaataattcaaccaaaattgacaaattggtattctcaacgtttactaattggcacatcaggtacaatctcagaatctgctcatcaattatgtgataaggattaacaagctaacaagaaatttggttgattaatctcacaacttttaagttttcaccattctcattggctcttagtaatcagtattgcattcttgcttgcagtggctgataggttggagggcagatctggcccttaagccccaactatgaatccgcccgttgagagggccagggggggaggggggttgggttcgatataatgccgttggcggagccattggatctcggtgctaatgaggttggtacctaaaaatgattcatttgttaatacgttttttccctacaatctattcataaaaaggtttttaaaaagatcaagatgtaaacaattcacgctagctccccttttattcttttagagaacacacactctcgctctccattttcactcccttttaattcccttttccttatctgtgttttgaggtgatgcatgcaacgccgcttggctggctgggcccacagctcagtcgcatgcaagagtgtcgtagtgagcgtagtagcagcaagcagtagcagtagagctcactcgctcgccatgcgcgtgccgtgcggatggtttttagtgctggcaattaaaaagcatatgtgctcgacatccacttgggtttcagggctttcagagctgatcactcctgctctgctaatgctaacgttaatcgtcactctcacccctcccctcgtctcgtctaaattatctgaacctgacgaggtgatgagttgcgaaaacaacgtgtgtagtgtcacgcagaaggccacgcggatcatcacatctggggagagcgagccgtgtcgatcgatcgatccgatgtaacagcgcacgcgatcgatctgcaccgaattctcgcggtagaaaacatccgtgtcggcataaacaaatcgaagcgatctctcgcaaaacgctcgctcgcggtcgcgatcagcgtaatgataaccaagccagccactgcaacaaaaaacacagaaaaaaagggagaaggatcgagtgcgcgaggatcacaattagcggcgagaaatgggccggggatattgtgtactagtgtaccactcggctcgacactggagcatgcaaagtgtagtaattaatcaagacttgacgtcggagctttgcttttattaccggtttctagaagtgtacagtaatcctgtcaatcctacagagttcagctcgtacatacagtagtggcagtactgtatttactcaaaaagaatgagtaaaatttaacggacaaactttagtaacagcagcatcaacactagtataacggctacactttaacttctttttttttaccctaggaagtaaaaaaggagaaagaaacggaaaagaactggagttagaatagtctgggagctaggagtccaaaaatggcatcgtgaggcgattaatcttgttctaatcccccagatagcttctctccttcttctaatccgcttctccgctccgctacgcgtccccggcggttgtgcacccgcgggtgtcgcgcgcgcgcgcgctcgctcgccgcggcggattcccatggcggccgtgctgacttttcacacggcggcctgggtggggcaccacagctggtcgtcctccatgctcgtccagaagctatcgacgtcgaagccgccgatctcgaagtccgcgacggcgaggtcggggaaggtgaggccaggcagcgacgactcggacgtcgtccacgtctgcccgccctggcacggcggctgggccagctccagctccgtgtcgcgcatggccacgccgccggtggcgctggaggcgtcgcaggcggtggtgaaccactcggcgccgtcggcctgcgtgggccagctgggctgcgccccggcgccggagtccgtggacagcgacgacgacccggccgtggtgctcgacagctccggtgcaggcgtgccgcccgactgcgcgccgccggccgccgcgcagtactcggctggccagcagctggcatcgggcgccgggagctccggcgactcgtagagcccgtcggagccgccgtgctgccacgacaggggcggcgtgtcggtgccgccttcctgctgctgctgctgcccggcggcggcggcctggatgcgctcgacgaggcggggcatccagaggtagcgcatgacgtccttgaactgctggctgttgacgtcgcacttgagctgcttggcgtgcttctgcacccgcgtgcgccagtagttcttgatctcgttgtcggtgcgtcccgggaggtgctgcgcgatcttggaccagcggtttccccaccgcgagtgcagctccaggatgagcagctgctcctgcggcgtgatgttgcctcgccggaggtcggggcggaggtagttcagccaccggagccggcagctcttgcctgtgcgtttcagccctgcatgacaacaaccaaaaaccaagattaatttttctcttcacgtcacatcaaaatattcacatgtagtacaccattgctaaaacatagtatgcagcaactaatcaattatatactaatgcagttatacgcatacgacgacggcaggatggatgatgtaacgggggagggatgagcaactaaaaatatccctatgaacaatgctagctacgctgctaaccactaaaaattctctcccctttccctctcactcactatagcttctagcttagctggttggctgctagagaactcagggtagactcgtagctatctgtgtttccagaaatcagcatgtagatgcaagagcgactggtactttgcgtcctataattgctcatcaggctaagcatgtacggacactcagctcatggaattgatcgatgtgtgcgtgcatgtaatttatggtggaattgggagctcgatcgatcgagatcgcgatcctacctgctgatcgggcgagcgagttccagcggccctcgccgtgcgcggcgatgtagttgacgagcaggaggtcctcctccaccgtccacggcccgcgacgcaggtcgccgcccatcacctcctcctcgctgctcgcgtccctctcgtgcgccatgtccatcgtcgaccgatccggatcaaaatccctccctttcgagtctcgatcgatcctcgcgggccagtcgattgatcggatagatcaagctagtagctagatcgagctcaggagattctggttgttgtgctttggtagaggggtactatatatgcgccgttgctgtgctctctggatagatggatggatggatggatgtgtgctgcgatgaaactggcgggagacggggagggaggtgtcggggtttatatagacgggaggagcgcgaggagtaagaataagaaagaagaaagaggcgggtaggctgggctggacgacttggaaagaaaggaccatgtgggggagaacgccgcaaccggggagattagtttacgccttttttgaagtttttttttcccttcttcttctttaaaagccaaaagtttaggcgattaacccccatcgtggttaattagggataatcatgcgattaggattaattaaccacgccgctaatttaatcgcccgcgtacgtacgtacacgggttggagagactcgggggacttttgcggtgggtttgacccgttgactcgtccagctgtacaggcgtacagctcactcgcgcgcgctacacgcgctcgcgccgtctgcctacgcgggcctctgccgctggggcccacctgggtccatttctgtcagccagttgggagctacctcagcttctagttccggtgggaaaagagatacggagtaactacgtataccttatagccatggaatacacaactgatgatggtacagatatactgccactagcgtatactactacttactactactagcagtattggagcatctgtggcaaatgggcacaataattgctgctgcacaaatcacaaatactagtacgtatactatcggtagtgtagtacaccggtacggacaagtagtggtattatcgcaaacatgcgtgtacacctctagtacagtgcgtctgtgcatcaccatggttctacactccagtcgtaggtggtagctggagtatattataaaatatcagggcatccacaatagttatctatagactctctataagatatccatatcagtatattttcctacttgaaagagattaaatgaagagagagagagtaaaactatctaataacttggagatagtctatagagaaaaacgaggtaatggatgagagagctatagatatccatgtagacatactattgggatgatttactattagtctagtctattgttgagatgtatatattttatagagagcaccttactttaccattgcgggtgctctcaggttatatatagggttcacataaccgcttgtgaaacttggaggtttcaaagatggatagagttgatgatccgcttagtaagccaacagaagttaataaaattaaaccaaaatttaaactatctgacaattttttgaatttatgtggttttgaaaggactccgtgtgcgaaagggcttgtagcctaatggttacaagagcctcagtagcacctgaggtcctgggttcgactctccatgagagcgaattttccaggattcaacagcgttgtgctttcagtggtaggcgatgtttgtaaacctggttataagtcctatcctatccgaggtgtttggagctagcacataaacttcagctgacaccataagaggtgtatgagattatgtactattttcagtcaagaatatttgatgttaacgttgttatattagtggcactactgtcaaattttatcgactaaataaattactatcttattaaaaatatcgtattaattggataaagaatttgttggattatagtgagtcatgattaaattaattgtgttacatacgtacatctctctaagagttatataccaaatcggattctacacttaaatttagcatagctcaatattgcacacaaaaacaagctacttacttcctccgtaaaaaaaaaagacaaaccatgaattcccgtgtcaacgtttgactgtccgtcttatatgaaatttttttataattagtattttcattgttgttagatgataaaacatgattaatactttatgtgtgacttatctttttaatttttttcatattttttccaaataagacggacggtcaaacgttagacatggaaaccagagtttgtctttttttttttttatgggacggagggattatgtgtgatgtctgaaagaagccagaaacttcagctgccaacccagtagatgagattgcttgtacatattgagcagcaaaattgacttgatcagtctcagaatttcgactattccaaccaggagatcattgttggtggccgaaacgttcggcaaatgttcatctcagagccaccgcctcttcgccgagctttccccgtatgagctccccaggtcccctctgcgccgcgccgccgccttatctatccatcaggaagaagaatatcccgaaagatcttcgcatgatttgcgacgatcgagacgaacaagatcgcctcacctctccagacgcgtgcagctgcagcaaaagcctagctggctggctatagccgctgcatgctacggctaaactgatcgatcgatatcgacagcgatctgtaattcccctgcacacacacacaacaccccctcacgcgtcaattaatacacatcgtccagacgacgttacgtacgtacatatacgcgtttgtcacactagggcgcagcaatgcatttccgctcgatcgatcgatcgatcgattcaactttcgcggtgcaacagtgtgaaaattgctgtacaacagcaggcagcagctaaagttgatatacacagcgccccccgctgcactgtttccaccgtacatcgcgcgcgcgaggaggaggatttttgacccattttgctcggattttagctccgacaaaccgatcgatcgattgacaccgcgagcgatgcgagaaccagcggttttttttgtcaagacgtggaagacaaactccacacatgcggtttgttttttcaaaacaagataattgaaaggtactagtaaatcggtacaagtgttctagtattaattgggcggagtcgtccttgactatttaggctgcgttcgttgtgatgagttatgggggattgggtgagaaaaggacatcgtattccgcgtgcacgcttcccaaactactaaacggtgtattttttgcaaaaattttctataggaaagttgctttaaaaaatcatattaatccatttttaaaatttaaaatagttaatactcaattaatcatgtgctaatggctcacctcgttttgcgtatcttcccaatcttctcaatccccctctcctcaaactcacccttagtactactagtatagagatgatgggagagtcaaccccaactggcaagagtcatattctctcattgatctgccggggtctgtgtgaaacaaatttaaaagtcccaagttgcagctttgtatacgcaggaaaaaaacggatgctgagaagaagagatcggtgtggtcggattccacaccggggttgaaaactttggcagcttgaattggattcttatgtgccgttttttcaacacatggaggtgctgtttttttaaatttattttccaactctctgtttctattttatcccctgttttttcaacacaaatcagtttcaggatggtacacttgctcacttgcttgagaatccggtttgttttttaagctttgacaggctgctgcagcggtagagtagtatagtattgtttttatttcgaacggtcagcagtatagtattgttggtttggattttgtccatgcacttggcgacttgtaaatttgtaattttaaacgagaaaccggaccaaatctgccaatcagatggcgtccacggtttgattcccctgccagcttggcctagtctgttttgtatttgcagagctatgctgattgctgtagttctagtagttgtagtagctcgcaaataaaggtcaaagtgtttgctgagttggactggcgtgctcgttgacccccaactacggccaaggcaaagccacttgtggttaatatattcataatatttctgttcttatgcgagaggtcgatcgatctaatctatgtcgatcactgtcttcatgtgacctgcagcaacgcatatgcgtacaacagttcgtgtccgtgatggtcagtacatcgaacattgctctcgttttggctcttcacgcacattctcatgtgcgtttttttttaaatgttggagtgtacaagtaaatactcgtcctatcttaaaataaaggaaaaaaagttcggataatcttctagaataatcgtggaagtatgaattatccttctcaatttttcatacaggacgaattacccctcctctcactctacagtggttttgattctacatggcacacacacacatagtagtccagtcaacataaaaataaaaaatggtgaggcccacttatcggttatgtcttttctctcgatcaccacatgtgggtcctaccttttttatattttcatattgactggactgctacgtgtcactattacaaaaacagtcaaataaggtgttggttgggaaccggctataggtgtcggttttccaaccgttacctattggccggcatctatgcgaatcatatagttgccggtttaaaggtgccggttctttattttttaaactgtgggaggtcggaaaaggttaataggcgtcggttttaaataaatcgacacctataaaccagtccctatgagggtttttgtagtagtgtgtgtcacgtagaatcaaaactgctctggagtttgttgaggattaatacatctggtataaaaaaaaattcgagagtaaagaatgatttttttaattgaggggggtaattcgtattgccacaatagttgaggggtaattcagaattttttaaaaatataagaatcaagatgtatagattcgtatataaaagttgatttttttccataacaaaggaagtagggcagtttagtagatacggtcaagttgtgtaatgcaacgagatttcaaactttttgttgcacggaattggactctaccttgaaattttctagtattccaaatatagacaaaatatccacactaccgaaccctatggatttattttactgtagcttatattggataatatacaacttttgggattgatattgtgatcatagtgagaaggcttgttgcttagggtaaaaaaaatatttaaaaaggatattacccaggtgtacagcataaccacttctgaccatgatttttccttccaagaacttctagatctgtagtacctccggttcctaaccaaaaaacaaacaaacaaatttgtagccacttgatcagagtttataaacaaatttgtaaccgcaaaattaattaatatcgatcacatcgtacttgccttgaactctcaatctaataattttctaaagttaaaatagtaataaccagcaaattataaactcaaagtggactcactattaataaacataaaatttaatatggtgtgaggtcttaattttattttatttcttaataaaatgatttctatattaaaaatattaaatataaaattgcacttggcttgagtcttgattttagtttaaatttggtaatttcaaaagtcagaatctattatatgaaattgtacatttcttggactataattttagtatgatagtaccaatttaattccaaaattcagtattaatgggcaaactgtaattgagatgattaaattattcttcttttattctaactgtatattttcgaaggtacaaaagccagcgacgaatccttaaccttactgaatccctgctaaatacgcaccctcatcaagtcatctgtgcattgtttgtaccaaccaggatttaatccatcttatataaatgaggtttgtcatgcatatgcatcctttataaatgatccaattaaaatggatgttcaaatttattttctgtttctccgatcaatatgtgattgtgctcgagatttccagttgatatacttcctccatccaactgtccatcttttattatgtatttttataatattttaaaagatgatatattaattaccaaagtgctttgcatgccacatataaccatccttacttttactggataaaaaaacaaatttatttcaactaaaaagatacgcggcgagatttttttagttgatcttatcaagtcgtttcctttcaactttcttttttgcagatgggaaaatgacgagtcgcctgagttgaggaggataagctgctgtggcagcctggcaggaggccggcatcacgtatacaggcacgaccacatgcagaggacaacagtggaacgttgattccgaccacccattttgatgacacgtggaaaatctgcatgcatggggactaataaaaaataaaataatgcatagatatgcactgggggcgatctcagccacaataatcttttcggtgcctaaattatgtaaaaccccccgtttttctcatcaatatcgtttcgcttttcggcgcccagtgcttctttatggactatggtacttgtgatcattgatcgaccactcgccgttagaagaatgttgatgaagtggaaatccggtccatttccccctttttatatatatcgtaatgttttatccactaatgcggcgcattccaacggaaattaaagaaaaaaaattcatagttaccattcttaatattaatctaagaattcatatccatgttggaattttatatcttctcctcatgctactgtagttgaaataaatattcaccgtttgatggttatatgtaggagatagtggtggtagctagctatggtaggagatgataattcatcattcaccattaccacttatctctcccttcgaaaatataatcatttttagatttcgacacggtcttcgagatactactttgaccaataatatgtatagaagtaaaatattttaaataaaaagagttgcatattatgataatttgtttaataataaatctagtaatatcaattttacatgatagatcttttctatttttttacttttaatagtcaaagttaaaaatatttgacttggcactatactaaaatacttatattttgggacggagagagtaagtcttttcaaggagtacaaatttttctagtttatgctttatcgtccatcaaatatttacagaagtggttaaaaaataatgtatatgtagcaatgataatcgaaattcctatctctcaacgctgataaagtgaaggatgatgtaatgtagggtgaaatttatttattttttcttttgtagaggtggggaggacaacgacgacatgggtgagctcgtgatctacctcttctcgaacgtggtatggtcgtgggaaggagaagataagacgataacgttactatttatgcacaaatcttgatgcagtttacaaaatcaagtgaaaatttgcggtatttttgggtgaaactagacagtaaaaaaaaaaaaacttatactgctacgcgctactacctacaggatgattccaagtttgtcgccccattttaatgatcaataacacacagtgagtccgctagtttcttagccttaaactaaggaaagtatcatgtatggcctgtcttttgtgcaacctatagctagctcgtgtgttccattggcaaggcgacagctccggtctcaaaagagccctccaaggacaaggagagccggccgcaatggcgatcgaatagtaccgtccattattgtagagtatacatgtactatctcctaaactactattgctacttccatagctgaagttaaagtgaagccacaattagtttttttttttcatggcaatcgtaacccacgttttcgaatcccagaactaaaaaaaaagtacaatataatctcgctgaaaaactaatcgtcgtggcctcatataaatcaggcacgattgcgtcggcgacgagtaaattaaaataaagagtgcagagacagagagagagagatgcatggctagctcgtgcttagctttttcgtcagtgttatgttgcagctagctataatatatatatatatatatatatatatatatatatatatatatatatatatatatatatatatatatatatagacatacacaagtatgtaacggctaatggcttagtgggagacacataagattagcagcgtgttgttagtggaaaagcgatcgagagctcatgcataattaattagtgacaaacgtgttaatgttcgatccaggaagcactagtttgtgggtcagtatttgtaggcttcaaagggctcaggggtacaaaagctgcaagtataataacctgtttcaggtagtttcgcccgagcactttacgtgttccaatccaggaggcggctgcacatcatcgacaaagtcgtagtagaattaacctgggaagtgttctgttgatcagcttataatatagatcacacgcatatctctactggttttaattttgtcttaatatacgcatgacaagttattgccagttctggtgctagcaaaacagcatatatatatatatatatatatatatatatatatatatatatatatatatatatatatatatatatatatatatatatatatatatatatggtgaaatgttcgtttagaatctcaattcatgggcgttaactaggagatatggaacgaaaggaaccggagaactttccaacacaaggagttgccggcgctaactctgctagccaagataaaggaggaagcaaaaacatgggggttggcgggcgcaaaaaatctcgccgcctggttgacaatgtaactgcctatagttagggccacggccctaggttttttgttttctgtactttatccttgtttgtacagttttcgtctcctctattcaatgaaattgacggcctcgtcgattcgttcaaaaaaaaattcatgggtagatgctacaaattaaacaaaataaaatgcaacagatagtgtcccaaaaggggcactacatgtataggagccattttatatatagatgctgaaaataaggtgttaaaaaatgaaaagaaatccgggatgaaaggaacatccctaagcttaagaacaggctcaagaatatgtcccttaaagcaagcaccacttgtttgatatgcttagcatcaagtaggacaacaattttttttataaaaagtttctatgtaggcacatcatcttggctagctattccttccattttttttctcctactgatgtactgaaacaccaacaaattaaagttgctcatatccttttccaacccttttcctttttcttgtttttgttttcttgcttactccttgattcgagcattttatatcattgcattgaaactaaccaaccgcgtcctacgcgtctgcttgctagtatatgcaaaaaaaaaaaactttgatgaaatctagaagttgcgtttcaaattaagccacagagaacatattccaaactttacacacttctgctttaatgatgtggaaactaaataacaacttgagctctgttttggaccctgcctgagcatatataatcatctgtgtagaacttgacttcttaatgcaatgtgtcagtatcagcacagcatcagctaaaaaaattactaatcagaatgaagaataaaaacatggtgcactgacttttatgcttgcttgcctactcaatgctccatgaagccaacttttttaactattggtgtacaaagctgaagggaactttgcatttgcattgtacatactggtcctccttttcagcaccagtactcctaccactgttggttccaatggtaaagcaagcatataaactggtgcctcccatgatgactaagtttagataaaacatgaaaagctttttacaacatgtgattggatttgtctaaatactctggatgaagcatctgatctgaggatgttctgagggccgggactcctatttcggagttaaaaagcttccaggagagtacaataattggggattctgttttaaccttatcaacattaacatcaaaaagaaaagttttggaggtatacaaaatattatcattattttagctggtactaataatgtggatgatcttttaataaaaatttgtatgtaaaggtctacgaattgcggcagatttagaaagtatatgggacattcttatgctgcaagttagcaagtatgcgcaaaaaaaaaaggtagtatgattaaagaagcccaattgggacaaaactttgtgtcattaggctccatcaagaccgtacattacaatacttgtatatttgcatgaactacgatcgatatggcaacatatgcgtacatgcgaaaatatatttatagacgcaatgacaagtgtctgcacacaatagaatacttggattagaggagtggccactagcatagtgacaaaaagctttagaaagttcttccaaattaaataaatgttgtgtgaactattaattagtttacattatcatgtagatgagagcatacatattcaaaaactggcggaatgccatctacttatcattctgaaaataaaatgcaccaaaacgattttacatcattacggtgcaacggaattcttgcaagcatcattgctgaaagatcagcgagcaaatgcacggtaaatttctttattatgctatagctatatatgtgggattcccctaacctggtgaattaaaatggatcagagagccctcgtagccatatgccataggaaaaggatatcaccaagataaaggacacttatccacacgacatgaagctttcattcataatgatgattctggctgcaaatatatatgacaaattgcagccgttcgtgtatgacagtaaccaacgatatttgcatccttctccctccaattgcacatggatatgtatatttttaggagtcgacgtcgacgtaattagctcagcaaagactcctacatggtagtttttaccaacctactcgagatctcctatcatgagtcgccattaatctagctgatgatcatgactagctccctttgcattttaaaggatgctctctctcaaatctctctctgccaatgctaatggctgccacggcattaaccagcagttcagctgctacttagcacaccttttttcctccttatattactggctctatatatctgatcacacattcacaccaagtgttcgctaatggctagtgttatatggacatatggtccccctcctgccttaattatccattcttttcgagtgattaagcagcaactggaagtaagttaattaagctatataattgcgcaacgagaagagaagaggtctatgtgcgttctagaaccgcactattctcatggtgcgcgcgcgtgcgcgaggcggacagcgacgatcacgcgcgcgcgtcgaacgcgtgagcgcgcactgctcgctctcgccggtgtccggacccgccgggccgtttggccgccgcctccgccttcgcgggcggcccgtatgaacgctccggcctttacatttatcgtgttgaacctgtcaaacttgcattcacgcctcccgcaaggcggcgaggcagtcgtagcaacctactgtcccgtcttaaaatagaagtatttttagcatagtgtcaaattaaatatttttaactattaatataaaaaactcaatcatgtaaaattggtgttactagatttgtcattgaacaaactatcataatatgtaactttttttaaaacatattacttttaataaatattattggttaaaatagcatctcgaagactgtgtcggagttaaaaatatttatattttgaggccccacatgtcagcctcctttaggtcgtctctttttatatcctatacgtgttggaaccggccggctacggatgcgatgcacgactgttccactagtataatctagcgtttgtattagtgcatagttaacggtggctagtgactaatgtactgtacagtacgtgtggtctgctaattgctcatcgctaagctagctcgaccctgacacgattatattgagccgaattagcgtctttgactcgaactgctttcttctacagttctgctgctacacgtatacgtactggtgctggctgccagtctgccacgatcggacgtacactacatttgttttatctgcaaaccattaaaaaatgcgtacaaagtcagtacaagtcgccagcttaattagtttagcttaaccgtagtttaatacttactccggccgtcacgtgccgacctgacgttagtagcttttggactggagatgggtcccacacgtttgactgacggacccgacccgggtcgagtcgatgcgtggcgtcagatttctttactccaagcgacctctggtcaaaatgctgagtagtattatccaaacgtgcaggataattaattagggtgtcaaaactaattgttccatgtttggaagcttttgcccatggcgacaaatggttagggctgcaaagagtgtgcaagtggggatcaagtgacgatcatgcattttggtacaggacaatgcctttgaccttctggggcgttaggtgccaactgatgatgatgcatcctgcaaaaaaaaaaagggagggggactttagtttgttcgatcgatcgtagtgtgccgaattatatttatttagggtttttaagttgtgttgatgtcaatgcaaggtggttacaaaaatgaggacttgttgggagcactcatttggcttctagaagagattttggtagggttagttggtgattttctgatcaaatttgtgcagaaaaggaattaaactgatcgatcgtccgatttaattagttttttttgtgaggattcaactagttagtttgaagcttgaaaatgttcacatctttcgaataaaagaaactagtctgagaattaattatttatgtttacacactgctatatattgatatatatcgacggcactgattaaatatgcagccacaaattttcctcaaaacaagtatgctgccacaagttaagtatatatacttccttttgaaacctcacaagttaatactaaatccactcagaacatgtagtgcttacccattactgatgttcctgtgaatgtatatgttgatctacagactggtcactgtaactgctgaagaaattagatgtactgggattgcatatatgccagccgagaagcgagaatgtattgatcacacgcagcatttcttttgtcaggtagggttacatatataaggctcattggttcgagttgctcaagagtaatgaagaatttttgtgtgtgccactataggacatatagtacatatgtaatatccggagataacaccatttctcttgtttaaactttgaataaaccaagcgtgcaatgaatatactactacagaagtcaaatagtgttgagtatgcaaagaaggatgccactagattgaactggtttgactcaaaacaaattttgttattttatttttacttaaggacaaaattgagtaggtgcatcagggagggagtactaaagttgtgtgatgtggacgaagtaaagtgtgtgcatgattctcccacttagattaaaatcttgtttgtcacagttacacacataaatgtagtatctttagaattttagtgagacctacggaaattatttttcggctccaatcttaagtgtgtgttaaaagtaacatattcatgcatatgctccgtgtgcattttttaatgtgatcgaaaaaaaaaaggtatagcagtttaaaaatatatagtccctccatttagactcatcactattatgatttgattttcttttctttcattgagggggacggagagagtaggggaaaaggtataaacattcttttttttagaactggtataaacattctagaatgttccttatcagcaagcaggtcctagaaaattatagtaccatattttctttggagaatatagttctgtgtttagttgtttaggaaaaaaaatttgacgtatacggacacatgtttaaagtattaagcgtagactaataacaaaataaattatagattgcacctgtaaactgcgagacgaatctattaagtctaactaatccgtcattagcaattatttactgtagcagcacattgtcaaattatggcataattaggctcaaaagatttgtgtcgcaatttacatgcaaactgtgtaattggtttttttattcacatttaatgcttcatatatgtatacgaatatttgatgtgacggaaaagttgaaactttaaagggaactaaacgctccagtactattggttgcaaactttgataaatttagtggtttagagagaaggctagaggagatcctttgactggagcatcgtcatcgtggtcaaactcgacaatgcatacaacaagctatagtaactgattagctagctactactatatatagtacgtactgataggcaatatcagaagttaacaagattatcatggagataagaactaagggattttctttgaccgcatataagtaaacagactgttgggatgcatttggaatgttggatcgatttccatacggttaccatgagaatttcaccccaaaaaaaatcggtttttgctatatatgtgtcgacaaattattttgccaaaatctattgaattttcagccaataatttggcgtggagattagtgtgtgtgactgattagcttggtagtattagtactggattttttttcttgctaactgctgcatgcagtttctcattgtcttagactgtgtttagttccacgctaaaattaaaagtttgaagaaattaaaacgataagacggaaaagttgaaagtctgtgtgtgtaggaaaattcgatgtgacggagaagtttgaaattcgaagaaaaaaagttgaaatctaagcatggccttagcgtaaatttattagactttgtatgtggatttgatcccgtacactcacatcacgtgcacacgcctctccccctaaattttaggtgtttttatgtatttacatgatacttgcatactaattacatatgcaattttgaaacttatatcgtaaatacactaaaattcaataagtaaattagtaacttacagtgtaaatatatcctgactattttcatgaaaaatatgccgtcataaatattggtagtcccaacaaaatctccaattcaaacagaaggttagttcaaagagtgtttttcggtccttgaggagattataccacattttatactaaaagtttttatctctctcaaagaccataaagttcctcatataggattgaatagggatttgagcattttctgtttcgatgatacatggagaaagattagcaaagtcgattaggaccacaaatttaacagtagaagatatgattcgttctttctaatacatgtaaaatacattaattattattttgtgatgagacgtttgtatattggttttgatatttggttagatttaatcgcgaagtgatgctctctggatgcggttggtcagatcggtttgtacactatagtcagatcggacaaatgacgtgaatagtgttttttgttttttcagtgaactagagtttggttgtgcgatcagaccgagctgagtgcgccggtcagaccggccacctgacggtctgactggctagcttctgattggaa

SEQ ID NO: 9313 - DNA, 13125 bp, Oryza sativa
agattatcccacatttaatactaaaagttttatcctctctcaaagaccataaagtccctcatataggattgaataggaatttgagcattttctgtttcgatgatacatggagaaagattagcaaagtcgattaggaccccaaatttaccagtagaagatatgattcgttctttctaatacatgtaaaatacattaattattattttgtgatgagacgtttgtatattggttttgatatttggttagatttaatcgcgaagtgatgctctctggatgcggttggtcagatcggtttgtacactatagtcagatcggacaaatgacgtgaatagtgttttttgttttttcagtgaactagagtttggttgtgcgatcagaccgagctgagtgcgccggtcagaccggccacctgacggtctgactggctagcttctgattggaatcggttttgagttgtttctttgattctcaggattactttatgtttattacctctagataatttatgtatatatgttatactgttggtgtgctaatgttgagttaattaagttgaaaaagaacttgtgctcgagtatggtttctcatctatttatgtatagatgtattttaatgcctcgggagagtgttgcctgtgatggattaggagtcgacttagaaaaagttgatgtccgaatgataagaagattatacgagatgcttaggctaaagagaaaacgcatgattttgaaggttccatatggcatacaagagggattttgtgcatatgggatgagaagtcaaatttggaaggagtccaaattttgggaaattatagtttgtattgtaaaggaacaagttgtatactatttattcaagatggattatggcttttgtgtagccaccttagggtacaaatagaagagtggttaaaacctctcggtattgattttgagagagaatagttttgagaaaagtataaacttaacctacagttcgagtttagtcaaaaattgagaggggagtgtcgttggtgtactttgtaaacataattagaaacaataaagttgttatacttccaaagagttattcgatttgtatttttctttgtttcggcgatcaaactagcaaaggtacggtcgtcagaccggtgactacacgatggtcagaccgatgacacctgggcagttagatcagtgacatctggcaattacggctagaaggacaattgaccagagctacaccttcggtcaaacatcgacatcgacactattaggcccgacgtatacacatcggtcaaaccgatttccatctggtttaaatgtatcatttattttgtgaaaacatttgttttttttggtgttatgccattcaacctcatattccaaccctcttaatatttggggaatgctaggggacgtgataccgttccccaacaggatgctcctcctccgcaaacgcgattctcacccatgcgacgtggccgaagccatcaatgcgcgcccgtcccccaccgtcaccacgcccgttccccaccgtcgccgtcaacggacctcgccggcgggcccgtcccccgccgacgccatccccatcccctgccggcgtcaccacacccgtacccaccgtcggcgtcgccgtacctagccacctgtcccgcccgcgcccacgtgtcccatgccccgaacccgggggacacccggggttttgcccgatttctgggcccccgggattccccccccccttttatctacaggggacggctgcaagtggcccgccgcgcgtcgggatgcttctcccccaacgggatgcacagttatatctactaggaatcacctgatacctcgtaagtatcatctgatacctcgtttgtattacccgatacatagtagaaattgtctgatacctaacatgatacctcgcgagtatcacgcgatacgtggtagaaatcgtctgataccttacaggtatcacatgatactttgcaagtatcacctgaaacgtgtgtagaatcgtctgatacctgataggtatcacacctgatacctactcgggatcatcccgttcgaaaacgggattccgttatataacaaccccctaatatatagtcatacttatactaattggacactctgagagagctgctacgttaattagaaatatttagccgttgatttgatcgaccatgtacgttgagagttgacggtaaataaatcacgcagttgaaaacataatggactttgatttaataattctgaaattcctatttaataaatgtgatattgcatccatcttacattctcaatttattgttatttatttatgctcaaattcaaaatcagtaattaacatattgtaattggtgtggactcttcatttaataagcatctatataatttcaaaaggtaaccaacatgtttatcataacattagaatttcaatatttataccaccattaataatatatagctcgtgtaacacttagagattggctactagtagtaatagtaaaaatggctaaaaatttgaagctgtacattatttttcctatatacgcggacctagcctgcgattatggaagagatcgaactgtcagtttaactgatgcaaattgcataaaggatgttaattgttatccctatttcagtattattaggaggccaatcatctcttatgctagtgcccaaggttaggctgaacaaatatttttcagaatccattaagagactgacttaaggaagcatcccatcagacacgccactagcgtcgtggatcgtatacgttccatgatgagtttactccgatattatccggccccgtacagagctagatcctccgaattaatcaaaagcacgtcatttgagatgtctaattgatcactgcattggaagacgacgaacgatcattgacaggcccttcaatgatcagccacacgagccactagctagcaaccgctagtgtcacccgatcgaacaagctaatgcgatatcttattatgggtattatacagttacggtcactaatcgagatattttggcttgcgctttacgaacagttgctcctgccggatacgcttggatcccttcaaatctatccttgctcgatcgactgaaacgcatcatattgcagaaatatctgaatccttacgaagtggcggcacagtaggacgacgggcaactgaacactaagctagctgctactactatatatgatcatcatcatcgatccgatcggtttgccggcactcatgcatgacaccatagtaaattcatttctcacaaacaagcagctattaagatgaatgaataccaatggcatcggtccatgcagatgagagacaagggacctatatctatcgatctatcagtgtactatctacctatctacctactaaaatggcgatcgagctgaagccactgatggatcgatcgatcgatacatatgatcaatccacattaagaagcagtgtgcgagaagaagtagaaaggggggaaggaacgaacaataatgcgtgcatgcagggagagaggaaagggaggcaatggtgcgtagcaccattgggcgcggctgcgtgtgcccggccgacgcaggcatcgccatggacagcgctgatccgagacggatccggccgcgcgcggacttagccatccgtcccactcggacaggacgcgcgcgcgcgtgtcgtgctcgccgctgtcgcgccacgcgctaggcgagtagcagctagctaggcgtgtgtggctataggccttttgtgccagagcgaggcgtgacggcttggggctccggcaccggctagctgggctgggcgctgggcatggccgcgtcgtggagcagtgcacttaggcgtcactcgcagcgctttccgggggcagaaaagtggcaggggcacctcgccctgtccatcgttcctgcccatatcttgctgcaccaccactaagccgtctccgtccatgatcacgcactgtgtcgtctcggagtcggatcatcatgcaagccgtgcctggagctgtcaaagactagctactgctatgttggatatagctaggcgagtagctagctagctagctgctagtatacgaactattggtctatggctataagccgtttaatttggacgcatgctcgtacgcacgcacgcaacgagaatggtggcgagcgatcatgcatcagtgcgcgggtgcacgcacccacgtacgcaagcaagcaagcacggcacggacgacgggcagggcaccgtgtcctcctccgttttgctcgtgtcactctcgtgcgccatgcactatagtgcgaggcgcgcgagcactaactagcagctggggtagtaacgcgcgcttggctagcgctaattaagctgccgggttcgctcgccgatcgatcgaatctttttggcgcggatcgcccacgacgaggcgagccaatccatctcgtcgatcgacgacgacgacccaacgtacactgaactttcgtcgcgcgcccgtgttgcgccgcgcggcgcggcgcggcgcccatcgatcgatcgtacgtacgcccgcagctctcacgatcaacgtacgatccggccgtgtggtggcccgtgcgcgcgcgcggtgcatggtggcgcgtggcgcgatcgagatcgtgcgtgctgatcgggaaagccacggattggttgctgcgcgcgcgcgcctcgcgctcgcgctggggacgactcaactcgatctcggacggaggtcaacgcgatcgggttagatagaaaggagcaacatggcggcattgttggtgctctcgacgtacgtgcttgctgtttcaatttgatcgtcatcgatctcatcacactagctcaccggaaatggtttgcagaatacggataccccggcccgtttttgcttcagattatgatagctaagtctagcaactaagtttaaaagaagcggttaaactcttttttgaggacgttcagaatttctatttctgtaccgagttcgcctgcatatatactcttgttaatgttttaaaatcctgatcagatcttatcataaacattaaatatctataaccgaaaagatgacatggcgtctacttgtttcctccgtcttgaaatataaagaattatacccttcaaatttatcgtataatataaaagattttataattttgagacaatactttataccttatcaaccattttttactagtttattccccactcactatcttttatactggtttattttttcatctatcattttttactactttattcttctaaccatcatatttattattttactattttctgaaattttataaaaaaatataaacccttatatctgtggacaggactggaggagaacggcactatatcaccgcatattgatacggccagaaataccgagagacgaattgaccggctgtccggcctcgatcgtggtgctcatctcggggcgaaatgtgttaccgtatattcgcgcatatatgtacgcctctgcacctgtactgatctgtacctgttagtgggggcagaaagccatggacgccttcgacggcgacccgtccatccgtcgggcccgggcctcgctgtctgtagcgtgcgctcgctgtttgacattcgagttcaaaagtgtgacacaaaattttcccccggaaagaaattcttgcaggtcgatcgacgactcgtacgtcggcgcctccctctcgacacgaacacgtactggtactggattagtactcctaattgtctaggtgcacgctgtgctgtacaattcggcagctggactgactcctgcgtccccaaatcctgcagcctttgcctttttgaactcctgatcgacgatctacttacgcagcaggcaagctagctagctagcattagcgtgcatgctgaaatggagagaggaaaaacaatactctctccgtttcaaaatgtttgataccgttgactttttagcacatgtcgttcgtcttattaaaaaaatttgtgaaatatgtaaaactatatgtgtacatgaaaacatatttaacaatgaaacaaatgatatgaaaaaaataaataattacttaaaatttttaataagacgaatggttaaacacatacttaaaaaatcaaaaaattaacggtgttaaacattttgaaacggagggagtataagattggtgagaagaaagtgatcaaatagcaactgaaaagtgtgtgcctttcttttttattgttttctgaggagtaaaaaagtctgcggctgattacttgcatagactgtatgacccgtatcgttctctgtatgcgtatgttgtgcaatgggacctaatccctcttcggttcctggatgatcaacgtactcaccgtttgtctaatgctaattatcgagcaggctatcatgcaggcaagcagagcagtggcctagctaagctaagctaaactatagctacactgtgcgtggtcaaactaaacaccagccaaagccaagccaattagccatcgctagtgagtagtgacccctggggatgcacagggccgagccaatagcttagctttgtgactgatcgacacggccaggcaagtacacacttgcacggcggctttgagctgacagctactacgatccacacgacgacattgccacgcacggagaaagccccgggccggcctcgtctctccgttgctgcctgcatgatctcgtcgccgtcgccgtcgatcggcctcatcttgcgcggcaagttgcaggcgagagaaggtggtacgtggcttatcctgaattccaacccccactcacgcacgggccggcggatgcgcgccggggggggggggggggggcggcggatacgtacgactgatcggtcgatcgacgacgcgtcggcgggcgacggacggaccgacgacgtgagagcgagcgtgcgtgaacagtaggtccacctgaagatgccattaccggggggaaagcacttgatcagaatcagagagctcaaaactggattgattaatctgcagtggagacaagggcttagaaaaaacgcgccttgggaaagtgactgacaccaccagcagcggctagctcatccatgcttgctgctactggattttttttttatgttttggttttttgaaaatttatttccctacgacaaaacttattttaaaaatggatcctgttttctcaacatcaaggtccaatatcttagcaccgataccctagctctctggatatctaagtcgctaatgtgatgggtgttggaaccgaggacttatttgtaaaaaaagttttcaaaaaggttcaaatgtaaatatttttatagtctctctgtactagcttttttacgtcgagaacctaattataataaaagtatttatgttttgaccattttaaaagatcattgtacaaataggttcacaacactaaagagattagtgttatcccctatatcttggctatagggggcgagggtgttgacaccagcgtcattggtgtcgaggcattggaccactggcgtcaaaaaaggattaatttctaaaataagtttctcatagggccgtatgtaaaataagttttaaaaaagagccaaaacataaaaagttcagcttgctgctatctgtttcagagtttggtagctctcctggtttggtttggttcaggacgcgtgattgagcgtaattgacacaatgacggtatgacacacaccgtacccaagttgatcaaaccggatagatcagtactactgagcatggaggcgaagacgtacgtcaaaatccttttttgagaaagcggatggttaagcagagttgacatgcattttctgtgtggctggccggcttgatagatagctatgctgctgctgtgaggagaagaaaaaacaatttgatgtttggtacgtgagagtgaaaatagtggatggcgctttcagtgaaacttgtcaggtttggcagcttgatatgtttgaacaaattaaagggcgagggtttgcacacacaagcaaacggtttttaagcggttttaaatagtttctgttcctgtgccatgaaaaggaagggtttatccaatgtcaacctgcgaagttacaaaagcgatcgagtttggttctctctttgctttaatttatggtcctctctttggtgaaacagcattgcccttttgtggacacctgggatgacaacgtgctgctgggattgtagccaactaaaacaagtctcctatccctttttcacctgtagggattaacaccagaccgtcttctacaaccaggcgtagcaggcaaacttggcttgtgttgatggcttccgtgaactacttgctgtttgaactttacacaggttacctacccgaaaactggtctacgttgcaaatctctccactgtttgctctccattttgagcagaaatagacgcctaatccagaaaaggctatagtgcaggaaatagagatgctgaactgaaagtccaactacaattgggcctttgggaggcctttctgcaagtgttggacaactttacaacagggaagcaacatccatttctttcagtaactttactttcatacacattgattgatacaagcacagatcgaagatgggaaatggttggaatacaataggtcttcttcatgccttttagatcgtgggaaaatgagttgatgagctaccatcacagctttctactcagacgtaatcttcctattgaagctattcatctgtggtttgcccttctcccgagccctcagaaggtgtgtctgatgataatggccctaagatgccctctgaactgagagttaatccactctgtgaagagatacagggagaaacaatttaattcagccaaatgttactgcagtggcttatgaataatgtcagataaatttcattttgcagcctcaataaaatgatgatggcagtacctcaggctggaatcttaacatatcagcacgagccattgcctctgcttgagctatcctctgcctgaatatctgagccatctcatcagcctgttttgagacagagaaaacagtatgtcagtttgtatacattccagatggaccagatcaaggaatattgctttcaaacttaccttctcaaaaacaagctttggattgcgaatcatgtcaccaggtgtcggctcaagctttttagtagaaagactaacacggcctctttcacggtcatggcttagaatcataacctaatagcatttaaaaaaaatactctggccttagctctataaactttagatagtatacttttctcaagtacgaatgcaaaaaataccttgagcgtatctcctggttgcagaactgtcgagatgtccgcaacacggtcatgactaatctggctgacatggagaaggccattgattccaccaatgtcgataaatgcaccataaggtttcaggctctcgacagttcccaagacaactgaaccaataccaagctgagcttgactatctgccattgccttgcggttactgaggacaagcctgccttgttcctcatcgacctccacaaacttcagaggtagttctttgtcaagcagttcttcagcagttgatttctgatcaaggtcaagaagtggtttgtaaaatagtgggcagctagtgtttacaatgtgattgagaactaagcattggaaactaggatcaaatgttcagttatctgcataacaactttgacctgcagatgaaaggcagctcatgccatgcacatgcacatacacctaaaaccataggatgcaagaaagttttgtagtaactaataagattgagaaccaaccgatgacacttgtgaaaatggaacaaatcccttaaggccctccacaagagctaccacacctcctttgtttccaccaattacctgcggggcaacattgccaaatgaacaagtcaggtaaccgcagactaatacattacagcaaattcatcccaataaaactaagcatacaatcatataagctcttgcaaaaggattttttgatatgttgttacaaagtgactggtctagacttcaggagttcattgctagttgcacaggaacaaaccaacaaaatcacaatagtccaataaaaacaaaaaatttctggtcattgtcgcatctatagacgatctcagtacctgatcagtaagctctaccaagtaaacagcagcacaaatatagaaattatgaaatcatgggttggatgtcataaagtatgtacaccataaattaccacttgaataatttcttttcattaaaggacaatggctgctgctgtgagggatagattcaaggacaaagcctgattgttagaaccgaaacggtgggcaagaagaagtagtgcttaacaaacatttggttacaagtttaacaacagcaagctattaaaggagtagtgaagaacaatagtaatagcacagaaatatttccttctgcaagtatttttactcactttacccgtgacaacaacatcttctgcttgaagctgtctgcacctttcccaggcaaggtcttgctgaattgcttgtaagctcaaaatcaaagtttcatcaccaggattctcgtcaataatcatgaactcttctaccaaacctgcacggatccctgcctcttctatatggttgacatcgagaaggcatgcctcatccaaaggcaagaaagcagtagacttcgattggatatcaacatatgcaccatttgaagtggtcatgaacactgttcctttaatctgtagagattgcaagaacatgatagtttttagatgttaaggatagagtaatacatcgtttcaaaaaaaaaggatagaataatacaatatatgagaaactatacaaaatttgcaatatgaacagtatcttataataccaacatagcacaaaatattgcagcaaagataacagtactgcatgcccaaaaggagatactaacagcagaatcattgctaacagagcaaaattctaaggatcaatgcaaatctggcagctggacaaaatgagtttttgtgtccatgtgcatttgtaacgtataagagatgtatagctgattattgagtataatattggttgataaatagtaagcaattcttatttaaatagacataaataattacagtcaagacaagcagcaatcggtcagtaactgaaatctcatcgagtttggggttaccatggtcagctagttactacagggaatggatcaatggatcaactccagcttactttaactatcatttaatgtgaatttggctttgttttttttttaaaaaaaaggagaaaataactatataaagaagaaaaacagaccccacctgtatgacatttcaaggacatttctatcttttgaaggggaaacccctttttgatggaaattacatgtacatgaacatcctacatgtgctttggaccttatgcatattcatgcttcaaagaaatatctatgccctgatggattggtgaccggtgtgaggccatgagggtgaggtaggcatatgtatgatgttcgtataacttggtacacgtgcggaagcaatcaaagagaggatgtagcaaacacaaataaaaaccacacgcttttggtagatcaaactcttgctccaagcctccaataaggtatcatccccaaggaggtaaaaaagggaattcgccgttcaagtctaattcaccagaattgaatcaaaagtcaagcttaatttaaagtacatcaaattaatatgaactactctagcttacactgaatacatagctatcgtataaatctccagcctatagaggaatatgatatggccatgtattgctcttatttgaagtatcagacctacatatatatttttttagtaaacattattgaaaaaacaactaaattatttagatgaagccacacaattgcgtgagttctagcgttcaactagtttcacaaaaggcaaaacataacaggtaagggctaatgaaactactattcctgattatcactatacctgctaccactatgagcaggtcagaaaatggaagaggtacttgtagtaaactgaacattctttcgcttgtaccttaggggagtaacacattatagacgaatcatgatgcgcagagcacattccaagcaagcaaacaatagaattctagttgggtaactttcagtaaccaatcaccttgttgttgatagcctaaaacaactagcaaaccgaaatgtaacaactagtgacatatacagggcaagtgactccaatctcccgcaagccgtatccaattgagcacaaggtaagactcaagtgacttgcaggaaaacgaggcatcacctactgaaagttaagcctgtttttaagcaccaattgctactatctgtttcacatcatacgagcgagcaaggacgattgagaagaacaggaggaaggttgcggggggtggattacgagtgagccgatatcggtgtcgatgtcggtggactcgacggcggagtcgaggtcctcgggcgaaaggagacgccctccatgggcgcggtgcggcagcgctcggaggcctcgtcgaacagctggcacatccgctcccgctcccgctcctccttggtgagcgcgtacgtcccgcacaccagcgccgacggccgcgtgggcgccgcggggcggcgccgcggcgcgccggagagcggcgggctcgccagccccgcgacgtgctgcgccagggacgccattcgcgctctcggcctacccgctgtggtgtgttgtggttgtggtgtggtgcttcggggcgacgagacgaggcgacggcagcttttcgggttgagggagggtggctgtgttatccggtggccgtgggggtttagccgtttaggataggcgatgggtggttttgggccagcccaggtaagaattccctcgcaaactgtgtgtgttagtattccgtctcggttaattcagctattaatgaggaaaggaccggtctagggtgtgttaggataatagaaaatagaagtaggattgagattagaaaataaacgaagggttaggattaaatagaaaagagggaatgaatggttagaacttaacgatgtcttttagtaggtgaaaaattatttcctattcctattagccaaacactgcctagggagtgacggattcggattaatagaatttgcgcatggccacttaataataacgagaggaaactactgatcaagtggtttcatcgaggatagttataactctaatatattgtaatcatatgaa

SEQ ID NO: 9314 - DNA, 5006 bp, Oryza sativa
cctctatcgtcaccgccccttctcctcctcgccggagaagctcgcctcggatccctcctcctcctcgtcatcgttgtcggtgctcggcccccgcacaccgccgctcgccgccagccgcgccggccaccgctcgccgccgccgcctccgcgccgaggccactgccctcagccgctgcccccgcccttcccgaccatgagagagagaggaagagtgagaagagtgaggagagtgagagagagaagagagagaagagcgtatgacatgtaggccccacaattttttatatatatagaatgctgactggactgccacatgtacgtcacgtagaccaaaaccaccgcagattgggtcgaggggagtaattcgtccggtttgtatagttcgggatgaaaaatgtccggttttgtggttcagggggtaattcatacgaccgcgatagttcgaggggtaattcgtactttttactaagtgaaaactttaagttagatatggtccaatgtgaaacttaggtaagaaaaagtagtccaatgtggaatttactcaaaattctattataataagagaaacaaaaatggttaaacacggttaaaacaaaggagcattttacatctgacaagcattctagatggatttttttagatagtggaatttattcctgacaatgtggtgcctttatttgttcctcgtagcggtcggacaagccatcggaggaagccgaagaggaccgggacgggaacgggaaccgccggctgtggctgcagcgacgttgttgttgtccccctggtcggacgccgcggcggcggcggcggcggggagaagccgcagcggcggcattgcttggtggccgcggagtggtccccgtcgcccctcggcatgttgacgccggcgctagccatcaccatcaccaatcatgtcatgcgagcagcagcagaagcagcatccaccatgggaagagagatgcgttggaggaggcgagaggaagaagaagaggtggccgtgtggctaaggcccaaacacaagggcccatgagcataaccagttccttccgttacattaaaccctagacgctcctcctctcctgcccgcgcgcagttctgctgcttgctgctccggcgctggccctctcttctcccttctccgaccttgcgcctccctcaggttccccgcttgttgatctgcctcatcttcttcctatttgatcgaaagccaatttgcttatctgtgaatttatttcgctagccttttctgatgccatctttggctcttggatttgaaggctgaagatcgattacatcgcaggacaggacgcgcaatcgactttgcaggtactcttccttccttcctcacaattgtctcctggatcttggtatgtactactgcttaaatcgcctctcgacaaacggatcccctcgtttccttctgctctgcaaataatccacccgctttttttttaattatttccctagctttgaagatattttaagtatgtctccgtcgacgattgatttctcgcggcggtttcttaatctgatcgtgggcaaccgcacccctggtgtcaaatcgctatggtgcttcgacctgatgcgccagcagctgttctatccggcaacacctccaccgccacacaaggttgaggaattctggcaaaagtttagaccgccgggcacaatgatggacagcatggggcttcccttctcctgcttcaccttccgagcttcagctctcaacgtcaacggccaatcgaggatggactgtttcccgcttgctggcggcgaggtgatttgcatggatcagtctggccgcgcgttcctcgtcgacgctgatgcgtgccaggtaggaaccatgcccagtcttcacaagcccaagtcgatgcccttggccgtcttcgtccccaatgccaaggctgacaatgactatgaccatgatggctatggcagcagcctctttgtcatggagaggattcccaaaccggagttgggcttcaacagcgatcagtttgaggccttcatataccgcaagcctacaatatccaactacacaaaggcctggcactgccatcaactcccacccccgccttttgtccgtgaacccaagcactggcacagctgcagcaacccagagatcagctcctacgctgtgcttggcggtggctcacacatttgcttatctgtcaatggcatcggcacctactgcctggagacagcaagccacacatggagccaagttggcaagtggacactgccgttccatggcaggattgattatgtgcctgagttcaacctctggtttggcctctctgctgaggcccgtcgcttggctgcggctgacctctctgccatggactcctagccacagctagtgggcccttggaaggaactcaacctgccagaggaatggagggaatgcaaggatcctcaacttgttaaccttggctcaggcaggttctgcatcgctaggttcttccgcagcaacagtgactttggggatgaacaaattaccgtgtttacaggtgtggaggtagtgccacacgtcggcgatgccaatggctatgcaaataagggcagcaatgggaaagtgcaactccaaatgatccctcactgatcaaaatgtcacatatctaatgctactaccatcgatgttgtgttctgactaatattagtgctggcatccttttttatttgtttatattttatctgaataagagatgacttagaatattgttgtaagagatggtctccctatgatctctatttactagtagtgcggtattgtatcctgcaatggtagattctaaaattaactgaatttagtcccctttcctaagctcaacgagtggccaggagggctgaggtagaagaacccgactgaaggggtatattggtcaacccaagtgaaaaaatggtggaaatccagtgaattggcaaatatggcaaagaaaaggtttggtatcgcctagggatggccttttaacgaatccaatccgtggaatggcatttgagcgaaaccctcttttggtagtggcagaatgtccaatttctcgtttcgttcaacacaattgtgtgttactgaaaacatgtgtgatgtttggaatttcagttcaaggtgttgataatcacctcctaccctgttgctattgtgacctgtctggctgacagataattaatctgtcatgccacaaattacatgatgttcctgtcaacgattgagaaacccctaagttgctgatatgctgcaatttataaatgccaaccttatggtcaatttttttaaaaaagaaaatttataggaaatgaacacttcccctatgtaaggttcgtatgtgtggcaatttggttatgcagccctctaaagttatggctgttaaagaaacagtttgctcatctatgctttcagtcttcaagtatgaaaaaataaaatgagaaaaatcataataatatgcttgtttatcacctgatacatcaaatcttcggtacccagttacatggcagagaatttccccaatacaacattttgcactcaaatactttctggctaactggaacttcctttagaagcaccaaagagaagacaagaatacattgcaaaattacattacagcaaattgcatgaatatgctgacctaccacacatgtttattccaatactatgattctataatcctaatttctagtcattcccgagataactctcagctcagctcctcgttgctgagggcatgataggggccatttccttcaacacaaacataattatccgcgttaacaaaatctctccttgttcgatttttttctgtttcctctatattctgtagtccatagttactttcatgtttgagcatgtggctcgttaggtctaatagtgggagaagtttttttggaattgtgacgggttcaaggacccgaaaaaaacataagtttgtttctgatttaaccaaagaacatcaacttgattttattgttttatctgagacggttaagaaggaattttctacatctgctctgaataatctttgtgttagtaaagattttttgtggcactgtaatctcctagaggcagatctggtggtcttctttaggaattaatcttctaaattttgacattggtttgattgatgagggggatttttaaatccaattttctttacggaattaggcttgatatttttaaatgggcttaagttttggtgatgggcccggcccagaatgagcttaaagatcaatcccttgaagaattagttaacatgtgcagtcatgagactataccaattcttattggtggtgattttaatattcttcgtagtcctaatgataagagtaataccaattatgatgatagatggccctttttgtttaatgctgttattgatgggttgtgccttagggagatacagttgtctggtaggaactttacttgggcaaataatctagcaaacccaacctatgagaaattggatagagtgttagtatcaacggaatgggagcaaaagtatcctttatcttctgttgttgctctaaacagagatttatcagatcacgttcctttgcttctaaatacaaaatcttcctcttttagtgacgctcaacattgttttcagtttgaacttggttggctgttacgtgatggttttgtggatatggtaaaggaggtttggtctgggttgatgaaggcaatactcctatggagcgttggcaggcaaaaattcgccgcttaagacaacatcttaggggctgggctaaacacactagtggtttatgcaaaaaagagaaaaagcagatcttaaataagttggatgcgctagataaaaaggctgagactgttgttttgtctcaagaggaggttgatcttagatggtttttaaggaataggttatctgcgatcttaagggaagaagaaattaaatggtatcagcgggctaagactaaggatattatggacggtgactctaatacaaagtattttcatttaatggcaaatggaaaacacaggaaaactaggatttatccaa

SEQ ID NO: 9315 - DNA, 5691 bp, Oryza sativa
cgctggcaggagagagagagatacacatgtggatagggttagggatggatatggtttcctcaagggtattttggcattacgaattttatttatatttctttgtttttttaaatcaaatcttaacggtgtagtggaaacagggtcaagcggaaggttcgtttttgaaaaacatggtcaaataagcaaactaaaaaagtagggttaaattggtagttagacttcaaaatgggataaaataagcaattgtccctattttaaaagataaacaagtagacagttgataggtccactgatgcacgccccctcacacgtcatgagtcatgatgaggaaatgcaaacgctgggacccactcatatgcctcttgcaccccgcacacccacccatacactttagctggacctttggccgctctaccctctatcaaagtaggaaataacagcagcaacaacagctcacaggcgtaaaagcttacacacctcctcctactcctcttccacgcgcgtcagtgggccgcgctgcaccgcgcattgcttcacctctgcacacctgaaaccgaaaaactcaatttggagtgaagcacggagagagagagagagagagagagaggagagaggtgtcttggacggaagtttttgaaaaaaaatttccccaacctcgtgggcacgatgccgtcatgatccccccttacgcctcgctgcccaaaaaatttcaatatctcgcccacattaatcaccttcctcacgaggccaacgagcacaaatcccatttcatcatcattcataccaatgctctcggattcttccacgtccccggattcagtttcctgctcctctccccccctctggatccctacttctcttcccctcgttccagcgcgctcgccgtcgcccgccggcgtccggcgaccatggaagcagctggagtggaggtgaacggacgaggaggaggcgacgtcgtggtggtggtgccccagcagcatgaggtggcggcgaaccaagcggcgatggcggcggaggcaaacgggaagcccgtcgaatccaacggggtccgcgtcgtcggcggacggatctatgatccggagaacggaaagacctgccaccaggtaacccctcctcctactcccacctacctgcctgactaccatgtgttcgacaccgtgtctagccggtgtcctatgaggagtggtgcgtccctgttcttcctccccggtggttgggtcgggttggatctgaggaattcttgctcgcccccccttgcttttgcggggaattcttgctcacccttgggtggagcggttgctctgtttcttgctccctcgcagtgccgtcagaagacgatggacttcgccgcgtcatgccacaagatcaagaagaacaacaagcagtgcacgatccagtactgccgcaagtgtctctttaacaggtgaggggggaatttcttctcgtcttctttcttagcttcaggaggcagagcaaggctggctgaccatgtgatttctgagtgattcgtggcgcaggtacggccaggaagccgagaaggtggccaatgacggcacctggacttgccccaagtgcaaggatatctgcaattgcagcttctgcatgtgagctgaccaaacctgatgctctaccggtcatgctgattatctgtggctcgcgttttgttgtcagaagtgatggatggactttgatttgtttggcaggaagaagaaggggctgccgcccaccggaatacttgcccatgctgctaaggcttcaggttgtgcttcggtccatcatttactgaaaaaggggaaagaagcggtggctgccgcgcagaggagcacccagaaagtgagatctacacctgtgaaggtgtgtggtgttcaggattggcacgatcctttgtcacattacaattcgctgttgcatggtacgattgttcactatgtttgatatgttttgctgatcctttttttatgaacaagcagaagagcccaaagagggccatacagccagatgctgctgctgatgaacctttggctgaaggggatgagaatgtatgcattgatttcaatgctgctccagtgaagaagcagaagagaagcaggaaggtgggtaatggtgtggctctgacgaacgatgaaagccctgatgctcccaaggaacaagttgttctgcccaagggcactccagtcactagtgttgccggtgcaaagtgggagcctgaagatgttggtcttgcacttcagttcttcgaattctgccgcacatttgctgaggtagttacgaaagaaagatcaaggatatttaatagtatgattgcacatgccttgtcagagtaatatcttactagcatttgcaagagaataatagatcgagttttttttttctatttacatgtctgatgcatgttatgttttggtatgaagtatgacaatgtaaaaaatgcttttactggtaagcaccgaagtgttgatattagagcttcctacaagtttggaatcatatctatgtgtttatgtaggtaaggcatgcaatgccatgatgggatacaaatcataaagggaataggtattcggattagaatttggagagggagatggtggggtgaccgggtgacagcaaatgggcaaaaggaaatatatgactacctgttgagttcattgtacgcattaaatggatgcgatttctctgcgtgcaacatgctaacacctagatacaggctatctgttaattgccctttaatgtgtacaatattcgagttcctatttgtaattatgaggtttcttttttattgcatggcacttcttgtccatatgatatacatgttaacattgataaactggtcgaaaccttccaattatatttcttggtttgtaatttaagccatgtagtagctttcatataacccaaattaaatgttattatgttctgtcgaatttttttatttgtgataggctgcgtgttcaactgaactaccaaagctatgttttaaagttttttttttaaggaaactaccaaagttatgtttcatcctatacaatatctcttgcaaaaggtatgtataaagctccattgttttacacatagtttgagcaaagttcaaacttctgagcaaaacaactatctattccatctgttccaaaatataagcatttctgactatttacctgaacggaaatgcttatattttggaacgagggagtaagtgatagcgaagcttattcttttctgtgcgagtttataatttatttcttctgttatagaccaaacatccaagtccttaaggcataattttggtaaccagcaaaacattgtaacagttgttttattaggcgatgtgatagttatcttaatcttttatgtttatttctaacaagtgtcatggaacaattagtgtaaaatttttgcaactaccgtgagtcctgttccattacaattgttgcatcatacttcctccgtttcataatgtaagactttctagcattgtctacattcatatagatgttaatgaatctagacatatatgtgtgtttagattcattaacatctatatgaatgtggacaaacctagaaagtcttacattatgaaacggagggagtaacttcttagtgttttttagagttttccttttgaattcgggcttaggatcgctttgcgttataatctgaagtatttagtcattgccgcaagtgatcgctgcgatgcaatgcgagcagagttgagcgaacagtctgtcatgtaagagtacctgtatctgagcacaaactaaccatgggcgcgtcatgcttatatctaggatgtactcaataatttacaaccccaagtgtatcgttttacggtctgatctcgtgcatatatcgtgcatatgctctctttttgcttctatgtaaactccttgtttcaataataataatacaaggataacgcagtaattaatttattgagattgctgtgggcgttggttttgaactattcttttttctgctattttgttttacatatataaagcatgcatttattttctggtgtacttaacaatttgagaaaatagtcacagtttgctgctagcattacaggctttttaattgaatcagatattttaaaacaatatcttgtttccttagttaatatactaatctgctctacatgctcacatggtacattgagattatattttgtattgcaaatggaataacatactgatttttccccacagattttccaagtacgcaagggtcaaccagaaagaatccttcgggacatagctggaggtcgtggacttcgagtggtgtcctcagtcatcgctgacttccacataactttgttatccatcatccaagaaggccgaggaatcaagtaagtagatcccaaaccgagccttttttttttctaaatgcagttgataaaattataattatgttgttttcttctcaggcctatcacatattcaagagataatgatgcatggattgttgatactggaaaatgcataagcgagtcaatctttgtcccagagggacttccccttgactccctaagtcagggggtatcgggatataaaaatctgagcccttcttgtaagctcagtgttctgaactttttgtgtgatgaaagtctttctactgagtaagtattgcctacacatttgttaatacttcccttcgctattgtgatgttgttatttctgattttttaaattactcttaacattgttcaggaagttgaggagctgcatattatctgaaacaaaaaacccctccagagaaaaagctcattctgcaaaagagaaggttttgatcttggcttgcctttcccaccttgtcacatggttctagaacaattgacaaaatatctcctgtttgttaggaggagccaaaagaagaaactataaagaacacagatgaagcagtgcttttgaaaactgaaggagcagctgttgctattgaggaagataagaatggcatttctcaacaaaaggatgtgaaagaagtaaagaatgcagacacaaatggtatgaattatattgctaaacatgcttcgtcatagccttttaaacagattactttagaacattttgcatgatctcctgcactgtttatttcctgtaatgcgaaggaaaataagctgatcattgttattaattttgttctcaactatgaactatggcaacatcagaaaagaagcatggaggtttccttaggactaatcctttcatggtagacaaaaaggtaatctattggaagctggatgactattgtaataacacaacaatgatgctccaaggtttgttggaaagcgttattcaacatccttccactaatttcagttctgcattataaaattggagacgattaacatctgtctgtatcagaggttgatgctgatgatttaatggggaacaaagacaagtggtttatgcttaatgaagatgaaaagaaaatagttgaaaactatttatccacaaggtaaggatttctccatatcaatttatttggatttatttttatctattataaatcaggaatgcatgctgattggtatgctggataagtcaccaaaatattttggtagaaacactatttgatattttatctgcaaacaaaattcgtgtttttaataaaattttccaatgattgaaccacctgtacattgtgatgtacttgatgggtatatcctttgaaggagcatcctaagtaatatgcact

SEQ ID NO: 9316 - DNA, 2208 bp, Oryza sativa
ttgttcaagattttattcctgtccaaaaaaaaggcaaaagaaggctactaatgaacattgtgaaactagcattattcctgttcctagtgaatcttcagcccaaaatccttgcttagctccaactatgtcatacccaccaaccaaaagctgccaaagtgggaaaaaaaggacatactattacttcatcagattcaattaggtattttggttttcagatttcattttcactgatcattttgttttttagttacattttcctttcaaagattattgtcttacatttatgtgaatcttcagatcaagatcagtgacaggatccaaccaaccggaacctttgagtgtgctgatgccactaccagcactagcacctgacaagtgcaaggccaaggccaaacccaagacaaagactaaagccaaggtagccactaagaaaaacaaggaagatagcactgatgctacacctttggctcaaatcaagcgaaaaaaagttgttcccgtgactccagatagtccagcaatggggacaagaagcaaaaagaagaaatctctagattttaatttatactaagcatgtgttgaattattttggtactgtaatatttggaagttagcttggtactgtaatatcttggagtactgctctagttaatttgcatgttaggactgtgttagtatgcactgtgatgagtgctgatgcactataatgtattttggtaccgtcaatatgtattttggtgttgtgaggtcatttgaacctttatgacatgaccatgtaatattttagagaccttggtatactgcatgtccaagcttttgttggagaactacttgtttaattcatgtctttgtgaaaaatatatgctatggtagtggtagaaatgttgtatatacaatattcatataatcaatataatgctgaaaattattcatataatcaatataatgctgaaatgttgtatatacatgtacatgtcaaccaaattaaaaaaaaatgccaagtaatggtactgcctgcctaacaactcaggggtaaattcgtcttttcactatcaagttaacagtcaacacacagtcaactcacgtgagtggcatgagagggtgctcaaatttgacccaatggcatataagggaagagccaattttgtgtggcatatcagggatcagaccaaatttcaatggcatataagggattctctctttatataatgcctgatatttcatatgctcgttatatcctgataatactagaagatccatgtagttttttgaatacatactcgatattatcttctatatgtcttgccttctagaaaatatttttcaggaacaattgagcactcgagtaggttgtggtcgagtacacccattatcgagaacattctcgacaaatgcggagttgtcgcacccaacctaccaacgaagaccgacgacctatctcatagcgccgaccatggctgggctattcgagaaaaggttgttaacggataaattctcgtgaacgttgtcggcttgatcacccgatatgattgcgagcggatatccggatatgctataagttgggtatgtgagtcatgctggccacatgaggtgcacatgtaacaaaccaactttagcacccctataggtgattgagaggctcctactcctggttctcgaaccagtaggacgtagcgatctctcgcgccttaacttctgatggtcgaggtatgactacggcaatagcgtagcggtcctcgcaccacgagttcagatgacttcagatggttgaggaacagctatgactgatcttcgacagacagcatagcggtcctcgtaccacgactccaaatggtcgagagacacctactcactagttctcaaccagtcaatcgtagcgatctctcgtacaattacttctagtggtcgagttatgactactacctagtcctcgaccaatggtgtagcaattctcccactatttccactttaagtggtcgagttacgactactacctggtcctcgactagcggtgtagcgattctcccattattttcactttaagtggtcgagttacgactactacctggtcctcgaccagcggtgtagcgattctcccactatttccactttaagtggtcgagttacgactactacctggtcctcgaccagcggtgtagcgattctcccactatttccactttaagtggtcgagttacgactactacctgg

SEQ ID NO: 9317 - DNA, 7434 bp, Oryza sativa
tcatttgctttgaatgttaatcgctgttactatctagttattcatttgaacctgcaatttatagtcttttagcaactaatagtattgcatacacatggatgattgccatgcctcatgaaaagcttgtgcactcatctacatatagtttcttgcacttaatatgtaataactagcctatagagtcgttcttttgtgtggctataacctccctctttattgaatatgcttacatgtttgcagcaattagcttaaatttgcaataacaaaacaacgcaaatatacaattatagaacatacttgtcaggaagtgtaactacaacgttaacaaatttatcttgatttgtaattaacagtattatcaggacaactaataatttatcgtgcttttgcgtgactatcacctccatctttgttaatttttaaatgtgtgatttctagtaatattgtaaataggtttataaagcaaatatgtggtacgaagtgtagttacaatttaggcaaattttgctacaggacattgcaactttgtgattatagctgtagaacaccgcacgtactcacttttggggaaaaacactctctaagtgtgtttatttgccagtggacaccatggccattaaaataatatatttgtgccgacatggcgattggggcccaaaaattttacacggagtgaccaaactacccctggcgataggggccccatctgtcaggcttatcttctacctctggtcggggcagagtcggagtcgtcgccgcttgaccgccaaatccggctgctccttttgctctcgagtaaaattagttgaggggaagtcctccctttatcctcctcaaccgtttccagcaagaccatgacgaggaggcggaggaggtggagcacggcgacatctagtgccacggccgcaggaatatgccgtgggcgccgccggaccacccgcgcctcctagagttagaggaggcaccgctggtatgcacagcttcaaatcagccccaaatacagcagctccaagccctacccagcgcacaagccacggtagcaaagcgagcagcggcactgagggcgtcggcgaggggagcagcagtagcgatggagcaagcaggttctcgatgattgacggagcgagcaacggctacagtggagctggtcgcagagtgccggcgggacgtcggcgaagcaagtgaaaggtggcggaggcgagctcctcgcggcggaggcaagcatatgtcgcaaagcagattcgacagcgacgatgaggtgttggagatggcagcgagctccatcgtcatttctttttctttttctttttcctctgtgatttttttctgcaggatgaaagacttgatcgaatctgattttttttcaatcctgtggatcaattatcgtggatcaaatctgatatttgatttgaatatagctagcttagagagagaaacagacaggaagagagaagatgttcttgggtagctgtagagagaggaagggaagaagctgctgccaaacatcacctgaacgcgcaggggcagtttggtcactccgcgtaaacttttgggtcccctattgcctcgtcagcacgaatacattattataatggacgcggtgtccactggcaaataaccacatttagagagtgtttttccctaaaagtaagtttgtgcggtgtcctatagctaaaaccataaaatcgtgatgtcctgtagcaaaatttgcctacaatttattgttctgaaataaacaatactatcctaataacaaacaattaaccatgattatgctacattcgtcactctagtcacgtcttcgtgagacctcgagtagctgccggcaatcgctttatcttctaacattacacctttgttctttgtgtccactaccttgagcattttgcttaacccaacaatctcttcttgaaagacactcaactatcacctcaaagcatataggtagatgaaacactcaaagccaacttgttcgttacataaaattatttgagatgaaaggatttacagttccaagggtgtcctgtaattaaaatgtaaatcagtcaacagtcaaaaggttcatatctcttcaataattatagaaactaaaactatgcaaaatggcaagtaacttcatgagcattaaacgttgtagatatcttgtaggatcatttgcattgtcagatctctttagtcctggatcacattcaaaacaatgtaactctagggggaaaaaaggtaggatgctgagcaatatgaaattttcacttgaaaaaacagattatattgtacatgtgacagtattcatatattggtactataataataagataagataatagaggcttaaataaaccgtcaattgtaaaggagctgacagcacggacatgttttaaacccaacaggtgggatgagccaggtgcggttcatgccataggagcaaatgagtgatgacacataggagagcctggcatacaacgtaagtactccctcgatccaaatgtgttagacctattacttttgtcaccaagaccaaggagaaattaactcatgctgcatataacaaagaaaaatgagtgtataatacagcctatttagtgatgagaaggcagggagctagctagctacctttggtttgaatgactcagcctatttaccgctctctttgactggtcaagctattggaaatgaaacatgtctttagattgagcagagaactctatgcattcgaagctctcctagaaattaaatagacacctcatgttgaaatgggagcatatatgagttgagcttctgagtgatgagaagtattaatcctatagtggttatgcacaagaaaatttcttttaggagtgtgcattgctttttttgacaagatgtagatgttttaacagccggttttcagttttaagattctttaattccatctgatgttcttactttgtcttgcaggtgactgaacgtagcgtttacttgacggtgtttaggagaacctagtcatgcctggtgtttctttccaggtgattaaaacggaaatgaaattgtcaatatcatatcagtaggggtggctgattgctagtctgtaaatcgactcttctctgggtcaatctcgtatgctcatgtcggcaatgtatgccacgattctataaaacttgatattgaacttctgtttcctacagctgcaatgcccaaagttcatcgcaaattcttggcgagagaaggaaagctaaaaatctgttcggttgtagttccatataaccttagccggaagaggaccctctgactttcttccttctgactttgagtcactgatacgtgagtttattgggtagagggtccacatatcaatgatataagttaaatataagtaggttagagcatctctaacagtctatccaaatttgactgtccaaatgtctatttggccaactctccatttaatttagcaagtcaaattgtcttttactccaacagccactctattcgtcctctatattttgagtttattacaattgggctcacatgtcagtctctacacctccttctccctcatctttctcccattctctccaaaccccccttccctctctcatctgccgccgccgccccatccccatccccaccgccgctcgggctgtgtccccatccgccgccgccgctgctcaggctccacccgtcggtgccgctcttggcggcaaatccgtgcgcacgcaaggcaggctcgaggcgacggcgagggaaggccacaatggcggcgctagggcggctgacactgggaggacgacggcggcggcgctgtgagggcgacaacgacgacggagccgggaggacgacgacgtcggcactgggcagatggtggggcaggcagggagggagctctcttcgccggcacagggagggagctctcttcgccggcggaggggtggcgcggatgggcggcgtcggcggagagaatgctacgggcggcactggatttgggaggaggagagaggctacaggagggagagagaatagaggtggggcccacgatttagccagcgcgagcgactttggccagccaggctgttggagtgcaaatttgagccaaaattgctataatataacttggaaagtgggataaggaggctgttaaagatgctcttagcggatctcaatctaccttagcagattgggaaagaaccaccactccaccagtaggcagtagcagaagaattatctgcgagtttgttttctacaagaagaataaacaaaacctgcagggcggcgatggtttatcttctcttctctgcatagaagggagtggttcccccacccacgtaactgctactagaaaattgatcgttcgccctgtccttccagggaaaaaaaacgaacagtttctctagaaaaaccagccaatgttttttagaaactactccctctgtttcacaatgtaagtcattctaacattttctatattcataataataataatgttaatgaatatatatatatatatatatatatatatatatagattcattaacatcaatataaatacattgtgaaacggagagagtaaaaactaactgcctacttaaaaacacggcaaaccggtttgtttttataccattagatgacatgggtaatttgctagttactgaagaagtattactactgcatgaaaactatcgtgcatcgtatggtacaaatgcaaacttaaacatagtagactagccaacttgagggtttgtttgtcacaactctagttttagctccatctcttagagcatctccaacagcttctctaaaatagactctccaaacatccatatagccagctacccatttgatttagcaagttaaagttgttgctcgcttcaacagcctccctatctaccctctccattacaagtctataaccaatgggacccatatgtcagtctctataaccttcttcctcctcttccaccccattttccccactcatacataaaccttcctcctcctactggacttgcctctgatgctgcggcgacgggtgtgcgggacgggcttcagcgagcagcggcgaggcgacaggcagcggcgagcggaggccgcggttgcaacgagcagaggcggcgcgctgcgccaagcggatgccggcggctgcggcgagcggcggggggggggggggggggggggcacccctagcggaggccgcggttgcgacgagcggaggcggcgcgctatgccgagcggatgccgacggctgcggcgagcggcggggcgggccacgccgagcggaggccgcggttgcgacctgcagaggcggccgaatgaagacttctccttctcatcaccgtcccagcagttccaccactcgcacggcgtgccgatgcagcagcagcagcgagcgtcgtccacgcctatggggacgccgccgacgccgccgctgtcgacttcgtccaccgcggcgggcgctgggcacgacctgttcgaggcggcggagggcagtgctaaagagagagagagtgaggctactcggagggacggcggtgctgcaacggatggcaacgctgctactcctcgccgttgcatcggaagaggtagcggggagagcatttggccagccttggggatgtggttgtggctggctagatttagctagttggggggagtgtttggctaaccatatagcttagccagtgggatggagatgctgttggaggctattttttctctgctatggctaaaatttggcttggagagtcacttacccattctcttggagatgctcttataaaggagactagctagcttcactcagttgagctgggtgcctgggtaaagctctcacaaaatgaactaaagaggtggagctagatttaggctgctccactacttcactctagatttaacttttgaaactaaatttagaagttgtaactctaataaataggtattttaagaaccagttggtcagtagtcagcttctgagaatatgaaaaagctgaattttctaccttctgagtttctagttcattttataggttctaagaatcggaacgataggttgaactgtttaaaaaaacttctaattctggtgaaaaatctcccttagggcacccgcaatggttatctataagctttctataaaagatccatgtcagcatattttcctacttggaagagattaaatgaaaagagagagagtaaaactatctactaacttggagatagtctatagataaaaagaggcaattgatgagagagctatagatacctatgtagacatactattgaggtggtttactattaatcagtctattgctgagatgtacatgttttataaagagcacattactttaccgttgcgggtgctcttgcgcggccctcgaattcgcaattcgctcggcaggatttcaacattgcggcctactgcttctgcagcccatgatccacacacacactccacagcccacagcccactccatcctctctcccccaattccccatccgctgctcatcagtcgcacgtaccacaccagcatcctcgcacggtcgcgacccctcccgcacctcaccaggtagagagagagacgacggcggtggtggcgggatgttcctgcggcggatcctgagcggcgggggaggggtggcggcgctgcgggcggcgcgcgccgtgaaggagacgacggggatcgtggggctggaggtggtgcccaacgcgcgggaggtgctcgtcggcctctacacccgcaccctcaaggagatcgaggccgtccccaaggacgagggctaccgcaaggccgtcgagtccttcacccgccaccgcctccagatctgccaggaggaggacgactggaagcgcatcgaggaccgcatcggctgcggccaggtcgaggagctcatcgaggaggcccaggacgagctcaagctcatcgccaagatgatcggtccgcatttctccccctcccctacgccccatctccattcctgtcgcttatttagttacttcttgtattaattccttattcctcctactgatctgtcgacaagaatcagggtagttgatgtgtagatgtggccactggctacccatttctttgattcaaccagttatttgatccgatatacaactgatccgtggacaataacatcgtagcgattggtatttgattttcttttggctccctttaatagcactggtagggcaaattatcagcgttgacagtatggtgtttgccagtttgttgattggggagggggggggatggaatgctttttaggttgtctgctgtgctgcctattagtaaaatgccttaattatttttcagcgcttatttaaggatcatggatgttccattttaccttttggtcactaacctaagattttttgtgaactgactggtgcttgtaacttaaccagagtgtgttcattgccatattcaccatactgttgctttgtgtatgtctggtggagtgcca

SEQ ID NO: 9318 - DNA, 4097 bp, Oryza sativa
aacaatttggacaaattctgaatttgatggaattttgacaaaatttcagcattttgatagaacttaaacaaaattttgacaacattttgtaaaatgtaattatatgttccctttagatattagtcaatgtgcttcatttaattttaaatatactcacaaaaataaagttctaaagctacatgcataaagatggggacaaaaacacaattaatgaacatacatgagagggtataaatgccattttgtcaattacttaacatcattaacttcaccatctaaagtaggggcaaaacaagcgttcagttaaaaaagtgagggtaaaaaaaatcctaaaaagtaggggtaaaatcaatattagacattaaaataggggcagaaacaaaattgtcccttgtttgaactattgtggcacttaatcacattcgagcatggttgccacctgttacttttgaaggttgctgcatcctatatggttggaacgagttgtccagtgacctctacgagaagattgtgaaggaggcttgatattagttgtctgtgatgccccagtaataattaggaaaaagaaaaaagagaggaagaaaaaaaaagcaagcagcaaatataatggacgcatagagcaaagctagctagcgtgcagcactagtctggttggcctttgggccttgaccggcccacgcgaggagtagcggtgctatcaacgtatcaggctagcagcaacaggcagccagcaaagcgcaacaagctagctggtcccacatctctagtgaagcttgagatataatactagcttacttatatattaacatcaaaattgaaacttttttaaagcgaggataaaagcacatagtgttacattgtaagtgtgttaacagtgaaatttggtaagcccctaaaagaattatcacatcaccaatagtcagattcctgctatatttggttaagaaaattaatctatcaaagaaagcttatccagaagtgacagagttcaagaaggatgcggcatgacaagttatctattaattagaaataatttattagttttcttttcatctttaggaaagtgtatttaatgtcctataaggacttatatgttttccttttatctttaggaaagtttctttattgtcctacaagtactagtatgtccccataggtataaatatgtacacatggggtcattgtaagagatctccacgatcaatacaattcgggccatcgtcaccttttaccttttctattttattttatcgtccgacgggatttggcacctaacgcggggctgcatcgcttttcgatctccggcgaaggggtaggtcaaatgttccgccggcctagacaattatatcgtctacgttggcgtcgttcaaggctgcatcaatacattcgacctcttggattgctcaggtttggatgatatatttgtctgcctttttatcatatgtcttagttaatctattcttagtatatcaatttagctctatcggttgtctctcgctttagggtttctgccggtatcggctaaattgttttactagattagattagataaggcatctaccaccttaaaaattaattagtcaagggcttgattgtctagatattatgtttcttttcatacttagtgctgcatcagttaagtttgatctactaaaccgtgtttagaaccataatctctagcctgcttcttgactgctaataagggtttcatcggggtttcagccaatgaggtatctagatgttgcatcggcttacaagcattacatacaagttggatttagctaattgcaacaaaggtttcactgtttatccaatcttgtggattttatgacatcagacctctagccgatgtatgctttaatcttcggatcagtgcttattctatcatatcatttctagccgactggtttctactggattatattgtttaattatattgattatcggccgattgtctttatatcattatatacattggacgtatagccgattactcgaaaccctatcgctatcggctggtatcggtatcggctagaactattccatcggcttgtcaaccgatcagctgttttatctattgtttatatatcttgtcggttgcaggatcaaactgactggcacgctcgcatatcatcaagatttggacctgcactggagctaagcagatctcccaggtcagtgtgtatttttagcatcaatagtatggtccaacaaattgagttgcgcctaaatccgcctttagaccctaggcatcacaaccaccttcagctgaaggaataaccgtcctagtgatcgagccttatatgaacaacttcaggtttggcttccaccttacccattccttaactaggggatttggaggtttgacggtttgatcggtgaggttgggctcttgtgtaaaccatttggaaaccggctcccaccttaccgtgagttcttcctgctgtgtagttgaacatccaaaaccctcggtacgcattcactctgtttcgtatattcaatctattcatgttttacgtactgtctagttttagtttacatgtatagattgtatgatacgattatgctagtttacatgttcaatcttatgatttatttatagaataaattaaatcaatatgtatatttttaacaagggtcaccctgactcttcgttggtatttgattagtgttgttccattaatcatgatgtgtactttgccggattccaaaagctgtttaatccatgtgatccaaactgaattaaacccctgtgcgatagtatggtgtagagacattcccagtttaaccatatgcacaattttagggtaaataaacatttgcagtgtatctactgcattacttctatgtgtttattctttctttattcacttttcagggtgctcagattgttggaatggttgcagaagcactgaatgttccagcaactgccaaactatttgattaaggccaatgatgtactgggtatcccccaaccttttattctatcaatgtgatttcacctgtttcagagtacttgttctgccatgttaccaagtttctgtgctctactccaaagttgaaaaaaatagtgatcatgctaatgtttttaaatcaatggaccaaaatttgttggatctttgaatcaatggaccaaaagaaaagcttgattcaattaggtttgttgatgaatctaggggttgtttagattgatgacattttaaaccataccaaattttctaaagttaccaaagatgtgcatacatttagttttgtaccaaatattgctaaatacataaggaatcctgcaaaaacttggcaatattgataacttaccaacattctagcattgccaaaatttgataatgtttattttggctataatctgaacagcccctagttaaacacctctatattttcatcttgcaatttctgctagaagtctagcccacaatttttttgagaattcccagctatgattttatcaacaattgtttgagtgccaagtatgacatatttcagatatggttccggttattgtcagttaaaaaagttgaattcttatggtagaacaatactttttttagccatctatgtatgggacttcctccgtttcataatgtaaaattttctagcattgcccacatacatatagatgttaatgaatctaaacacatacatatgtctagattcattaatatctaaatgaacatgggcaatgctaaaaagtcttacattgcgaaatggaggaagtaccagccttgcagctgtagaagcactgcgtgcacgtgattgagaccaaaatgtaattgactctgtagatgtcgcatgcagtctcagcttatgagaatacactgcacttgcatttgctggtgttttcaggtaattcctttgtcatgttcataaaatcatgcatattttgttttgaaacaataagcacgtgggttccttgcctatcatgggggtgaacatatatacaatggtttgatttgatcgatcttttgttaatacctgtaagatggaattcctaattgaagcatcatactttttcattctgctatgtgccaagtttgtatacttaatcatagttctaaacatgcagggatggtttgaagctg

SEQ ID NO: 9319 - DNA, 16872 bp, Oryza sativa
cagttgataaccagacgagatgtggtgctgcgattgcggagctcagtagcgtgttcgttcagaagccggatcgagttgtgtcgagactccgcccgaatcgactatttatcaatacctatcggaagatcgggacctaacattcctcatcaccaagtgcagtggcgaggtcgcggagggaggtagccaagtgcaagtcatggtcctgttgatgtgaaaaacacacactggcctgggagatctgcttagctctagtgtaagtcttaaatcttactttcgggcttaaaggtgtaccagttgatttgatcgcaatcaacaagaaggaaaacaagaaaacaaagttaaatccataaacgatagccgatcggctaagggccgatgacatatcgttaatcattaagctgatggtatttacattagatcggcaatgtggtgtgaagcgtgacaaagtaaggtctactcgatcagctgtagacatcaatgatatataatctatttttaaaaatatccttaaaccaagtgattcggatagatcggacagtaagccgagacagtataaatcacttatgttcaaagatgcgttaagacaaagattatatatattcatagcatagccgatgaagtaaatctaatatgtatcggctagtactccgatactactctatattaagatattaaaacaagtaagatataccaaacaataagcttaatatagagggcagatttaggatataaagtaatgtatagagaacaatgcactaagatcttaatatagagggcagatttagcatataaagtaatgtatagagaacgagataacgacacttttgctaattggcgcgtacgtgttgccggtgcgcactcttccgacaagcccacgtgactacgtaaggcccatgcaactagcgggacgtgttttgactttttttccatggatttctcaatcacacgcgcatgattttttttttcacaatttttttctcagcgtgaatttttttaatcacgtgcacacgaacgtagagtaactaatccatcaagataatgatgataattaagataagatttgtttttttcaagatttttttaagtagtagattgaaaataaatttatacgtgaagtcaaattctgaaaaatttcaacctagatttgaaaactttcaactcgaaatttgaatttttttgaagtcaaaatttgaaaactttcaacttatcatctcggacttgaaaattttcaactcggatttgaaaactctcaacttgagatttgaaaactttcaactcggatttgaaaactttcaactcgagatttaaaaactttcaactcgtatttgaaaactttctactcgattttgaaaactttctactcgattttgaaaactttctactcaaatttgaaaaacattcaactcacagttcaaaattttcatatcaaaactgaaaactttcatatcaaatttcaaaactttcaactcaaaattgaaaattttcatctcaaattggaaaatttcatatcaaaattcaaaattttcaacttgaattttgaattggaaactttttactcaaatttcgaaatccttccactacaaatttagaactttcaactattttaaaagttgtaactaaactattttaaaagttgtaactaaattatgtatatatggtttttctttaaaatagtgctaatgatggcaattaatgctaattacttaattcgtgggtgtgcctgagcactggggagtcgagacggaaaaagtgtgcgctacttctcctccttgcacgtctgcacgaactaggcacccccagataactaaattccgatgctatctctatcgataatcacaaaacaagctagatattatagttctagatattacttaatagatcgaactcaactgatgcagcattaagcataaagagaaacataagatctaagcaaattgatgaaaacctctatgagatggtaaatatactatataatctagatcaacgttgatatttagccctatcagctatcctccaatgatagatgttgaccgatctaaggttagatagaaatattgataaagattatatagcacatacgataactcgacgattcacataaacaagattagagtgtcatgaagatgtaagcactaatcctgagaacacaagccgtcatgacaagttttacctcttgtcggagatcgaattaacccgatgcagcccaactcgaaagcaagaactcgtccaaacaatgaaagtaggaaaaggtggcgatgcgccgaaagtgttatacatggtcttgggtcatatttatacccaaaatacataatgtatccttgccggacacgactctaaatctgttacaaccgttaagatacgaacaagtcttttaggcgaactcttgccgataaatatctctaaggaaactattcaaaatatcctaattaatagatacaattgcctatccttgagcttattcaaaatatcctaattaatagatacaattgcctatccttgagcttatcctaatcatggcaatacttatgcagcacgttgatcaatcccgaagatgattttagaaccaccttagcgaaatcgattacatcggctattttctatccaatccaatatcagccgatgtaatcgctagccgatgccttccgtagccaatgcttactctgtttcctccaccaaatccacttcgatctcagcttcgaatttgatgcatgatctaccaaatttggtcttcaacaggtccccatagcttctccaagtgcaggtgcggaggataacatgcatactattttgtgcagaattcgtcagaagtagaaaacttcaattattttatgcagaaagtttcacagtgagtagaaaatgattcaatttcgagtcaaattaatgtatgttcctctgtatcttcttacactccccctgttcccaactcctctttctcgtttttcgtgcgcacgcttttcaaactgctattttggtgcgttttttgcaaaaagtttctatacgaaagttgtttaaaaaatcatattgttccatttttgaaaaaaataagctaatacttaattaatcacgtgctaatggattgctctgtttttcgtgcggaggagtttggttccaagccatcctaaacgaacacagccttagagtccttttggtctataatttgttgaaaatatggtcataatttggtatattttaatccagaaaattaatgtaataaacatgacatttgcaaatggcagtgatcctagcatggtgataaacatgaatatgctaacatgaacaaaagcatctagcaacatgtttaacaccaagattagagtagtaaaatacccagagaacgctctagtagatgatgaggcattggtattgcctccgttgatgttgacattctcggttccgcctcctccagtgccatagttccctccttttccagtagtgccgtcattccctcctgttccagtatcgccggtgctggtggaagacatcacgatgtagtggaagtagatgacgcagtgtagaaccgatgccgaggaagaagacgttgtagagcaatcgcactagtgagcgctccccaaaaacttgatcgcctgccgacttatgcaggtacacatgtggatggagttctggaggcctgcttgtcccgagcacccatgcacgctcagaaccggggaagcagaggctggcacagaaacagaagaacatagactaccaagaaaaaagaactgcgagaggacaacatagcagagtggtgtatctctgtctatccctagtggtgaagtttatatagtgcgcgagagagtaacgttccgaagaaatcaagtcagagttgaatttttcccgttagaggattaacacccgaatcaatatgattcatcaaatcggtattagaatgttcatcctttaacaaccaggtgctcagaaccgaggaagcaaaggctagtgctaaaatataatagaagaacagagactaccaaggaagaagaacagtgagaggagaacagagcagagtggtgtgtctctgtctacccctggtggtgccatttatattgtgcgtgagagagtaatgttctggaaaaatcaagtcagagttggattctttccatttgaggattaacgcccaaatcaatacgattcatcaaatcagtattgaaacgttcatcctttaacaaccgaatcaattcctttaattctcgtccattgcatatagttagagagagcagcagcaacgcaagccacgcccagcccagcgcgcgcgtgtggcagtcccaccaccatctcaaccggtcattgtttgcagtaggggaagacgacgaagtcaatggagcttgatctatgtgccgcccaccggctagagggcactcatcgtcggccgcatccgaaggcactactagggctggatccttcgtcggtcgataggcgcgggtggactggtggaggatgtgccggtcgacaaattcgtggggtgagagcgggcggcggtagtgcggatcctcactggagaactctgcttcccctcctcgtctccgtcaagggatccgccggtctggaccatcaccgctgcgatcgcctctgtttttctgtagataacgccgttgattttttgtcacacgtttgactatttgtattattcaaaaaaattaatatattttttgtaagttgttttatcactcaaagtatttttaagcatgatttatatcttatacatttgcataaaatatttggacaagacgaatcaatggcgccatccgttaaaaacggagggaatatattctaccgatctcctaaaataagtaatatcataaaatgcatggccatttgcaccatatttcagcatactttcggaatcgaaagattcagttataggctaataagcctggaacgaaacaaacaaaaaataatttatagatatagcaaatcccaatttttgtacgtgttactagagattcaaaactatgggtagaagaactatgatgaaaaaacttcagaataacttaaaatttaactaattttaaaattcaaattttagctgcgataattattcaacaagaagacaatgaaagttctgaaattgccttggtgataatgcacatatgcattccaggagagtacacatgcaatatatagccgctccgttgattcttaacactgtataacatctttgttgttttttagaaaaaaataaaataaaggaatttgaaacctatttaattagtaccaaaacctaccaccatacccccaatccagatcaaaatgtgcctatattcaggtgaagggaggtgtaggtgctaacgactgtgatgtgaccatggctaccttagatacaaccaaccattgctcacatcatggatcaagaagaacacttcaagatcaagccgtccaaattctggaatccaattcggccacctgctactgtgctaaattcaaatggccgccaaatgagcatacgagctccattttgggtccatgagtacttgatagaaagctcacgaagtcctctttccaacggatctagccttgttccaaaattctatcacagtcgacagcaattgcaaaaacaaggtgatgcgtcacctgtaatgggccaatgggcttgtaacttcgtctgggactccggcccaaatagggcccatgtggggtgcaccccaaccagtttgagcacgaccctaggcacccctagatcgtcctctgacctccttaaatagctatgtatcccttcatggtttcttgggttttgttatattaagtttagccattgctacttgcttgcagcacgcgtgtcggctagaccgtccgtctgcttgttcttcggatccccaacttatcttgtgtattcattcctatttgcaatttagatattgtttttatcttgttcttacttgtttcttcgatttgcttgcaggaatagagttgatctgcaatggcaagatcaacaacccacggagaggtgcatcgatcgctaaggcgcaacataacgtcttgtacagttgtagttgagtcgtcaacgtttatcccaaatcatagttatctgaactcaccgaaagatcagaccaaacaacagccttgagtgtcgagtggaactcagggttctatttactccccggattttctaggggtctatttacgaaataattttttcaaaaagactaaattgtgaaaaatccaatttttttcaggggtctatttacgaaataacattttcgatctatttagtgaaacaattccaatatacttagtgtaacatcgtgcaacatttaaaaataattcaataataagctaaaaaaaattcgtcggaatatatccatgtgtggtctcgttttaaagatttaattggagcgaatttaatggtgcaatcggatcatgatttagataaataattaaaaaaaaatagtttaaagtggttttgcacgcatacgtcatgctgatgtcagcgcacgagttttccacctccccatggggcacccgacgcgcagtcgtctcccttaaattttggctagatggaaaccgatcgagatggatatctagcagtgtgatcggtttgggggaagacactcagacactggtggtgagcctcgtctgggctatgccttgaaacaaagcacgcgtagagctcaaaggcatcgaacttaactagacgcgtatcaaaatttcggcagaaataatatttttaattttgttaacagtagagataaagatagagatataggtagataccactagatttgcactactttatttttaaattaaactagaaaaaatgtccgtgtgttataacgggtaaaatttattttaatcttattattgttatatgatttagttaagatgaaatcatgagctgcagttaggagtccgatcgtctcaagttagcatgtgagtttcttttaaacagatttcttatatgattccttatgtattaccaaaagtgaacgatcttaaaaccgacttaaatacggatatgtatttccaaaagcaagcgaatttaaaatccgactcatatacggatgacgtatcaaaataccggtaaaaacatcttcaatttttataatagtagaggtagagatttggtttggaaattgtttgaccctttaggttttaagagatccctgatttttcctgtccgaaccggattagggccatccatttgatgggatcagtatctgaatatgcttcggcaatgtctatagataactgcatgcgctcttcgttggatcggatttaatatctcccgtctatgtaggattggacttgtttacgtcgagagatcagccgatcgtcatatctatcatatatatgaagagtgcccatacgattttctttccaaagaaactattaatcctagcctaatggcgaaacgcaataatctatacctatactaatcgggcacttttttggagctctcacgttaaccagaaagatctgagcgtcaattagataagtcgtttaatctacaccgtagatcctgcaatactttaacatcgtgagccaatcaatcttaaactcagtgggctccttgcaaatcctatctatccagttatcgatggaaggacagaacccatctaatttatctccaagttccatcgtaagaaatcagattggaaattaagaagcgataaagaaacggcgaacgcgatcgagaagaacgtgagcgagggcgacgagatatgcataggctgcagtcgaccttgatcccagactgtggtcccgatcagcgacaatttgcctcaatcatgaggagaagttaaaagtttccagtgaatcagtgatcgctccagaggtatcattcatccctgttaagtctctggtttgacgtactgtttttactccataaagattgaataaattttaacctgaaacgaaatttaaccaaatgaattttgggagaaaaaagtttgctacaaaataaaaaattacttgcacatccgtcactgcatctgctacagatctattgctgcatctacaatatacatatatacgtattcctttgaatttgcatggtttgcatgttcaatttgcaatacatatttagcagtttatttaattaggacgcactcaatttatggttttgattgggatgatcaactatttgctgatcatcttttacatattgaatgtgtttttttattccattaaacttgcaagttctaagttgtcaattctgattttgacaagttgtttaatgacagtagaagcagataaaaatatattgatctataattctctgaatgcaatcaactatatttaattttccatatgcccggtatatcccgtatgcaatgcatatgtacatgtagtttgcagcttactgttcagtgttcatgttcattcgtttgggttagtccttatatcaatttttcctaacaagtatttcagttaatatatagagcttcatttacaagtataatttagcagcctaatttggagatacattttcttttatgaaaaccgaagggtaacttctatatattgcatacacttgcattgtagttaattacacgctaaatttcaaaacataaactataattacattataagttttaatatttaccttttgttttttagtacacagtttataaaaattaggagtaaaattaatttaattattatctacttggaagaggaaatgagagagagagagaagcatacttactagagtatcatataggatacatgacgtgactgaaactaagacccccataattttagtaatcctgactctttgggataaatattcttctcgataataaatcatgcgacgtaaagagaacgaaattcagaattaatcatacacacggtttatccatttgaactagctagaaacctactaagcgaataatcatgcatgtaaacaaatatttatcatgtactacgtaggttcatatgagtattacttgcagcaagagtaaacaatctaggcttgatctgatagacgtgaccaaattcacgttaaatagcatgtatcgtggcaaaatcgcaaaatcacaacattaggttttatttagggtttgtgaaaaaataaaacatgcaattggcaatatcgtggactctttaatttgtacttaaccggtacaaatagacaagagactatagatcactaattattattatgagttttgggaatgataaaacaaaaaagctaattacatatatcttatatcttctagggtccatactgagtataactattttttttaatgtaaaaattattaaattacagggtgtacttaaatttaaactcgaccacagacacaactaaatacttaattaattccagaattccacaatatcaaataaaaaagttggatgtatcacaaatttagcatttgtttgattcaaaattaataattaacaagtagtattcattctgtaccaaaatataacaacttctagcctttagaatttgtcccaaagtataacaatttaccaccaacattctcttcttaacgaatcataatcctccaccatttaatttttccagttatctccacttctccttcagccacaatactcccctatttaattgtaccaactttcttaataaccgttgtctaactctaaaaatgcttatattctgggacgaagggagtagttaactattatttcaatctaacatgctacaattcgaatatggccaacgtagtgaacgtatggttaaaattttgatctttatactaccaataccaataacccgtgcaaggcacgggttgacggctagtaactgtaatgtaccaccgacttcgggcgacaacacgaggcactccaagaagatgaagacggtcgagacgacatcttccggattgttctcactgcccatcgacctcgtcgaggagatcctcatgtggctcccgtccaggtcgcttgccaggctccggtgcacctgccggtcttggaacgagctcatctcctcgggtggcttcgtcgatcgctacctgcaaaatgcggcggctcggcacagcgcccccgctaagttggtgctcacgcccctgtcaaaacgacatgccaggagcttccacgcccccatgtgctgcagagactgccctaggatcattggcgcgaggccgtgccgcggactcgtcctcttctgccgcccgtgcgccttgacctactccgtgtgcaacccttccaccggcggcgtgctacaccttcccccgtgtcactcagagtggtacatgagcagcgcggggatcggcttcgactcggcgaccgggaagtacaaggtggtgcagctcgtagatccaagttccccgaaagtagtggggacacaatgccgtgtgctcaccgttggcgacgaccctttgggctggcgggagcccttgggcgaggcctgcacaatcctccaggaggaccacgctaaagaaggaggctgcatcgccgatgtcgacccggttttcgcgaacgggcgcctccactggacgctcaccccaaagttcctggtgtgtgacacacctcagggcatcctcgcattctcgatcggtgacgaatccttcgtgacggtccccttgccaccattcgcatcggctgacttagacgtgtgtagcagcagcgtctgcgttgcgacaaatgtgtaccttgagcatgttcggccgagcaagttgcttccaaagaacaaggaaatctttgcgccggccggcacggtcctggccgagctcgacggctgcctgtgcatggtgcgggacctccgccaccgccgcaacatggacttgaacgagaccaccatgttcgagatatggaagctcgggacctacgagaccggggagtggtcgctggactaccggatagacctaccccgagggtacagggccgcagagcgacttgtcacgccatggcttgtcatgccgctagcttacgtcggtggtgatcccgcctcaactggggggcagcgtaggaaggccgtcctgctggcgacgacggctcatgaggcgcatgtttacgacccggaagcggccgtgctccacagggtggcctccatgtcagacgacgagagccgcagctgcgacgcggcgttttacctggataaccgtttgcgtctcacgctgtaccaggaaagccctgttcagatggacggcatggaacacgatggtggtgatgccaagcttatcgggtattccattctcaactcggagcaaaattagttgatttaactatatgagacaacacatcagggacgggccccggatgttgagatagtaattttttttacgaccacaagtctaatatttgatatgtataataacacgtagttctaatagttgcatgatatacagtacatatagaaagataattatatgagcttcatgattgttatctaatatatatgatgtgggggcgagttccatctacaattgcaacgttcacatcattcttcgttctttagcatgtcataggtttctttctgagttatctaaagagcaaaagctagactttattgctctcctagaaacaggtaaagataagtttgctgattcatggttaaataacatctgtggagggaaatattttctttggcattggactagaccaaaagggagaagtggaggtatcttacttgggataaatttagaactctttgatgtcgctagtatcgatgaaggagagttctatattaagtttcacttaagaaataaagaagatgcgttcctatggaacctggtggcagtttatggggctgcacaagatgaatttaagcaagatttccttttagagctggtcaattcttgtagtaaggaagctttaccaatggtaattggtggagattttaatattattagaaatccaatggaaaagaacaacgagcgatacaatgatagatggcccttcttatttaatgctgtcatagacagtcttaatttgagggagatcttgctctcaggacgcaaatttacttgggccaactctatgccgaacccaacttatgaaaagttggatagagttttggtgagtaccgagtgggaaacaaaaaatccgttagtgacagttcatgctctttgtagagacctttcggatcacacacccttggtgctagacacaggaaaagggacacatagaaattctcaacctttgtttaaatttgaattgggatggttattaagggatgactttcaaaatcttttggtagaaatttggtcaaaggatattcaaaaggatattcaaggggcaacaaatatagaaagatggcaaaataagatacgcaggcttcgtcaattcctgagagtatgggcgaagaatttaagtggtgtgtataaaaaagagaaagctcgacttatagcaaaggcagatgagttggacaaattagctgagaccaggatcttgactagtcaagaactgattctaaaaaattcctataaaaatgccttagcccagttgttaagagaagaagaagttaaatggtatcaaagagcaaaaacaaaaagaatagtagaaggagataggaacaccaagtactaccatatgatcgcgaatggaaaacacagaaagacaaagatttttcaattagaacaagaagaaggggtgattaagggagatgcacaactcaagaaatatgtcaccaattattataggggtctttttggagctccggatagaaattgtttctccatgtgtgaatcccaaaaggatgatatccctcaagtgtcaatggaggaaaatactttcttaacaaaagaatttacagaagaagaagtgaaacatgttgtttttcaaatggaacataacaaagctccggggcctgatggtttcccagcggagttctatcaagtgttctgggaagtaattaaagaagacttaatgtccgtctttagagattttcatagtggcgagttacccctacatagactgaattttggtatcattaccttgcttccgaagaataaagaggcaaaatagatccaacaatacaggcccatttgcttacttaatgtaagcttcaagtattcacaaaggtcatggcaaacagaattgctctagtagcacagaaagtcataagaccttcgcaaactgcttttttaaaaggtagaaatattatggaaggggccataattctgcatgagacattgcatgagatgcataagaaaaagtcaaatggagttattctgaaactcgatttcgagaaagcttatgataaggtaaattggaattttcttcaacaagcgttgagaatgaaaggtttctcggacatttggtgcaagtggattgatcaagttgtgtcggggggtagtgtagctgtgaaggttaacgatgagataggccacattttccagacgaaaaagggtttgagacagggggatcccctctcaccaattttatttaatttggtagcggatatgcttgccattctcatcaatagggctcgagaccttgagactctaaatggagtaattcctcacttggtagacaatggtctctcaatcttgcaatatgcagatgataccatcttgtttatggaccatgatttggttaaagccaagaacctaaaattggtactagctgcctttgaaaagttattgggcttgaaaattaattttcataaaagtgagatgttttgttttgggaaagctaaggaggtggaaaaggattacaccactttgtttggttgtaagatgggtacttttccattcagatacctaggccttcctatgcatttcaaaagattgtcaaacaaagattagaaggatctagaagataaattccagaagaaacccagttgttggaaaggcaagtttttgtcgtcaggaggaaggctggtgctcattaattcagtgttgagtagtctgtcaacattcatgctttctttctttgaaatccctaaaggaattttaaagaagctggatttttacagatccagatttttttggcaatgtgatgagcacaaaaagaagtataggttagctaaatggaatgtgttgtgcagacctaaggaatgtggggggttggggatccaaaacctagaaatgcagaacaagtgtatgcttagtaaatggattttcaggttgatcaatgaagacggaatttggcaaagtttgcttaggaaaaaatatttgacaaagaaaaccattttgcaagtccaaaaaagactaggggactcacatttttgggctagtctcatgttagccaaagagtcttttcaaaggtttggttccttcttattacaagatggctcacaaataagattttgggaggattgttggataggagttcaatcctttgagaaggagtatcctaacctctacaatctagttagaaataaaaatgaggtggtggccaaggtaatgagtggaataccattaaatgtgtctttcagaagatcaatagtgggaagaaacttggaagcctggtatgagctagtgtcgaaagttgtttacactgtattgacagatcagaaagatcgcttcttttggaaaaacaataaagaagacattttcacagtaaaatctatgtacaagttgctcatgtatgaagggctggtacctaggaagaatttcatttggaagctcaaaattccacttaaaatcaaaattttcttgtggtacctcaaggaaggggtaattctcactaaggataatctagcaaagagaaggtggaagggtagcctaagttgctgtttttgtaactctaaggaaacaatacaacatcttttctttgattgctcaatggctaggtatatttggagtgcgctcctttttacatttgggattaggcaaccgtgtagcatgtctcaaatgtttgggaattggctgaattgtgttgaatttaggctcaagagaatattgtttgtgggcatagctgcatttctttgggcaatttggttatataggaatgttgtggtctttaatggctccaatcctacatctttcttgcaggtcattttcatgggaacacattgggcaaggacttggtctttgcttcttaagggaaccgatgaagaaatagttaagaactattgcaaagtgctggagaaagcgtgtggtggaattcttctccgtgtatggctggaacctgagaagaagattggaagcctagtcttttcttcatttgttgttcttaaaacctttgtgctgtcatctcttatgtaatgggagaggtcagttgatgcattttgtacccttttattatggagagtcttatgtactcgtgttcggatttttggctgtgtacaccccacaaaggtgtagaggccgtgtttgataatcctttatctaaaaaaaatgtgtagcacctcaaatagtgcatgattttggtcataaatttgaactgtgtagaagaacacaatacacttccatcatgtaactatatcattatttcgttagcaaataaatttatcttccaatgaaacaagtacctaacattaggatgcgcggcaaattaaaggatatggatattggatttgtttgttcctcttgcttctcctctttagaaagaacactcatatagcgcaacaacgttggtcccagcactcccgtatttttaaaatcaacatttttcttttcttttttacaaacacaatacaaacgttcatcttactcctctttagaaagaactcatatggcacaactaccttggtgtatggtgacaacatcgattgatccgattgctcacattctttaaaatcaacatgtttctttttctttttacaaacacaatacaaacgctcatcttgcttctcactaccgacgatcactgaaagaatatatatatccgtaaatgtgaacacccacatcaagtgtagaacttaaacttgaatgggtgggttctaccataataaatctaatcacttgagctacactcatttcgcaatcaatatgtttcttagaatcataactaaagaaactcgaagcaacatgattaaaaataatactgctatgtagcacttgatgtgatctgctcttttctcatgcataacaacaaaaggattcagatttgagcatgttcacactagtacagagaccgccattggtgccggttggaaatcggctacctattggtcggcaccaataagaaaagccgacacccatgccaaaatagaaccggcacctttaactttgctcgagccaaaaaaaaaaagagcgagctggctcgaattgagccgaactcaccatccacattccacagccgttcctccctcgagcccatccctactccccttcgtcaccgcctcttggatccgagataaactcaacaacaaactagtatattcatcaagaactagctcaccaagaactagcgaatagtacaaatcattaagaactcaagtttgggactagaactcaacaagaaatcaaaaagagaaactcaagaacacatgccacaggggtttcaaaagggagcacatgtcgccggccgccacatcgcccgcgccaccgccgtcctccacgctcgccgtcgtcgccgcatggggagggtgcggccgctgccgccgcctagttgcgccgccgccgcctctgccaggcaggagcccgccacctccccactagctcccctggcgtcggatctagcggaggggagctcgccgcctcccctctcgccggatctggcggaggggagagtgcggccaccgccgccgccaccacctctgccagccagccgccgaccatgggaggggagcccgctgccttcccactacctccccactgcctccccactgccagccagccgccgccgccacctctgccagccagccactggccaagggaggggtgctcgtcgctgccgccacctctgcccgccagcgcccggccatgggaggggagcgacgcgagagagagggagggagagagacgcgagaagggatgtgatcgatgtagataaggaccgtgtggtgtggacgactagataaggacgtttggtgggtgtggaccatgtggtgctgctgagccgctgatggctcgg

SEQ ID NO: 9320 - DNA, 20878 bp, Oryza sativa
aatccgtgtacttttgtttatgactagactgagccacaaactaagccttacccattagacatgtggaagtacggtagtgctttgcaacagaggcccgagctttagtccttatagtggccggggtgctacttcccacaactggcatgcacccaaaccccaccgaaaacaggttttaggggttttgaaagaggaagagaggtgtgtgtccaattccaacataagccaaccattccaaagtgtccaaatgatatgagaatttcccaaagtctatagttataaaaccacctaatgttgcctaattaaattgcgaagcatctacctagaattatactagggataccatgagtagagtgtccactagttggggttttgtttaatctagggtgaacaaggtaataataataacaataacaataataatatggtcataacaaaggtaaataggcatggctaagtaaaacagtgataacgcggggatttaaataaagcgataatgcaataatttaaatcaacataattttataaactgggattcaatatgatcaagatgatgtgtcttgccttgctcgttttcccaatcgacggcttcgacttcaatgaagagcggatcttccgaagctgcagcgtctacacgaccaacggaaaagaaaaaggctttaacactaaataactccacataacagcagaaacaaagcacaaaaatgggttctttacatcttaaggaaaaattagagacttgaacggtccaattccgagttcaaatggccaagatatggccatttgaagtttatatgctctttaaatggatatttacgaatttcttcatttaattttcaattaaaaattcggattattgcgtcagccgaggggcgggcgcgcggaccgggtccacaggaagtggggcccacgcgtcagccgctcggtccacggtggaccgggcgcacgcggctggcggcggtcggcgccgtgggtcccgcgcgtcagccgcacccgcgggcgcgggcggctgacggccgggcccacttggcagccgcgagggcgcgcccgagggcggcctcgccggcgcggccgacgggagcggcgcgcacccgcgccccgatggtcgccgccggcgaccaacggcgcggcggagtggcacccgagagagaggagggaagggggaaacgaaggggacggtccacggctcaccccgagacggcgaaggcggcggaaacggcggacggagcggaggaagacggcggcgcggctcgggatgacgagggcgacggtgctccggcggtcggcgagcgaaacggaggcgcggacgaggtcgacggcgatgcggcgatgccgagggaggtggcgccgagccgggaggaagaccggagcgacggcggcggcgaaccgaaggtcgacggcgacggcggagagagaggagcacggcgctagcacgattccgacggcgagagcgagcggcgagcggcggaaacggaagagcggagctcgggcaacgaatatatagcaacgggagggggagagcgcggccggggaggaaggaaaccggccgcgaagatctcggccgccattgattgcgccggcgatgaatgcgggcacgattcgaacgaatccgagggagagagagagggaaaagagggggaatcgggagagggaaacgcggggaataatttccccctcttgattgcacgcggggcggacgggagcggcgggattcgcggcggcggcggcgctagggcacggacgcggcggcgggcgcggcgggaggagggcgatgacaggtgggccccacccgtcagcgagagtggcgggcgggcccgcctgtcagcggcgcgcgcgcgcgcggggagccgatgggccgagggggggaagagagagagagagggagggaatgggccgagccggcccaagaaggaagggggagggggaaaagacttcttttaggattttctttttataaacctttttaactttgttcatttcttttcaattattatttgtgctctgaaaattccactaaaatttatttaagcattttaggcttttaggaaatatacaaaaatcctccaagcctcatttgacttttatctttgcacattttaattgttggaggctttcacattgaattttacttattcttttgcacaattttgaggatagattttagagtcgatttgggacgcgacagcggcctcctcccgagcagcttcctccgcttggcgaatccgggcggcctcccgggcggcctcttcagcttcccgaaggcggtctgcggcttcacgccggtcagattctcgcctccgctcctctgcggccgctggatcttcggcctcggactggccggacttggagtggcgggaggaatgcgacgggacatcgctgaagcagaagaaaaaaccagaagacgaacaaaatgagtaagaaaaaacttctttttgggagaaagatggttgcaatgagagtgagacgaacctgcgagggggtcggttgaatgaccaccttggaggggaaatcaggtttccccggcatggttccgtctcccccgtcttgcggagccgtttcttcttgcgctccccctcgggctgcgacgtcggcgcggccccctccgggcgccgactgctggcacgtgccgccccgccccctcggggaggagatgggggaggtgttcctcccagcttcctcttcccctgggcgtcggcagggcggctgctccccgagcccccgacgcggggcccagaagcacgaccccctcctggggcagattgttccccccggcggcgctcgcccgcgccgtcgtggcccttaggggctctctcctctgaggccccgacccccatcataatggttagaatggaggcgcggtcgggatcgctgcagagggggaggatctcctgaggaatgcgagacgcctccgcggagttaagattcagcaccctttggaccacgatcttgaagtcctcgggagcccaatcccatctggctccctggtgggtccgcatgtagtcttcaggcccagtgtactcccaggcgctccgggcgcgccgttggagcggcgcaatccggcgacggaggtaatcgccgtacaccatggccccggtgagcccctgggatcgcaggcccgccaggcggtcgaggacggcgtcgtagtcctcccccagatctaccggcgcccgccagctggagacctgcgccgggggctgacttggaagtcggaggcgcgcttcgttggcgaggggggtgtagaaccagtcgctcttccagtcgtcccacttcttgcggaggacgcaggggatgtagcggttcaacaccggcccccgcggctggaagtagcagccgccaaccaccgacggcggtgacaccgactgcacggtgaagaaccaccggaacagctgaagagaggggcgcaccccaatgaacatctcgcacaggtgcgcgaagatggccaaagtcatcaccgcattgggggtgaggtgcgccatctggagatcgtagaactccaggacatccatgaagaaagaagaaaatggcgggaccagcccagccattgcgaaggggaggaagaagatggaccgccccgggtagtctggtgccgggcgcccctcgcccagcatcactatctcccgaccggtggcggactccggcatgaagcggcgcggcagtccggcgtgcctctcgatcacgatgcgggaaggcggtagtacactgccgtcgagcagagcagagccccgtgccatggcggtggaggaagagatgattgagaacgagcgcgtgtggcgaaagtagggcgtagcagagaaagagttagagctcaggcggcgaaggcaagaggaacaatggcgaaaggaaggaagcaaatccttttctcgatgcttttatacccttgccatcgctgggcctggctcctcgtttctcgcgcccactacctcgctccctcgtatctcgctatctcgctccctcgtttcccgtgcccacgcttccactaatcccattcgcccgcttacggcgcatgaagtggatatgcggttgtggcaatcgaaatggattgtatcgtgcgtgcgttaattacgctcgccgaccgaagcggcgttaccgtatctccgggcgagacaaatctgctcacccagattcgcgcgctgctcaagtggtgtggcggtcttgaatagaccgcccattatggacaaccagagttaccaataccaaggtgcatggattgagaccgttgggtattttgcccaactacggagaccggtcccacctgtcaccaggctttaggggtggcgtcacacctgaccgcttcccttgggaagggaaattgctctggcataacgccgggggctactgtcggtgatatgggaccgggagtatcatgaccagaggcttgaggcagacacaatcgcccacgtggcctggcaccttcggggacgtcgggcccgagggtgaggtgtccgccctccttctgattccccccgagggggggtcgggttgcgcttgccccgaccccgagggccgaggcaccccgaccccttaaggaagtctgcgccgcatatatgggataagtgagcacaagctgtgctcacctaacagcatttattgcggtctggtcaagcgtgtcacgctgcatgcaacgcagtacagcgcgttcctttatccggtctgtgaccagtcacagaccggtcagatcacgggttaggtggcgactggcggtctgacgcacgccttgccccatcccgtcaagacgaaagcctctaggcactcgtctcaagccggagctagcgtgttatctcttagagatggcacgttagccctgattagatgaataccaggcttcatcctaaccattacaggcaaggtgttacacgaagaagggcaaacatgcacgttgttaaactgacgcgtggtggacaagaatgaccggtctgacactggtcgcgtcagcaacgggcagccacgatcccacgttgcgcccgtctccgccgggagtggaggtaggtgtgggctgtcccatcgaagtgtcattcggacggcaaccataccaatctccgttcataaagagaagaaaagtccagtttggaaagggaagggtgcatgtggtatccccttgaagtataaaaggaggaccttgcccatagagaaggggttggttgattcttgccagattcagagcttagaacgggggagaggtgggctcacactttgtagctcattcatacacagatccaccaaaacacaggagtagggtattacgcttctcagcggcccgaacctgtatacatcgccggtgtctcgcgtttcttgctagcagacgatctttccacacacagagagagagagcttgagatctcaccctaagcccccggccgaaccggcaaagaggggcctgcgcggtctcccggtgaggagccacgagctccgtcacatacatatgtatatatatatatacatacatacatacatatgtatatatatatacatacatacatacatatgtatatatatatatacatacatacatatgtatatgtatatatatatatatatatacatatacatatgtacacatacacacgcgcgtatacgtatacacgtacgtacgtgtgtgtacacacgtatcaggacatggagatgttctctttattccgttcgaatattctagctgatcggatcggctcgatcgatcgattctcgcgtacgcaactgggcaatttggcggcggtcgttacgactataggtgcccgcttgtgttcactatacagttagtaaaacattcattttgttaatccactctttagtacgtcttgaccgttgacgattgcccaagcaagccgcaccagtacgttcagtgcatacaaggactgtttgaggaaccttttgctagatgcatccgtttttggcagacaagttagccaatgagactcagcgagaaattttatattggctcaggcacttctgaaagcgggttttataaaatggtaccaacaaagtgcgtgttctataatatatcatcaacaaagcttgattcttacaataccttcgaacaacttgtctctttttcttatatgccatcatcattaagtcaacaattactcaaccgttaagggagaaaaaaagattacttttcacaaatctcaattttgcacaatgccatatcgcactaaactgtcttggatgatagaaaaacaagtggtcctatttttcatcgatgagaaaaaatagtggatcatggcaaatgaaattcatgggtacctattataccctatgggtaaaatggataaaattgagattttatcgtgcgacgtggataaaattgagattttgcacaatgccatgtcgcactaaattttcttggataacagaaaaacaagtggtcctatttttcatcgatgagaaaaaatagtggatcatggcaaatgaaattcatgggtacccattataccctatgggtaaaatggatattttctcgcccttaatggatggtatataagcaagaaaacaagttattcgatgttatataatataactcggtttttccactggtatattataaaatccataccttctaaatgatataaaatttattatctctaaaagaatataatatatttatgttatatcaatgactgaacaggaaatactatagaacggtatacctttccaacgaaataaatattgcatgctgatgtcagcacgatatcgtaggtatcagataggtacctaatccggtacctccagtacaagacataatatccataggtaccatgctgatattagcatgataccataggtaggtatcggatttggtacttgggatatcagacatgataccctctaagtatcagctagggcgttgaaaagtgcagcaatggctagggcaacaacgagtgaggcggcagctacaattgcagcagtgggagagctagtcagatccgccagcggcaatgacaggagggacagatacggcaggctctcctcctatgcggatcccgccgcctcccccaccctcacacatggatctagcaggccgggctctcctccacgcggatcctaccacctctccctcccctccctcatgcatagattcaatggtggcggcaatgggaggggcagatccggcatggctctccccctctggtttggatcccaccgtctccccctccctcatgcatggaacgtctcccacctccctcgcatatggatctagcagtagcgacaacgggagggacagatctagtgggctctcccctacccacgtggatcctatcgtctctccacttcctcgtgtgagggtctgttagcggggggaggccgggaagggcgtcggtgatgacagtgatgacggtcatcgggaatgggagcagtgtggtgacgacggccgcagagcacaggagcggcatccatccctttttattctaggtttttggaatctttgttttttggaattttgatttttttttcaaaaattccttttgcaggcaaacgacataacgtgctcacttgggaaaatcccttttcgcacgaggttgtgctgctgcccgcaaaaattcctattttcacatacaccttggagcaagcagttgctatatatacccccgcctacgaaaatacactttagctttttggaaaaactttattttagtagtgtcgggtatatagtgacccggccccgaacttctaaaatcgtgcaaattgtgtcccacgatagtattgtaggcgattttaaccgacgtagcgcctacatatgttgtttgatttggtcttcatcccatataatgcttatgtggcactagaagaaaaataataaatgaaaacaatagtgtgacccatatatcaggtgatagccaacaaatatcttgggccaatatatcatcaccgaccttctatctctcccccatcttctctaccacctgcacactaagctgaggtggccgtcaagctccttgcgcaatattggcttggtctccagaacggtcaacagtatcggcagtggctccacgttgtcgacaaggtagctctccttgtcccctgaccacctgtctaaaccatgtcctcctccccttccccttcttctcctatgcaccctccttggccctgacgtgcatgcagggatctcgggcaatgatgcggccgctagatgttgatagattcacatcaggcggtgctctaggttggaatcagtctagcatagaggttatgccggtggatagtgatgctgatagctgctggcgggaacagtagtggatggggagggaatggttggggcacggggaggagcaggctagggttcgtaggagtcatggagatgggagtagggttcgtgttcgggatacaaagattgtcgctctctggcgatgagtggaaatagtgggagtgaaggggaagcaagcgatgtggcgttcagcacgaggaaggtcggtgatgatatgtggactccacataattgttatactttttctagctggtcacccactggacatatgggtccaactgatatttttttattatttttcatctagtgcaacgtatgcgccatgtgagatgaaaaccaagtcaagtcatttaataacatccacaatacttccgaatgatgtaatttacattagttttagaagttaggggatactttatacatggttttgtaattgagtgatatgaaatggaactcaacccatatttgagggacctaatgtgaacttttgaccaaccttaatttgtactagctctttgtgggcttttatttccaggcttcgcctggctcaagtgagcctagagctttgagtccacgttgaaacgcttgatattacaacttgcatgcgtcaagctaccaaaatcagctcctgagaacgtgagagccattttgatgtcgaatcatgctgtggatatctttgacgtcccatcattcttagacggcacaaataaacttgatggatggaccgaccagtcgaagcaagcaacatttcaattggcgttggaacacgtcagttcggcaagttgccaaatttatgaccaactatcctgaaaatagcccagtaaactattcctagcacctgagcaccatgtccttatctaggtagtatgttttttcttccttgtgagaatttgcaggctattatatttgcaataaaatgaaggaatactaagctttaagatttattgttgtgttttgcgaatatgttatagtagaatttatagtcaaagtgtccgtgtctaattcaaatatggaaaaggatgtgatggctcgtcttattagatttcttgtggtgaaatttgttcacatgggtttaagttttagacttgagacatgtacttgtatttatagaattattttttcgatgataagtgaagtactcatcaatcagtaaggcatccgttataactttcattaatgaaggtggtcgtagaagtaggatgtgtatgtatgtttatatgaataagtgtggctcgtgtatatgagctttcacgtttgtgttgtatttcgcgaggatctatacttataaattggaggcgcaagatgtgctttaacatgttatgaggcattctgtttagtaattaaatattatgaagaaacaataagtagatttcactttggactataaccacttttactaaattaatttcacgtaatttacaaattcattgtaaatagtatatatacattcactatcgctatgctttgctcattcatgctgctgccggttatattctatcctcatcagacgaactatatatcaatagaatatactccatttttagctatgtcaaactaaacaagaaagaatactgcgcagctaatgacggatggaattatacaggagaataaaacatataagttatggatggccgacaaaattaccaagatgcagcagttgtgacgcttttgtttaaacttcggaaattcattgtgtcctgatgcaatgattttgttttctttaaaaagtataaaaatgcatgaaaacgtccagcgatggaaatgaatgttcacacactatcgtcatgagctagggggtatagctatatgttttttttttttttttggcggggaagctatatgggtatttgagatgtccaagatcatcattgaacatttatcaaagcaaaaaaaaaaaaaagaaaacgcccattctaactagatcaagaaagagggagaagaggaacttaaaagaaatacactgatgtgagctaagtgcgcaggagatgagaattaagcggatcagctcgagagtatagcgtcaaaaaggtacgggatgagttagcgatggtttggctaaataagtagtaaactacccctatttacattgaactttttccagattatccctctgtacggtagactgggaggtaccaggcatacctcccaagcattgttaaaggtctcatttagccaaggctctgttggtttgttctggtttgactctatgtactgttagaattaaatgaaatatgcccaatataattctagtaattctagaaccacgtagccagcccatctgatgggtgggcccacttacacaaaccaaatcatttacacttttgtcctcgcttcgggtaaaagggtaatccgggagtggcatggttggagggacaagcccttataagttggttccatccttgataaactagtaaggtggtatactaaacatgcgtatacaactcacatgggtcgcacaggcctcatcctaattgggccaggatgtcatagttttcatctcccatctccgagatagacatagaactctctattctgttcattttcctgatactctggttctcatcaagtttttggcaagtgcttctttggcgcgattgctctgctacgtctccactgcttcctatgcgccaagtgttttttgtttccttttcatcattgtgactgggaatggcaacggaggggagaacgacgggaacggtgacaccaacatcaaccccaacaccaacaccgcctctggatcccgggtatgtcactctattcactttagtgttaaacatgttactctatcatctttttattcacatctcatgtttagtattttgtttttctagtttaaaatacttccaacatatgaattatgactatacttccaacaggtactatgagcggagagcaagatgcttagaaagatgaacatccagcttggcccaaaaactggcaaggcatgttttcatgtttcttgcggggattaaacttttcatataaatcggtgcaaaaacttagttccgatcaaaaatttgaaaaatgacctaaaaagagaatttcttggtccacatgaatatgacgaaacaatgaaccatagccgaagtttcttatatccattccttcttcctctcatcacttcctagtttcctactatgtgccactaacaagaagacatgaacactataagcgtccaccaaaagagaaacaaatagaagagccttcagcccttcgtgctgccaacgcttttaacccatagtggatatatgtcgtcccagatcgattgatcgagtaacgaacagcaagtagccaagctgacattccccggtttcagagttcagaccgacgacgatgccaaaacgacgtgtgcatcaattactgcatttcgcccatgtcagctcagctcgatccgatccattcatgccacaagtcagagcggcatctgaacccaacaagtcagaatttgttgcgtcgcccaagctacacagttgctcataaatacacgcagagtcgcacagggaatgagatttgagatatcatcgatctggtagttgcttccagtctctactctctactccttgctattgcattccaccagttcagttcggcacgacttatcgacgacaagatatatggttaatccggcgacgatgatttcacctataaatacagggcagccaccgtgcatgatagatcatcgctagctgcagtcagtcaccacgtcaagccagtggacacgacaggcaagacgagagagctagcatggctttagctcacgaggtcgctttcgaggtgaacctgatcgaggacgacggcggcctcgccggctgggcgccggtgggcacgcgcacggcgctgtcctcgcacgccgagcgcgacacggccatgctgatctcgggcgccgtgtcggccgcggagccgaatgagcgtattagacgatcaagcggacggtacatcgtcgcgtcgcgccgcgccgacgaggaggacgggctgcggcgcgcggttccggcgggcgcgctcgtgccacgggtcacgtaccgtgtcgtcgggtgggtcagcgtgcagggccagggcgacgggaggcaccatgcggtgcgcgtcggcctccgcgtggacggcgacggcggcgacgacgagcgcggcagctggctagactgcggcgcggcacgcgtcgaggtgggcggcgggtgggcggagatcaacggcgcgttccggctcagggcgagcccacgcgtcgcggctgttcacgtccatggcgcgcctgccggtgttgatgttaaggtgatggatctgcaggtctacgcgacggaccgcaaggcgcggttgacgcagctcaaagagcagactgacaaggtgagtgagcaatcatcagctcactccgactccgcgcgcacgtttgcatgatcaacttcttcgttactgctttacgtgctaaattaatatttcctccagtcatatatagacaagtgtcgtttaacaatccatgtaggcaatataaattacatttgatcacaatttctgaaaagaacaaaatcattcgtaacatgtcacttatttggatttttaattcgcggtaagaagtcaaatgactttttggaaaaaacctctaaatgaaatggccgtttaagaaagtgactgatatttagggggaaaaaaatactccagttaagtgatgaattagcaagcccaaagtaaaatgacattccctggatgcgctcatgcaggttcgcaagcgagacgtgattctcaacttgggcggcggcgcgaccatggccggcgcgtcaatccgcgtggcgcagctgctggagaatcgcttcccgttcggatcctgcatcaacaagacggccatccgaaaccccaagttcgtcgacttcttctgcgagaacttcgactgggccgtcttcgagaacgagctcaagtggtactcgacggagccgcagcgcgggcagatcaactaccgcgacgccgacgagctgctcgacttctgccaccgctacggcaagtcggcgcgcggccactgcatcttctgggccgtcgacggcgacgtgcagcagtgggtcaaggacctcggccgcgacgacctcgccgccgcggtgcagggccgcctccacggcctcctgtcccgctacgccggccggttccgccactacgacgtcaacaacgagatgctgcacggccgcttctaccgcgaccggctgggagacggcgtcgcgccgctcatgttccgcgaggccgcgcggctggacccggccgcgcggctcttcgtcaacgactacaacgtcctgcgtgggaacgaccccaacgcgacgccggagaagtacgtcgagctggtggacgcgctgcggcgcggcggcgcggcggtgggcgggatcggggtgcaggggcacatggacagcccggtggccgggcaggtcatccgcgccgcgctggacaagctcgccgcggcgggcggcgcgcccatctggatcaccgagctggacgtgagcgagcccgacgtggggctccgcgccgacgacctggaggtggtgctgcgcgaggcgtacgcgcacccggccgtggagggcgtcgtgctctgggggttcatggaggggcagatgtggcgccgggacgcctacctcgtcgacgccgacggcaccgtcaacgaggccgggcagaggttcctccagctccagagggagtggaggtcggacgcgcgcggcattgtcgacggcgatggccgtttcaagttcaggggcttccacggcacgtacgtcgcgcaggtgacgacggcgacggggaagatgctcaagacgttcaccgtggagaaaggggataattctctcgagttggatttggatatcgaaatttgaaggtttaatgtgatgatatcgtcctagtcgtaatgtactgtgagcttaaagttcatctccatcgtgctggactactgaataatgacgtgcatgcatatactactgcgcttgatacattattgtgaaggaacaatggaacatggattaattagttcagtaaataaaaatgatacgattggatataaaatttataaacgagaagttgttggtcgcttttgacttgtttttcctacttaaatttctttaaatttgatcaaatttatagaaaaatatagcaatacttttaacacaaacaaacatattatcaaaatatattaaatgttagttttaatgaaattaatttgttgttgtagatattgttaatcttttctataaacttaggttctgtttctttcagcttgggattattataatccagattattgggagtaagctgaaagaaacagacaacttattgaagtaacttattataatctggagtccaacttattataatctgataaactcatttaggtgagctttttccagattattgggtgaaaaattacccaccatgccaccccactccctctttagggcctgtttggtatagctccaactcctaaatttaactccaggagttgagtctggagtggagttgtggagctgcctaaacccagctccacaactctagttcattttgtgagagggctccacccagctccactcccagttttggtggagccgaaactgtttggctgagctccagctccagaaggggtgaagctggagctggagctgtgccaaacaggcccttagacttgcaaacccaataatctaggctctaataatctagaaaagaaacaactaaccgcttattctactacagattataacaatctagcttatagtaatctgactcaataatctagattataataatcccaagctgaaaaaaacagggccttagtaaggaaaagtaaaaacaactgataatatgaaacggatagagtatgatatatttcaaacgataagttattatattttaacatacatatcaaagaccgaataaattcaacatctactatattaaagtatgaatggagtagatgtttatcatggatggaaattacacgtaatagctataatagggttatcttcgccttctccgatcccatccttcacctcaccgctgcccgagcacaccattggagttttgcgtgggcgcatgaatggtggtgacggggctcgttcaggtccctcttggcgcttaggatggttttggccaaggtatctctcgttggacctagagttgtgtctggatccgatgacagcaagtgcggcagctgccagccactccatgttaggcatggtgttggcacaataggactttgctggggaaatcgagggccgcatctaagtagatctaaggtgatatcgatggttgtgcattagtagtgttttggaatgattggggcagcgacaggatggcatggcatagaggagcagtggctacaacggcggcagggcgggctagactcgcatctccgctagtgaactgcggctagccgttgatggtgtacaacttgttagccttcttcttgtggctggtgagcatcagcggtggtgtgatgagactgtagtgccgacagcactggcatcatcgtgcatcggcatgttaccgagcagatcattgagagcaaaggggccaacaaggaggtaaccatgcactaggctgaccttgatgcccttgagcagtgggctcatggcagtggcaaggatggaggattagctaggcggagctggtggcatccgaggtggatggatacaatctaatggctagatcaagtaactttttggcgagcaacgagaggatgagggcgggctcctttagtggtgccaactacgaccggggtgtctggatctatctctctggcgagcaaggtagctaagtgaggagcaacatcggcgagttgatggtgaaggcggtggagagggtgtgacgataaatctagggcctaactctcactggatccaaggtgtctgtgtttgaagttgttcgtgcaatgtgaattgcgttggagaggtctcttctttcttctctgcctccaataaatgacgttgtcgagcaaacgcactagagtcaggagttgtcgaacctaggccgatttgatccgggcaacggtaggggtagtggtgacgaaggaggtaatcaaaggtggtggatggaatgcagatggggatggggagtataggaccttaggttgtgaatcaagatcgactcagtgtggttgtttggcgcggtagtactcatcaagcagcatgaagatcgaagcttagttttctagttctttttttgtcgttgttttgcctcagttatgagaggtggaatctaagtattcctataaaatttagctgtatatatccatttgtagaatagaagctagatttttatccattattaaaatatatatatatctaaacttgagcagtaactattcccttgggttgagaagcattgtatatacaaatggggagtattgtatcttgtgctcaacttgatatgggcttgaatctcaccgtcgatggcaattaaattaaccatgttttcatctaagggagttgtatagcctaattggcagccaaaatgggttgttgaaaatcaaggagtctataggcgtatttctcaacagcaggtagtacacgtgaaacagtggaccacatttttgctttcatcaggaaaacacaggtaaatctcgttcctttaggtcatcccagccctccatctcagctagtgtctacaacattaaatccactgtcatataagcaaaaatctaatgtggcaatagagttaatgaggagaaagggtaaaaagataaagaaatcatttctcatgcaagaaactgtctctacacaggaactaaggattaaaacaaggggatatgtgaatgaatggatacacaataaatgccattggatgatattctatttactacgcctccattaggcatatactccctccatctacttttgatagtcatatttccaaatccgataaatttatttttgatagtcatatttcaatccaacaacctatcctcttaatagctttctcggatttaatgcgtgactctccattcttccatataagattggctgcgtgggcatcgagaaatgtaaatattaatgaatcgcttgtttacgaggaataactagtagcatgtttaaatggatgataaatagaattacttatacttagtctgtgtgccaagatgaaatatgatgatcaaaagtagatggagggagtagtttcttatatgacatgaccagtatggaaactacttgatagtttctgggttgatattggccttggaaaatggaaatgcaagcatatttactgtgaagaaatgattggtgcaactgcattttcctatggacttatgccagattgacatgcaatacatcgagatgaatgctaaacacagctaatctaataacaaaatgagactcactgttatcccccagaatagcaaatcggaagtctaagggcattctcaacccatggtatccatgggtagtgtctagagcagtgagaaatcaataaatgcatatatggacactagatccccattgcatcgtttctataccagtttccatgggggaagaaaatttaatagttctttgcatgtaacattaacacaggaggatcagctgtggcaagcaaacaacctacaccgttttggtagagtaattcaaatgttacataccaaatgagcagatatatgaatgtgtcaaaaacaaaccaaatatataacctctgacctaggcaattaatttgatcaatcatgcaattcatacagatgacaatccatccatctcattaaaataaaaaagagatcatgtgcacatgagcaggttatgctgacaccaattaacttaaagataaataggtacccataaataacaaagtagcagcactcaaactggtagtctttcataacatcagtttgtcagggttatggataacacatacctaatagtagttgactaaatctcggcatgacccaccacataccatgtcttatacggaaataaccttcggagataggaggagttccgcataaggaaggatgaatagagttctacatggaaacgacaatgactactcggattgtatccatattggtttccctagttctacttggacaaggggacacctatgggtataaatataaggccccctaggaggagaggggacacggaacaatagatcaagacacaagatcaatatacaagccaacatgcgccaagacaagatgtcggatatcgacttcagagataagcatggctagtcccctacggtgtctacggatactgtcaggagagacatatcgttgtctttgatatcgccggatgcggattcgaggaggaaggttaccctgttgtcgactacgagtcagcacttgagatcgccaagtcgacaacagttagatagactaccacaaatattgtactggtgtgattatggtgaataagagcaacgaccggcttcgaccaacaggtgtatggttattacccgacaattttggggtctgaacctgtataaaaatcctcgtccccatctcttttattacaatctcgcatatatcctagtaccaacgatccccataatatgcaaataccggaatcgcgacatcaaacgttgatagtggcgcgccaggtagggggattttggtgcttcaggattttgacgagatgggttcaagagatggattcttcgccagcaaactactcaacgacttcgtatattgggtgatacgacctgagcgaagtgcgttctccgatggatcgggatcttcgtcaagcttcaccaagtcatcgtcactatggatattttgacgagggatacttcaactactttggatccgagaagtctaacccgaccagagtacgtgccccgacgagatcggaaccatcaagattgaccctagttcaagattttgtcgcagcggaaaaccaatggtatcgacggcacgtgagattgattaaatatgagttggtcatgttcccgacgaggtgtcctcggacacatcggcacaattcataccgagatcaacggcgcactgtttacttaggttaagaccgagaacatgcatgcatgcgtggaccagccaacgtgtttctgcacagtgcatatgcaaattggtttggtaagacatctatgctactcggacacgtgcacagaaggtaattagtgagattgatttctaaattaatctactaatttcatagatacattcggcatgtatctacaaaggtacgcaatattttatatgaaatttatcgtacctatttttcaagattatacaatattgtcatatcaataatttattatgtttacctagagcatgtcttttatacaatatctattgtgcgagcatttctgatgttaggccaactacggtctaacgctgggggctcgctctattttcttctgtatgaattatgcttgtctacggtttatataagagagaattccttatatgccattgaaatttggtctggtccttgatatgccacacaaaattggctcttcccttatatgccattgagtcaaatttgagcaccctctcatgtcactcacgtgagttgaccgtgtgttgactgttgctaggatctaataacttgtcagatttttgcagaaatgacaaaaatagcctttgacccaaacttgagaaaatggcccaatgccaagtggcccaagtccaacatccctctcctcaataggggaaaccctagatcgtgcctgaccaggacgagaggaggcgcggctcccctgaccaggcggcgcgattctcttgtgcgcggcggttgtgcaggcggcgcggcgagggcggcagtccggagcagggaggcggcggccggttgcgggaggggcgaccgcgggagggctggtcgctggatgggtggcacgggagcggcggcgtcagagcaggcaggcggcaggtgaggtcggcagccggtcgcttgggcggcggcggcggccggtcgctggagcaggggcgatggccggtcgctggggcggcggcgacggccggccgctggagcgggggtgacggccggccgctggtgaggggccgcggcggcggtcgctggaagggctgcggcccgcggccggtcgcgcaggagctgcggcgcctggagtaggccggcggcgggaagaggtaggcgcacgcgatgacttgacgaaaatgacaaggaaaatagagaaggcaagccaatgtactcccaaatcttgggttcctgaagggtatgtatcaatttttccccctcttgtgattgttcagatttttgcatatggtggtagcactggttaggtgtagttttgtggcatacagtaatcttgttgcatgcatcgtgtataggatggatcctggtacaacatatttgttgaaaatcaggctccaagggcatcatagtagagagaacttcacctataaaacagaggaggtggtagacagtgacaggacaaacttcaaggactttattgatgacattagggagaagtacccatggggggtgaatgaatttataacagtgaactactatgattcagtaaacaaaaactatcctcaagtgtgctcagaccaatgtatgctagaaatgtttgtcaagaatgccaccaccaaggaaatatctatgttgattcaagttcatagcaacaatgagccagttgtagctcttccacttgctgattggccaacacctgaaaagatagctagtgggacagtacataatgcggctgacatacatgaggtgccatccactccatctcttgcagtgccatctcaggctactatatctcagccta

SEQ ID NO: 9321 - DNA, 7312 bp, Oryza sativa
attcctgcagcccctaatacttgtcgtatcaacaaaaaagcaaaccagacaaccaaccgatatccacaaccatctcaccgatcatcacccaatcccgccaatttagccaacagcagcgttaaagcaacacaagctcccgccagagattccacgcgcatgccatcatctccagcgcgcttcctcccagtcccagccacctaaacccaaaacccaagccgcacttccgcggccgcggccgcgcccggcgcccggcacacgggcgatgccttcccattccccccgacgaaatccttgagccacctcgccaaccgcggattcccccgacgaaatcgcctagggggcagcaaatgccgcgcggtccccgcacccgcaccaacaacagagcagcagcccccccctccccggatcgacggtgcgatttagggctcacctggcccggcgtgagggaggtcgaggcggccatggcgatcccacccgcggacgcgatcgcctccgccattctctctacagcatccgccccgcctccttcctgcgccgctcggatccagccgcgtacaggagccgagcagagaagagaagagaagaagagagggagaggacgaagaaaattaggtgcgaagaaaaaaaaaaagagaagcgcggtttaaagcggcgggtggatgtgcgcgtcgtacgagggagcgcgagcttgccgacgctgccatgtgggaccgagcaagagattccacggtcactgacagtgggggcagtgaggcatttcagagcttgtgggccccacacgccatcggatttgcgagtgacggtgtaactaaacggatgcttagtttggtcgatttaggtgagaagaagaagaaagaaatatttccgtttttattatttctctctttacacgaaaattgcagctttgtagattacaggattgcccctgtcggtcggcgagatcttgttgcacttgcacccctcactcactctgctagtcttcttaattccttcgcgtttagtacttgtgtttgcgtttttcgatgattatcactaacttaatctccccgcaaagaaaggcactaactttaatcggtagtactgctccgtttcttggatttcgatgcacatcaattcgtcagagcatcctgtctgtagtgaatagctcgccttaattaagaatcaaattcggaatttgagatggttagcagcgcagatgcccaactggaagtcaactacggcaacagatggtgattttctcgatcaaaagcccatagttgtaattgacgtgtgttgagcggtttatgcgatctgaatcaaagcgataagctgataacaatggcctctttttttctcatagttggcttgtaatatgcgtctacgtggagtatacaaaacgccattaatcggctttttttcacctgggaagtgggaacatgtttgcccaggggaacaggaaataggatttttatgttcagtgcgagagtcactagtctcgtcggtagttggtatgcgccctaacccaccaactaggatgcatgtcatacagatgcaatggagctagcttagtacaggacttcggctgcgttcgatcgtcgcttttagatgttagttttgctgtcacgtgaaattagatgtgtgattagcatataattaatcgagtattaattgttactccctccgtcccataatataagggaatttgagtttttacgtgcaacgtttgaccactcgtcttatttaattttttttaaaattattatttattttatttgtgacttactttattatgcataactttttgttttttatatttgcaaaaaaaagtttgaataagacgaatggtcaaacgttacaagtaaaaactcaaaatcccttatattgtgggacggagggagtcaaacttagaagtatttttttaaaaataacttctatataaaaaaactttcacaaaaatacgcaatttgataaacatgctaacagaaaaaacgagtaagttgtagtttagatttggagctttagaacgggaccttcgtctatttgtggtgatgcagtgccaaacaagtattttccctccatgtcaaaataagtagctgtataattcaaatttaaactacacaactagatttatttttggatagaggtagcatgatggtaacctgatggtgatagtaaaaaagagagaaaatgacttgtgtgaatattcctttgaacttgtattcgtggatacaatttatataattgatcaattgttgataatgaaacttaattagtgcttcttagcaataatatacttggcatgagcatgtgtatgccactcttctccaaaagaaaaaaaaaagaaaaacctcaaaagtcatacccacacaaaacaaaccttttaaagtacagaaatttaaaatgattttcatgaaaattagttagaaaagtgtgaatccacgtaaaagagaataaagggcctatagccaagtggttaaaagagtctcagtagtaccttaggtcctgggttcgactctccatgagagtgattttttcaggatttaacggcttttgtgctttcagtggtaggcgacgcccagtcttcgaagatgctcataggggtagggatcaccagtgacaagttcttcctatgagacggaggtgattagggagttgatgtgcggtaggcgcaacatgccgccaataaccaacccaaagctacctcgccacgagctcgtccccaaccatcccctccgcaatgccatccacaagttacatctccgtcacgccatgcgaaacaagtagcccgttggcggccacccttttccccacctctcattaccctctcgttattgctcggaggcctagtgacagataggaaagataggaagatgaggaataataccacttacgaccctttcagtttgcaatggtcgttgccctttctaatctaccgtggcctcatcccatcgatcgccacccctctccaagtcgttgccctttctaatctaccgtggcctcatcccatcgatcgccacccctctccaagtcggtgactgtccttcttcccaccacttgtcgcctcctcacagggccagctctaggtctagacaagttgtgcaaccgactaggacccagagtgaatggggcctatcctaatgtaatgtaggtcaagagtaaatagctgagcagtgtgccttcaatcaactgatgtatggacttcttgatgacctatcccattccagtcgtctcatcccgaggccaaaggcgtcgagcgggagcaactcgccgtcatcgccgacgactccttttcgacagacaacagtaaatgtgtctcttcctttgatcaacaattcatctcagttctctcttctactcttgcctggaccgtacgctcgtagcaggcagcagtgtggcacccagccggccaggccaaagagcgcaggaagcaaagtagcggcagccttgattgaagactatgtgcataggtacatttacatactagcagtagattttatttctcaatttataaataatcatagaagatgatatatcctactccctctggtttcattttaattgacgttttggagaatgacacagtctatagtttatatgtttgaccttatttttctattataatatatatataataaataaatatatgcttacttttattatagtcctttgaaagagaaatctatatacgttattctagtttctttaaactaaatatttttaaacttatttatggttaaagttataaaagtttgacctcaatcttgtccaaaacgtcaattattatagaaccagagggagtatctggttaagatgatacatcctatcgggcttttaggtcaagatttttagtgttcttgccttctattttcctttctaattgcagttgtaagattttaatccgttagatgatgatgataattgtgatgtgttgtagtgaaaagaatattttggacaatattgagcacaatattgttcttaatgattttgaataaagaaatgagtaaatttcacaatggtctgccttttcttaccaatgttttacattgggctagggttaggtcaaaattttcactaacaccatatatatttgccaagagttgcactttgggctaggctccaggatttgagcccatctggatgagcagacatcttctccctcccacaagggcatgcgcaacctcgccgccgccacttctgtcgctggtcgggagttgagtgcaaggggacacgatgggggttagccaaggagaagggcgatgcagcaggcactgctctgttgttgttttcccttgctgtccagtagttcaaggggctgacgagattggctagaggatagagattaagcgcgccggcgaagtgagtggcggagtggttattggaaggaaaagcgttagagttggggacaacggccatggccatgaagctgacagtggcagaatcaaggtcaatgaaacaacattaggggacaagtgcttgttcttcttctccagctctagcatgggattgacatgaagctcgtttcgcgtgtgattgacatatccagttgaattaggggcagggcatagcaaacggtggagaagctgtgctccagagttggaaggagagaggaggctcccagcttgcccatttatctcctaatctcgctgacaagtgagccaccggtccaaactgaaattttttgctgtaagacctagcctaaagtgaaaacattgtctataggatggtccaaactagaactttggtaaatataactagaccaatgtgcaatttactctaaagaaattccagaagttcttttttaatcacatattggatatttgccgttttctctttttgaagcatcgtcaataaagttgttggagtttagtggttatttgccgttttctctttttttcaatttttttcaatgaagcatcaacgctatttatcgatattaagaccatattgcaatgtcacgttaggggattaatggattataatgtgtcttataactaaaaggaaatatctagtctaagggactattgtttcgagtttgcatagggtcctagaaaacgtagtagctttgccccctagtttgctacatctctatctatcagacggcttggtgttttccgtcggctgccggtcgaaggcttggtgagaatgtgagagatgggaagagagggaagagggaggatagaggaggaagaagaggtggttgttgacatgtggggcctattggacacgtcagtcaaaatcgggtattataaacctcggatacactgttttgcaagttaagagacgtgctacaattggtatcgcggtacaagaatgtaacttgaactcggcgtcaagataagggacctaatatgaacttattccaccataaaaaaaagaacttattccacgatggaaagctcttcttgcgttcagcagccagtagcccaacaaggcccattgttcgggttaaacgaacccaaaaccgtacgaaagcccgagaaaattgccttcgtctgcgccccgcgggctctcgtcccaaccgctcaccggcttcccgcggcggcggcggcggggctccatgctcacggtgaccctcctggacgcgcacctcgcgcggtgcagctcggcgcgccacctcctccagatccacgcccagttcgtcgcgtccggtctcctcgccgacgccttcgccgccagccgcctcatcctcttcaccacctccacccgcctcctcccgctcccgttccaccactcgctccgcctcctccacgtcgtccaccgccccaacgccttctcctgcaacatggtcctcaaggcggcccgcgagcatgggctgccgcacctgtgcctcccgctctacgcgtccatgtccgcggcccccgactgctacacccataccatcctcgccgccgcctgcgccaccaggagggccatcgaagaaggccgccaggtgcactgccacgccgtcaggcacgggttcgggcgcaacctgtacctcgcgaacgcgctgatgagtatgtactccgcgtgtgggtgcctcggcgacgcgcgcaaggtgttcgacgcgggtcctgtttgggacgccgtttcttggaacacgatcctggccgcgtacgtgcaggctgaggatgtggaccaggcggttggggtgtttgcacggatgcctgaacggggtgctgcggcggtgagttcgatggtgtcgctgtttgggaggagaggaatggtggacgaggcgaggaaggtgtttgatgtggtggagcgcaaggatgttttcacgtggactgcgatgatttcttgctttcagcggaatggcaagtttgcagaggcgttggctttgttctcagatatgcgtggggaggggtggcctgtggatgaggcagtcatggtctgtgttgtcgctgcctgtgcacggttggaggtaactcggaatggggagatgtgtcatgggctggctttcagagctggccttggctcgaggttgaacgtccagaacgcattgatccacatgtactcaagttttctgaatgttgttgcggcacgaagattgtttgacagtggccagtgtttggaccagttctcttggaactcgatgatagctggctatcttaagaatggctctgtcaaggatgcaaaggaattgttcactgtaatgcctgacaaagataatgtttcttggactacaatgatatctggttgtgtgcaaaatgaccagtcctcagaggcactcactattttcaacaacatgcaagcccaaggaatcaagccagatgaggttacgcttgtaagcgtcatctctgcatgtactaatatgtcttctctcgagcaaggcaagtcaatgcatgagtacataagggaacaccaatataccatcacagtcatacttgggactagcctcattgacatgtacatgaagtgtgggtgcttagaatctgcattagaagtcttcgatacaatggaagaaagaggaacaccttgctggaatgctgtcattgtggggctggccatgaatggtctggtgatgaagtcccttgacatgttttcggagatggaatcatctagcactgccactccaaatgagataactttcactggagttttgagtgcttgcagacatgctggcctagttgaggagggccaacatttcttcaagttgatgcagcacaagtatcacattatcccaaacatcagacattatggatgcatggtggatcttcttggacgtgctggatatgtcaaagaggcagagaatctgattgagagcatgcccatgtcaccagatgttccagcatggggtgctttgcttggttcctgctggaaacatggtgataatgaggttggagaaagggtggggagg

SEQ ID NO: 9322 - DNA, 18778 bp, Oryza sativa
gaggtctcccgacgtggctgatccccacgggctgggtgatccaggttagtaatgtcgtgtgggtaaagtgtaccccctctgcagaggttaacaaactgttcgaacagccgtgcccacggtcatgggcggatgtgaggtgattcctagcgtagttttgtttgactactgccttgtgaaattgctgttgtgaaaaggggatcgatgtttggaaaatctgcagctgatgggatcagctaggcccgggtggccgtttgaaagttgttggcccgggtggccgtttgaaagttgttggctgggtgccaatcttgaacaattcaaaagactgatacattgtacatactccgaccggacgagacgcactgtctcatccgtgtcgtttgagaagcactcacttagttgtttacagaaaagagttcaaataaaatcaattgcaaaaacaacagcctttccttgaagcctgcattaaacacttatttcccatggcttgctgagtactcccgtacttacccttgctctatataaataattcccccccagttgctgaagaagatgaagcggatcctgctgatgacgagttcttctaggagcaagccggctatgatgagttttagggtttcggcctagttcccaagtcgcgcctgtgttgtttggtccaagtattggcttccgcttcccttttgtaatgcagttgtgagctcgggatctgtccgcagcccaacatgactgtacctttactctataataaagagacctctgttgctgtgataatctgtcttcctgtgataccagcactgtttcctgggactggtatcgattaacaggttaatttggagcgtcacgggctagttccggtcggtactagttcggggcgtgacagagctcatgacgaatgcccttggtgaaagcggcgatgatgacatccttcgttgattcggagatcttgttgcgctgctcagaaaaacgtccgatgtaatctcggagggattgtctgggcttctaaataacgttgtagagatcaaactgggtgccggggcgttcaaaggtgccctggaagttggcgatgaagtggtcgcgaagctccgcccaagatccaattgtgccacggggtagcccgtgtagccaggaccgggcagaatctgctagggccacgggcaggtagtttgccatggctttgttgtctcctcctgttgcgcagatggcgagaccatagacggtgagccaggactcagggttagtggtgctgtcatacttctcgattccagtcggcttgaagccagccggccaatccactcgatgcaggtcgcttgtgaaggcagcaactccatccacatcatcatcgtaacgatttggtgaatggtgggggttgtagcctcttgccgcccggcgctggttgatagtctcgtgaagatcgatgggatgcctacggtgtgggaagcagggatgttcagctcgactctccttgtgctggtcagggggcgagtggacagatcgtttgccatgatccctactcctgcgattggatccctcgccgacgacactgaggcttggttggtgatagtcttgagatcgaagaggtggaactcggttgccggtcggcgtgcgggtgctcgtggagttaactgggaccgaggcggcgatcatggttttggtctggttcaagatgttgacgacgtaatcagcctgattgagtgtgtcttccgtgaggagggtgtcgaggagggtgatcgctgcaaccgcgttctgttggggggtgcgaaaaaccgtcgtcccctcgacgtcttgttgcccgatgagctctcgtgctcgtcgtccagattccaaggcgcgctgtcgtcgatcctcagccttcttcgtagcctgttcgcgatcttgttgttcacgctgtagtcgttctcgctcttgtcgttgtcgttcttcctccagtcggtaacgttcagcttcttgtcgtgtgcgttcttcttccgcttctcgggctcggcgctgttctgccgtctcgttgtcggccatgaatacgccgaaaaagagaggcgtgtagtcgtcctcgtagctgtcgtcgaagtcatcgaagttaccgtagtcgtagtaatagccgaagtcgtcgtactcgaggatctccgttggtcgagaactgacaccgggggagctgaggtagccgtccagttcttccgtcgagaccatcccaagaggttggagtataacaccgacctccctagagttagattggatcgaagccgaagctggatcccgcctaggccttcggggagaagatgccttggtggtgaagacagcggccagatcatcggggagtctcatcaggattgagggatagggtccatcgtcttgatcaggtcgtgttggagtagattggatttcgtccgagtggtttggggctgactcaatcgagatgatcttggggtagatctcggccgagttcggaataccgaacggggtggagacctagcctctccccgactggttcggctccgagtcgaggagagaaatcctgccgaagtcattggtgatgaagtcgaggctgccgaaccagaacgcctgcccgggtgggaagacgaagtcgtcgatgccggagacgaaacccatcgcactagttggcaaaaaacttgacgctacccctacctggcgcaccaattgtcgaaacaagatttcggcaatactaaaagggggtggctatcaagctagaaaagtggatgggtttggagacaaggaagtttatacaagttcaaaccttcttaataagaagtaatactctactcttgtccggggtttgatccgctgtcacatcctgattttcgttttaggatttataaattattattagaatttatattaaatgttcattaatttacatgtgaagttaaatgtgggaaataaaatttcctaaatataaagcatggctggatttaatttttattaaattctccgtggttaattatactctctgaaattttctcggatttttcggagctcaattcctaattttaatcatacaaagaacatttcagtaattacccacaaattaaattaatcattaaatggtctgattataatcttgttaagtactttgagtgtccaagtattttcaggatttttcttgaaattatttgagcattggaagtatttttaacaattgaaagatcattcagtgattaatttaattggaaaattaattaataattctttcctttccttcctttggttgtcaatccttcccggttcactctccccgtccgcggttcatcgtatccgccgaccccttttgccaccgcggtttcgttttgtatgacgagccgagtcctattctctttctggtttcgtttcctcttcctttcccaaaacggcaccgcatctgtttcccccacctttcctttctaggcaaccttctcctcccgtatctttttcccttcctcctctcggcctcctcccagccgtgcgcctctcccctctcccagccgcgcacgccttccctcccctcccccctctgccgtgcctcccttggccccacctaatcctattcaatcttcccctatataagccgtcctctcccctcctgtttcctgtttttttttgtgttgcagccgcccctagcctcctcctcctcctgtttagccgcctcctccagcaccctagccgccgctgccctagctcgccgccgccgctagccgtcacccctcgccgtcgtcatcttggtcgtcgccgtcgtcttctccggtgagctctcctctctcccatgtcatttaccggtgtagtttatccctagggacttaatccaatttaatctaatcttatttggccctagcgtcgagccggtcattgccgtgcaccgcacccgctgttgtccgctgctagccgccgcgtagccgctgccctagtgcacgtactgcagtcgccgcgccgctgtcgtgcatcgctaccgctgccgcgttcctggcttagcagagccattgctaccgctcggtagccgtcttgctaagtcgttgttgagtcgctgccgctgctgcgccttgctgtcgtgctgtgccgtcgctgctgtgccgtgttgtagccgtgtgccgcttaaacctagccgccgctttatcccgttgctcagtagtcgagttatctagccgtaggcaaggttgtcaagatcgggatactatgtagtatcgttttgctcaaagtaatatcgtaccgtaagatcgtatcgtagtatcgagatactatgatattttctttttttaagtttaattaatatttatattaattatatatatagccattctatataaaaaatgtagtaatgatatatgtcatgcaaatagagatatttatcaagagaaaccacgctggttttgatatatttaactgaattttatataaatttgagcatatttatttacattattttcaaaccatgttattttaaataatattttgtagtatcgtagggatcgtagaatcgggataccacctaagatttcgtaggatcgtgtagtaatgaatagtaggatcaagatactataaaaattaggatactaggtgggatcggtatcgtttcggcttagtaggatcgtagtatcgtaagatacttggatacgaatcgggatactgacaaccttggccataggtgcaactctaggttcctaccggcctatcgtttgccgtatcggggctttatcgtgaatcgtttctagcccaccggtttagccgcagccgttgttgagtcgttcgctcgttcgttggaacgaggtgttccccgtgcttcgttcgttcatccgtgtggagtcgtcctttagtttagagctgttcagagccaccggttccgttcgccggtttcggttgatcatttgggtgatcccgtgtcacgtagaattgactcgttgagtcggtatctcatgaggcccgcttgccagatcaatccaagccatccaatcttcgtcgactcggtcaagattaatctcagcaatccaaaattgatataaatccgttctcttttttcaatggcatattattcctttttaatatatgtcatctaccaaatatgatctaatcttttccggaggttgctttaatcttttatctccattataaatcatttgtaaatgatttaattaatttggaatagtcttttctttaataggtttaattggaattaaatcttgtaaaatttgtaattaattcatatgaagttggaatgaggcagttcaagtctcataattcatctaaaatcatgatctacatgcttgtttacttttcatgtactgtttatttggtttttattagtctttttctccgttttgcgtgttagcttgtcgtttccgtcgttacgaaggttcgcgagtgcgccggaagcattcaagaagattaattgaagaacaattattgcaaggcaagtcacacagatcccaaacacaattcctttgagcatgttgattctatatttaaattctctatttattttaactgtgcatttattttcgaatgtcaccgggtggtgagcctttcccatttaattatggccgaagatgactttattttcctatgggttataatttgattagctagaaccttatatattggtttgatccagcaaatgttatatatatataattgcttagccatgcttagaaacattagctcattaatgggataaatcatgcttcactattacttatggttatatttaatggtagctcacgatggttaatcgtgttatgttaattaattgataattaaaacttgtcaatggtgggttgtgagcacatggttttgatggtcgtgcttatggcaattaaggaccggttcgcgagctactgttgtgagacattaaccgtaccaaccacaagccagcgtgggcaacggctttaccttttgtatagcatggttcattacggggtgtcagactgtgaagcggcgagaagtccgtgggggtcgctggggagtccatgcctttggttattgagggggtgattatgatccaggaacggtgcactgtggtgagttgtgttgtgcagagggtattgtcacagcctctattcggatactttctagtatccgcgacgcatagtagacatgatgtttaggctgtgtcttgtgggtacagtggtacacctctggccagagtaaaactattcgaatagccgtgcctgcggtcatgggtgggttgagcaatgtttttcgtgattagtctcacatctctcacaataattattgatgctataaatggtaataaattgcttagctcctggtttggagttagatctgtacagccaggtatggttgttcaggatggttgggcctgagcagtatgggtgtgctattcagtgtttattaaaaatgattaattactctactgttttactattcttaaatatttgctaaatgctgcttttgcaaatgagcctatattatgccatcctttggtattcttgtgcacttgcatatttgctgtgtggtttgttgagtatgtcatatgctcattcttgcaataatcaatcaacctcagttgaagaaaaaggatccagaaggagaagacgtttggtttataccccagttgagctgcctgtgggagtggagctaaagccatcgctagacgtttggtttatacaatttctaagtatgtaacgttattattatgatggatttgtatattaaattgtcagtttgtgtagctcggctgattcctggacgagggttttatgcacaaataagttcggaaattactagtgaatttctgggcgtgacatccgccgagtgtattattgatcgtatgatctgagagtagaatctcgtaccccaagaggcacccggacccctccttatataggagaaggagtccgtattacaaaatacagcccatatctctaacggaatatgtagttacagatatgacctaatcgtaaccgactaggatcccgggtacttccttaacacacaagtttggaacttaacccgggcctcattaaagatattctatctatacatggctccctatacccaatcggattatacatgccgtgtaggtatggggtatccataatctccacaggtggccagcagcagtgcggtgtccaccgccagcatgaggtggccctgcgccatgagcgagacgaacacgaagtgcgccaccgccatcgatgcagatagttcgtgttctcgctggcgatgtatttctattgcttgtgcagatagctgctgatccatccatatgtgtgtgtgcgtgctttaaagagagagacgtgacggccggtgatgtgttcgatcgtttgtttccagatgccggcgcgcgcccccgccgttgctgccgatggagctagcagcgacgacgtcctcgatctcgtgtagccgctgctcggcctcggccggtggtgtcccacgtctcgtcgagcaccaccctcgccttgccgcgccgccccttcatcgccagccactgccacgacggcgtggatggttcgcagggcgtcgtggaagcgggaggtgcggtcgaggccgttgcggacgagctggaaggaggggatagagagagaagagagataggagagctgacacgtgggtccaagggcatttttgacatttcacgtgatttctctccccctcttcaaccgaaaattattattttaatcggcgtagtgtccactgtcaaattaccacatttatggagtttttcccccaaaagtgagtttgggcaatgtactagggctaaaaccgcatataagcagtgtcctgtagcaaaatttgcctaaattgggcaaattttggcaatgcataggctcaaattggtagtaaattggtagtgtcatccgccggaagtgcccagaagcaggccacacaactaacattgtgcttatttacgctacgtaattgtcgtgatgagcaaaatgaacctaattatgtatatttcttatcatcttatttgtgcttattctgcaacaaatagtaccaaagctattacaacaaaaaaaaaatggtaacccttggttggtacatatccaaatagaaattgacccacaaaaaattggcacttcattgacggtttgacactaatcctaacattcacatttactatgctaccctatcaaaatcttggtagtacccaaagttacctagattttggcactactaaaattttggtaaggtaccaaaacaaataagcccatagttctcactaaagtgctgaattgggcttaggaacagttatgggctttcgacccactacataatttttttatttcctattccattttctcactcagatgcctgctaaatttgccataaatgttactacccttttacctaatatttgtagatattattactgccataacattatttataagaattcttgtactatttataaagtactcctatttaggagtaattactaataccgctctaatttgatggtctattctatactcctttttatctcccggaaagagacagaatgggaaccatacttaaataaataaattatcttcagcgtcaaaaaggaacaaaaaaaagtgttcttccaaccttagaacgtgacaaagacaacgaaaagaaaaatcaatatgttcttttcagctttgaggttatcaccaaagctttccaaggatgacaagccgggatgaactttgcgtccaaaaagcaggtccaaaaaatccaaaccttttatcctggccccgtctgcaatccacttctccccctcttttgcctctgcctcagactattcattcgatggccagcgagtaataagattcgctttctgctatcctcttctgcttctgcacacttctttgcatgtgaacccaagctcacgcacgctgacagttcatacagctactgtaaaaaaaaagtttccacctggggccaatactttatacggactcacagtagtacttgtgagtagaacaaatggtctaaattgttcattgattctgttatagattgcttaagccagcagcaagaaagagtactggtaagcaggccaaatatgtggctggtttcttgttttttccctgtaatttgtacatagattaatgtttccttgcaaaacttgtgcctgcattcttggttcttgccataatttctttgggagcggatgagaggagatgagacaaggtcgtccttgctggaccgtgtctttactgctatgatctttgctggttgaggcagatgtggtggatggcttctcttgaagaggtcttgggttcacatggccattgcttgcctcctcctttctccgtgacgtcttcttcctgtggggttcttccctttggagcttggcccctacctactcaggacaagcgtgtagatgcaggcgtgaatagcctttgcctgtgctcccatgtcaatcaagtgttctgtgctagattggtcccagagatggtgcctctctggtgctaatttctcttgagggtgtttctggtttggattactgagttaatgacgccatggctgggcagagtaggatgaggtttcttgcttcttcctctcttgagtttgttcttgggtaattaatccttttcctgggagcaacttgtgagttgtgactgtttcttggtttcctccgccttggttttaccccctttttttgcgttttttcgaggcatcgatttctgagccggataagtagttgagctgctggtggctgaattattaacagtccaattaattgctgacatcccaagatgggcagttcttgataaccccagtaatttaatcgctcggtttagtagctctggtttcaattgctcccacatggagtaacaattcattagttagagggatttagagctgaaacttcttctcaaaatcgcagttcttggttgttgatttccctctgttcatcgtggaaacgtgttaagctcaagttcttgcaatttttctttgctttttttttttgttttgtagaggaaaatttcttgattaggagatagtacaaggttggtggctatggaggaggaatcccaatcccaatcccatttcccgctccggtgggagagcaccggcgaccaatggtggtacgcgacgcccatcgactgggcggcggcgagcggccactacgacgtcgtccgggagctcctccgcctcgacgccaacctcctcatcaagctcacctcgctccgccgcatccgccgcctcgagtccgtctgggacgacgacatgcgcttcgccgacgccgccaggaaccgcgccgccgtcgcccgccgcctgctccacgactgcgagccccccaggggcgccgccgctggcggcggaagccggcccaaccggctcatccgcgcgggctacggcggctggctcctctacacggcggccgccgccggggacgcggccttcgtgcgggagctgctcgggaggcagccgctgctggtgttcggcgagggggagtacggcgtcaccgacgtgctctacgccgcggccaggagcgacagctccgaggtgttccggctgctgctcagcgcggtgctgtccccgcccgagtgctccgccgggggagaaggcgacggcggcaccgccgccattgctgggggtttcatgttccggtgcgagatgatgaaccgcgcgatgcacgccgcggcaaggggaggcaactggaggtcctcagggagctcctgcaggggtgctccgacgcgtcggcgttccgggacgctcagggatcgacgatcttgcacgccgcggccgcgagggggcagcttgaggtgatgctacttcctgcttcacaaattttttatctatgaaatattcatgacagggtaattccatagaagaattagttttactttgtagctgcaacttttgttaacattttgtcagctctaatctatgaaactttctgattcttgaggtgatttgatcatatttaattgctaatctggggacactggaatgatatatatctgctacattattgtctttgatttgactgtccctgaagttgatcttgtgcacatgctagccagatttcctttcgttttacacatgatatgatttcttagtgacacatgatatggcatgttctagttaaattaatagagatggaaactagatggcattgacagatattctcaacctactactgaaatgtggtgtgtttagctgtcacgaatgtttggtgagagtcagcaactgaggtttagttgtaaaccattgacctaataaggaattttataatacatccatatatgcttgtcattggaagtgttcaccgacacgctaatgcgtggtgaagaaatagtctgttcatctgggatgccatgacaagtgtcttcccaccatctgttcttttgttctaaatttatatttattgattaaaatcgtcgtgtgttactctgtggatgcatactgaagtattagcatgttcttacttaattctacaggttgtgaaggatcttattgcctctttcgatatagtcaactccacagacgagcaagggaatacggcattgcatctagccgcctttcgaggtcatttgcccgtggtcaaagccctcatcactgcatccccatcacttatatcagctacaaatgaagttggcgacacgttccttcatatggcgctgactggctttaggaccccaggattccgaaggcttgatcgtcagatggagcttatgaagcaattgattggtggagtgatcatggatttaagcagcattatcaatatgcaaaacgacgatggaaggacagttcttcacttggctgtgattggcaatctgcactctagccttgttgagctcttgatgactgcaccgttgattgaccttaatgtccgggacaatgatggcatgactcctctggatttacttaggaaacagccaccaacagcatcgtctgagatactcatcaagcagcttattttggctggtggaattgcaaattcaatggaccatgagaccagatcagccattgcttctcagctaaagatgcactgtatcgtaggcagcccgggaacatccttcaagatcccagatgccgagatcttcctccatgcaggtatcgatgcgtcagacatcagcgaaagaacgaactcattctctagcgttggacagagtgagccagaatttccggaatccagtcgtaagaagctgaactctatgcaaaatgcagcgaaacatctcaagatcctactcagatggcccctccgcaaggagaagaaatcatcatccggtgcccgaaatgaactggacgacgacgcatcctctgtggattcagtcaagagctggagccacggggagaccccgacaccgctgaggcagaagtactccaggatgagctccctgttcaacaacaagcggaccatggcagccaggatcggctcaccgagtccatcgatgaagaagagcttcgcagatggcctcgcacatggcgtgatgcagcccgaatcgccttcaggctcgggctcctggtcgtcgtcgtccttggtcgacaggattgaagccgtccatctggacaagaatggccaagcatctcctgataccagtgtggtgatcaggcgtacacccaagaagcacgggtctttgaacagcaggctcatgaaccaatacttctgcatcggagcgcaggggatagctgtcgaggactcaaccacggggcagcgatcaagtcggatgttcagaagttcacttctgtcagctgcctgaattcgtaatttagacatggtttgctttccttgacttcactgcttacaagttacagctgatctgttagtatgtgcgagtgcatgtgagaagactgtcatatgttgtgtttgtattactgatgcaaaatggtgagatctactaatgtaatgtagtgctgttggtagtgtgtaatgattttgttgggagagtgagtacaatggaaggcatggttttcaagttctatggtttttatatcttacaatatcatatgaggttagtgagtataatttgtagcagagtaaattacattggtggtacacgaacttgttaagtgggtgcaatttagtatataaatttgtaaaatgctcattttggtacacgaacgtatctaatccgtgcgagctaggtccaaaatggcttggcaaggttaattttacctatctgatgttgattatctgatgttgattaggatgtgacgtgtatacgcatagtgagtatgcataaaacatgctatatttacaaatttgttatctactttatcttgaatttcgtatgtttctaacccctgtattactgctcggtattttatatctttctctacaatcactatatctcattctatcttttttattgaacaggtgtatgtctaagtagtaaccttctcatatatatatgtttatatagtatcctaatcagcacctaaattaacaaaaataatcatgtaatgtccttttgaccttaagtcgcacgcgcaatataagctcgtgtaccaaaacgagcattttacaagttcatatactagattgcacccacctaataagttcgtgtaccgccgatgcaatttactctttgtagcaccttttgtatcttacgactatatataggtatacagagagaggtatacagttgcataaagaatatagcgcctcttcaaataccgtaaccaaaaaagatttagcgatctttgttcacgtcatcacgtgggtcttatctcaatattacatttgagtggacattttaaaaaaagcaaggatggacgaatgatccgacatgccaactatatatgtagtcgtgctaagaaaatatgcagcaaaggctcatcaaatacgcaaaaaatcgcaagcaaatgtaaaccttgctccacttttctaaatgactagcgactaatttcagtcttggctccgggtttttttttattattttcaaaaatacgggtaagatttgcgtaccttcgtattaagactaagtttatattatagcacaagtgaagacaagtatgaacagaagaaaagaagaaaagaaagttgcaaaataattgtgaaaggcatggcgattttagatatcaatgtcatggtggtgggtttctcctctgttagttttaatctgcttatctatcgcgtgtcaaacttcgcggttcatatgctaactcgttttttttaatattatcatttgtaattacactttgtaatgattttccatgatcaataaaacacatctttctctaaaaaattaattgtgaaaagctatatcttacggctgaattgtatgacaaaaaaaactcacactagactagcgtctggaaggagtactagagtgtggcttcctttgaggtagcacttgccacctccattctttttttttctggccgttcgaaatacgattgttctattcctttcaaattgaccatgacgttagaattacaacaatgtcatagcctgctatcacactactattggaaaaacaattgcttatttgaaggagagcattttatctaactgattttctagaatgataaataaagagtgcctctagccaactagatcgtcttttcctgttgatcacaaagaacacaatgctagagatgctgcaggccacgtatgcttgatctatctgtcgtctagcaacggcggtgggccactaaccagtagaaatacttgtaatgcagtggtgaggtttcgagatctccaatgtcttcatcaagtatcaacgaaagtctctaaatgggaagaacatatgtaaagaatacagcacaaggattttttttgagtttcaaaaccatagaacaagttgtgtatttgaccattgaagaagttgctcaaccataattttctgtgtaatttccggatagtacatatattcaaccaactgtttaattttcaaaattttaagcctttttatttacttattttatttattactccctcaatctacttttgatagacatatttccaaatctgaaaaatttatttttgataggcatatttcaatccaacaacttatcatcttaatatctttctcagatttaatgcgtaactctccattcttccacacaagattggctacatggacatcaagaaatttaaatattaatgaatagcttatttacgaggaatgattagtagcatacttaaatagatgataagtagaattatttatctttggtctatgtgttaagatggaatatgactatcaaaagtagatgtagggagtaatatttcttaattgaagcaggagtgttgtagtttggaagactaataacccaatactttatggttagggcatccccaaccctccacctcagatggtgtccatagaatttattagcctgccacataagtaaaattctgatgtggcaaggtaattaaagaagtgagagaaggaaaaaaaaagagaaacggtgtctcatgcacaaaactggatcggcgcagccaccaagatgcatgaaatgagagaaatcagcgttgggggcaactcatcgtttcttccgcctggatttttctcgagctcccgatctgctgtgccgccatgcccgtctccgtccagcgcgccaatttcttctcggcgaaatttttggtgcggcatcaatcctcttggcgccaagttcctgctcgccttttctttttcttgccgcttctatttttccccaatcacctgtgttcttcaatatctctgcttgagagcaaaaatcgccaaaactcatctctggtggcttccacattctgtcttcttccctatatcctcttccctcttccataccatcatgtcccaccaatctgaaaatgatccgccaagtgaatcccctttgcatgatgattctttggatgaggtgagcagcatagatccaatggatctgtaccctttagatgaggtgagcagtatattgggcgatattgctgatcaagtgattgttgaagtgaagtccgaagttgcagctctacaagacatgagacctaccaggcggagtggtacaagaagttatattgataggccttatgcagaatctgaacaggggctcttgaatgattactttgtagagaatccagtcttcaatggaacaaacttccgtagaagatttaggatgagaaggcccctgttcttacgcattgttgaagcccttggtgagtggaatgagtattttactttgaggatggatgctcttaaccgcccagggatatctccaataaaaaaatgcacatcggctattcgccaattgggaaatggcagccctgcagtggagtgcttgaagatattcgtgaagggtgtgattgaggtgtatggcgaagagtatttgcgacgacccaccgtacaagatgttgaatgcttagtgcatactagggagcaccgtgggttccccggcatgttagggagcattgactgcatgcattggcattgggataaatgcccagttgcttggaagggaatgtatacccgcggtgatcaaggtgttcctacagtgattctagaagcggtagcgtcgcatgatcgttggatatggcatgccttctttggtgttgttggatccaacaatgatatcaatgtgctgaatcaatcacctttgttcatccagcagttgagaggggaaggtcctcaagttcagcaccatgtcaatggaaggcaatacaacaatggctatggccttgcagatggtatatacccagaatgggctgctttcataaagtcaattcgccaaccacaatcataaatgcacaaattatttgcacaacatcaagaaggggcaaggaaggatgttgaatgtgcttttggtattttgcaatctcgctttagtattctagaacgacatgcacgtctttttgatcaaggggattttgagaatgtcatgctagcttgtatcattcttcacaacatggtaatcgaagatgagaaatatatgaatcaggatattcctcttgacttgaatgagacaccaagcacgtcatctgttaaagaagctacaatatctcaaggccataatccagagatggaacaagtgatagaaagaaatgtcattattcgtgattgtactgctcatagacaacttcagtcagatttgattgagcatatttggctaaagtttgggaaacgaagttaattaggtgatcgtgcatcattttaagtctagtttacaatctgtgtattacatatactacttcatatatagcttagcagtaacagttgaactaaataactacttatttttttccgtaatgtgattttttaccttacatatactgacatctcttcttttatttccttcctgcagataaggtcatgtctaatgtgttgctgctctacctaatggttgaagtgctcctgtctgctggatagatgaaatgctcctgtctgctggatggatgacctaatgtccattggatgaatgaatttttaatgttgaatgtcatcaggctatctaagttattatacttatgtttctttattttgatgaactgtgtcgacgtttgatatcgcgattccggtatttgtatagtatggggatcgttggtactaggatatatgcgagattgtaataaaagagatggggacgaggatttttatataggttcaggccactgaattgtcaggtaataaccctactcctgttggccgaagccggtcgttgctcttattcaccataatcacaccagtataatatttggggcagcctatctaactgttgtcgacttggcggtctgaagtgctgactcgtagtcgacaacagagtagccttcctcctcgaatccgcatccggcgagatcaaagacaacgctatgtctctcctgacagtatccgtagacaccgtaggggactagccatgcttatctctgaagtcgatatccgacatcttgtcttggcgcatgttggcttgtatgttgatcttgtgtcttgatctattgttccgtgtcccctctcctcctagggggccttgtatttatacccataggtgtccccttgtccaagtagaactagggaaaccaatatggatacaatccgagtagtccttgtcgttttcatatagaactccattcattcttccttatacggaactcctcctatatccgaagattatttccatataagacatggtatgtggtgggtcctgccgagatttagtcaactactattaggtatgtggtatccataaccctgatagtagcccccgacttcaatgcaaatgaacgagttcatattctcaatccgaagacctcggaataactgttatcgagctcacgtgaccgttctcagtaagttcagagataacgatagacttcccttatcagtctcgtgcgggcacagtatagggtttgtctgagtcaatctccgacgtcaaccaagaaagtacagagcataggactaactctctcgtcttgctgtaatcgagaatttggattgaagtcaagaaattttatctcggcgggtacaccatctcttcattccgtattccttgtcgaggtccaccaaccattctcgagtgatcgagaaggcgcagagtctgcgacggagccttgtcaacatttgtcgtactcgccttagttgatcttggtatagaaccatagagacatggagtcttcgacaatgtcgaatagaattttcctgaaatcaatacttagaaaaaaatattagatagaaatagcatgttataatatgtatggaaaactgaaaatgaattaaatttacagactaatgttttgtatatgagcgtcttctcttttaccgacttcgaccagtcagtttgttgagtcatacactctccctagcccccagccttgtcgtcggagaatcgttctcgaaggataaggctcttggacccttgacctgctttggttgaaaagcgcttaccctagcccccagcagtgaagttgaaaaacctaatttctgattacacggctggttaatatgcatgg

SEQ ID NO: 9323 - DNA, 9063 bp, Oryza sativa
acatccacaaccgccatttcaagcgtcatatgaaggctataaaaggaggagttcaactcacttccgaaacacacatctcaagtggagtacaactcactttcatattttaggcatctctttagtgtgtggaattaggtaaagagtgaggtaaagctccggaaggagtgccccaaatatcggagttcttcttccactggagtttcggagaagtgatggagttatcggccttcttctctcgtttgtatcttaacggatgcttcttaagtaagtatttgagatctccttatggtatttaatttagttgcttgaatgacatatattcccatcgttgcgggttcgtcgcttagttgaattattaagtgctctagtactaggattctagataaagaaggaagttcctgcgtggggctagagtagtaatcaataacttaggtgtggtgtttaggttagcggttacctttttttgttgtgtgctccatagaaagtgaggtaggcggaaggtggtgatagccttgtccatcctttgtatccctccatgttcaggtacatcatagagccgtaggctggattcagcttggcagaccagcggagggctagtgccagaagcaatcgatagggttttacctttaactcaagtctagtaaattaatccataggaatcctctttagccttagcctaccattagttgttgtccttggatagaattatgttcctagatatatgcacatgttttctgtgattcgatacccttggaatactctgaggtgaagtgctacagcggtattcgtgcgcttgcggatttatctgtgaccgtatcaaataccaacagcgagctcaaagagatcgtgatgcaccaacaacttcatcaacatcatcctatgtaatgtcacatccacgaaaaccttcaactggttcatgtaaggaattatcccactcattgttccaatcaaactcctcaatgacttaaggatctggccttttcctgctttctcacgcctaagctgaaacctagtttccatcttccagttataggcaacaaaaacaacatcattcaatctcttgtgtactaactggttcattttctttgtatggatctgcagggatgcaaataacaagggaagaaaaaaaaggataaataacttgctgatatagtaaagaaatttaaagcaaaactacagataaactgactcgcaaatccaaatgttctccaattgagctcacaactggataaaaaagctcaattggaatgcatgctgattggtatgctggataaaaaagctcaatttatttggatttatttttatctattataaatcaggaatgcatgctgattggtatgctggataagtcaccaaaatattttggtagaaacactatttgatattttatctgcaaacaaaattcgtgtttttaataaaattttccaatgattgaaccacctgtacattgtgatgtacttgatgggtatatcctttgaaggagcatcctaagtaatatgcactggggatattatttcctgaaaatgtagtgtattgtgattccacaaagctcaaatatctcaactgaatcattccaatatgcttagttatgatcaagaaactttagtagcataaaatggtcggtgaagcactttgtccagacatctgactaactgaagtgatgtactgcattaaataaagtttattttatatatcatacttgcattttcaatgttccatggccatattactggatatggatgaatatatctgtgtttttgtgtacctcactactataacttgcactgtccacacattttcctagctgaagtgatgcaccacattaattaattatagcttgcattgtccacatattttcctagctgaagtgatgcaccgcattagttaagagtttattttgcatatcaagctagtggttccttattttctacttgactgaaacttttgtataatacagggtttagtatgataattgataatgaagtgagatattgagatgtaacatctttgttccccactagttttatgttgtaatttcaggaaatattttaaaaaaataatcaaaatttgacatcagaagtttagacgagtatgcagagaattactgccaagattggatgaccatcactggcttaactattaaggaattagtttatttattactatcataataatgcaatcagttatctttttaataacagaatccaaactatcagttctgatgttttcactgttgatctaaaggtgctatacaaatgtttcaagaatcaagattatataggttacaaaaaaattgccatgtatgttgacatgctgaagtttcatcttgtccttgtgatgaatgcaatgatacttgttgctcattgattaaaactaacgtattagcatattctacttccaacttctgaaatagcatatcagtaacttgttatcgctttcctcaattggcaatgttttaatacctaatattgctttcaataactttctctctttactcttatatcagatcacacaagctaactaagttcactttgtttttgtcaactccatgaatagtagaaattgtctttgtcgacacagtttgtcactgatctgacatgtgattttaactggtaatacaggcctaaacgcagggggagaaaagctgcacaatagtctactgatcatactctctaggttcctcacctggctgaaggtacccttttaattcagcacaccccttttcatttctttagtttattattaccattttgagtttagttttgtatgggtcctgcatctagactacgctaggagttcccatatcattttgtttatgtgacactgcctacatcaatcttcttacttttacatgttatcaatcggatagttgtatttttgttgatttaattttgagtagataatttggaatgcgatacatgctatgatctatgatttggtattttgctactttttacggaatttgtagcctgctagatgttcttacaaagatatgagaatccatgtgaggacatgccctcatggatactcaactaattaacatgagtttagttgcggttattaatatgatcattttttaaccagtcataacaattgataaatgtaccatgagcttgttattgtgttgaagtggtatcactattttgttaggacttgaaactgtgaaataatatttctgttcttttttggcaggtgggtggactatgctagttgagataaggcaacctctgttgaggccagaagggccattttttgctacagaaaatttgcgcaattacagaagaaccaagaattgttggatcattcacagaaattgaatcagaagcttgaacaagttttgtccagatggcaaagccggcaacttttgtaacacctttgcagtttcctagatgatactgacggaaaatgtttcagtatgatcgcgttatactgaaatgttgcactatagcaagagtttgctatagtcagtcaacccccgttaccgtggtgtggttaaagttaaactgttgtgtgtaacatgtgactgtcgataatgactatccatccattcagttcagtgctttagatgcctttgatttttccccccttcagggctttactgggttatctgtgttagctcacttgcagcacgggtgactttcacaaacaagtgacaatggcaattccttgccttgtcacaattggagaaattgacatgattttccagatggtccggatattattatgctccaattattcttgattggtttagtgatttgccctttccagattgcggactaggggttaggattacatgagtactcataggaaaaagtaaggggcaaaacctacgtgaagtctagcgtcagcttggtatagtttggttctgataatttgttgttggtcactatggtctctacagatagtattctactgtagaaaagtaccattggtttatgtatttgattagtagaaaattccactgccatatttgaggtagtagtagtatggatagatatagcctattggacgaggaaagatagaaagtctagacttaataaattttggtccaaaactttcttctgtattaggtaaggcatcttccatcattttggttttgtgtttttttttatgaagcacacaaactatgtttgttttaactctctaggattccatgaacatgtggtccaaagattctatcatacttttgtcaagtcaaaaaaagttgctagttttgtagcggcctgcaccacacctccacagtgtggccaaagaagaaaaatctatggacaaactcctattatcttcacccataggatgtactaaatcaccccctaagaatgcctttagagtctagggggtcactagtaaacacctacatactggtggatcgaaatgggcatcacttctagtttggaaccagtggtgagaaagaaatagtgatgttttacggtaataaaattgaaggaaaaaaaatagcacctaggccagctccagttcatactctgagttaccttctagttccttgcacgacaccttgtgcgcacggtggccccttgaggtgcttgcgggtcccgtcttcattggaccctatttgtcgttgtcaaccccatatcttacaagaactgactagatctagtagcctcaagtttggagcaaccaaatctgacactacaatgcctctcgctttgccactcatccttgtcacccaagaccatggttgttttgttgcttgttcctaggccaatcgccatcatcaccatcacctgcgctcagagcacccagatctggcaattagatctagcagccgtaatattgcaacaatcaaatcaatcaacccggagctctggctagatagatttgattgttcaagggcaagtgtgggtggagagaaagagagggggcggagggtaggggagggagatcaagggcgagtgtggatggagagaaagagagggggcggcgggcagggaagagaggggatgtgaatcagtaagggttgagggagactaggtatttaacgatagtgtaggaaagtggctcaatttggccttactcggctgttactatcacttcttgtttctatcttgaacatgtggtgataaattttgttattagtggatcaaaatgaattaatacttatagaaggttaggctatgtgtttgctcacaagtgggtcatagatcaatctattgttatgccaaccataacattctaaggtatggtgacaaaagtgctagcagactgagcttttaagaaccaaagtagacggacacacatccttttgttatactacgagcacctttaatttgtaggaaaatataggaattttggaggattataatcctattggaaaatttccaattcctctctcatccaattatatctctttcatccaatttctacgtttttccagcggtctaatcaaacagtcattcttatattttttctacgttttacaatcctctgtttgtttgcacttgtattcctattagaattctgtgttttttctattctttcgttttttccattcctatgattcaaaaatgcccgacatatgcataaggtgtcattgatagatggatcccacttgctctaggaccatatgtcagtaacacatactgcatatgcagtacaagcaaaggatctcatttaaggccttgtttagttcgcgaaaagaaaatttttgtgtcacatcggacgtttgaccggatgtcggaaggagttttcggacacgaatgaaaaaactaatttcataactcgcctggaaaccacgagatgaatttattaagcctaattaatccatcattagtacatgtgggttactgtagcacttatggctaatcatggactaattaggctcaaaagattcgtctcacgatttccatgcaaactgtgcaagtaaatttttttgtttatctatatttaatacttcatgcatgcgtccaaagattcgatataacgtttttgagaaaaaaaatttggaaactaaacaaggcctaaattagatctggtagtagcagaccctagtgcaaaagtgcacccaataacatgtatcagtagtactcacggttatgtgctaaaaggtagaatttcactgattgtgtattttgccacatgttacaaatttccgttttttcttgttatttttcttgcaaatgcaggtgcatactgtcaatattgtaatttattaaagaatttttcataacttctaatgtggggtttctgggcatgggaccaccgatagtaatgtttacctagtacgtactcccttcgtcccaaaatataaaggattttgaatggatgaatatttcctagtattacgaatctggataggctaggaaatatccaatccgtccaaaatcccttatattttgggacggagggagtatattatgggccatataattgacaataaggatacattacttttgagctaggcaggtgaagagggagatgagaccaagaagagagagaatattattttaaacaacatgtgttgtaggcctacggatttgtgcatggaattaacgaatatgcaatactacacaaatggcttttgttaaaaccacctcatcacaaggtctggatcatcctgcctattgagtgttgaactggtaattatagtttttttaataaaaaagttagataatttttcatataaagtcagataaaaataaactttatatccataagtattgttgtagaacttaagaatatttacaatctatagttgacaacctttatatttaagatcattcatatgtctgtatacgtgttagaaggtctagagactattttgttgaggccaaaatttgactttactacacggctttgtatggtgattggagacaaactttatatcatggtttttaaggtggtaaggtgaccccggactaccttacaggtaaggcttaaggcgagatgacgtcttaggcacatcaaagctgcattttaagagcagtacgacacacatatataccttgttcttggcaactcttaagcccatgtagcatccaatacctacatggcagcatccacccccttagaagcatcaccattttttgtgttatgaagataataatagatgcataattgtaaacaatagttaataaattgcttccatttacttgagtagcataccttgttgatgacctgaaagcagcaaggcacattattgatgagcaagatgataatataaagccataaattcaaagacaacaaagtaagcatttgagcacgagtaaattgcatattggaccactatattttacaactctatcagcttggactattggtagatctacatttccctattggactgggtaaatttacaaaggtttcagtttggggctgttcttgtacctgtagctccctctctcctctctttgtgtactctctctctctctcgcctctctctctctctctcttcctttgtgggcaagaaaagaaccactgggtgggctcaagactgtagcatggagctgccggccgagctcaacttaagtgcaatgccggagctgttggggctaaggccgagagctgagctggctgctgactgggctcaaggctgagcatgacactgagccaccaatgactctcgaggccgagcatggtgtaagccctgacagggctcgaggtcatggtcaagtgcgtagtctgcttcgagcggatgccaacagtggacgtgctactagtggagaggggtggaggggctaccataggttgttgcttcgctaaagcatggctactacagggaaatcatcatcatcatgggtggtgttatccaatttgccacaacaacttgcgtgatggctctcaccgtggtcagcggcgctcggcctcttgcctccacttgccaacgcatggcatgaagtacgtctctgacatgtcacagtccacacaacaaacaaaccaaattatacaatcggtatgcactgacggactaaccatccatttattcgcctcggccacattgatctccacattgttgggtaaaggaccggcttgctggtcatcttcgtgatggagagggtcagaccatttactagcggtcaccaggttcatcaccttcttgatggggtggtgtagttcggtgatggctctgagatatggagaagagggaggagcgctagaggttgaagaactagcccaagctgaagcaactggtaaagataaagtggtctaaagtgaaaaagtttgtttgtccttagtccaatttgcaacaatggtaaaaaagagcggctcaaggtgcaatttactctaaacataataaactatcaagcaggctaacctagcaggcaagtaaacataataacaaagcaaaatagtgggagctatcatatacctaatggcgtataaagataatagtggtccataactccacactccacactccacactctaaacaaatatactataagtccaactccttgtctcttagtattcatcatcaaactcatcgaaattgccattggcatccaaattctcttagccatcttcaatacctgcgtgagcttcatcacaattgctcacatttgcatcattaggtggatcttcctccttatcttcttcttggtcagattgcatatcttcctcatcttcttcaaacattgttgtattccttgggtgcctttgaaaggttattggaacaacaaggttgtgaactctccttagaacatgcgattgttgtcggtagataagtgcaaactttcaccgtcaactcctgcataaaagaatacaaaatataatatcaaacttagtggtaggggtttattactaaccatttccactagtctttgtaaatattggtatgcaggtgatttttgaaagaaaatgcactcgccatgagactaaatgtacctccgaccaaccatacgcaagcacaaggatcggagagcccacatgtcagtcaaaactaactgaatttgagctaatccaccgtcaactgccaaaggggtccactgtcatacaccggagaatgtcggtggccaatggcggtgtgcctggttcggctgatccaaggttggcgcccccagccacctccttgcacgtggcgaccccctattggttggtgatggcggt

SEQ ID NO: 9324 - DNA, 18264 bp, Oryza sativa
gtcgccgcaccacgaggtttggtcgctgcacctcgttgccggatcagcttccgtgccgtcgtcgccgttaccactgcaggcaccctttcaccgcctctgagaagactagagaggagaggagagggagacggccgtgtatgggaggagaggagagggaggcgactgggagaggagaccgccactcttggccgccgcccgcacccctccccaccacgggtccaccgaccacgccgctccccgccgccagatccacctctccaccacgaccgcccctctccttcaccacccaccgcggcttgcgactccccgggccgccagatccaccgcccgtggcctgagtcgccgcagctcgcgttgtcggcgcaccacgagcttcgtcgctgctccccatcgttggatccgcctccgcaccacgagcttcgcctatgctcctccccatcgccggatccacctccacgcgccgtcgttgttaccactgcaggctcccttcacctctgagaataccggagaggagagggagacggccgtgtatgggagaagaggagagggaggcgactgggagaggagagggatgcggtgggtggtgggttgtgggctgtgggggtttttaataacgcggttgatttttttttgcaagcgctgctctctatgagtatgtactttttgctgtcggaggtccttagtaaccgccagcgaaaatcacttaagaggtccgcttataaaaagtcccctatttttacaagcggtactcttaacccagccgccagcgaagatccattttcgctgacggtccttaacgcctcatccctcgttaaaatttcgctaacggtttccacttatggccgctagagaaaacaaaaagtcaacgccatgaaaaatcgattttgtagtagtgtatgcaaatttcatgtttgtatccgtgatttgtatccattcgtaggggaccgaacctgagagcgagaatctcgtctaggcttgtatccactaacgagaccaaatcagagggtatggtaggataacatgaaaaaaaacgtgcatagaagccactcctagacccatactcatctggccgaaccatagaaaaaagtgtgaaattatgttaaaagccatcaaataaaacgaactttcttgtctcatatgcattggttgagacgaaggacataacaaaagacgaaaaattcctttggcttgtactcatggtggtcaagcctaagaatatggcaagaagatgacttcctggttcgtactcattagccgaaccgaacaacatagcaaaagaatacatcaacgtgagcagaagaacgagaaccgagagattctttgactcgcacacaatgaacgagcctaataacgaaggaggagcatgattcccaccttaaacacctctgatcttccagcacagtggagcgaggaagcagaggctgacgagatggcataggagcaaagcggaacggcagcagtattgcctagcaacaagcagcgcttctgcaaagcctacgaacagcacctagcctctacgctaatctcccctggaacttcctttgccgctagggggttaaccagcttttcgtggtttagaacagagtcccgcgcgcatccgtgggcagatcgtgggaaatggactcaacagcatacacctttctttggcttacatgtgggtcccttcattttgactggatgaatgtggcaacgtgcgtgcaggtagtggggtgaacatgagcagaccggtcatgcccctggtcgttacatgctttcccatttattgttatcattctaatctttattactccagttagccttttaattgcctggttattgagtgagagagagcgcgtgtatcctctcactgacatctggccctctcttatttggcgcgtgcgtgtttatatatccgcatcattatagcggtctgcacgtgacatgcatttttatttcacgtcgcaaaaattaggagtataattttctcatttgttgtatgaacatatattttggttttctttttaatttattggatgaccgtagtctaaaactattttatatggtgcgtacacctttcctgaaaatatttaggacatgactattttgggtgagtgggaaaaatcctattccacggccatatgttttaggccaggtgtgtacttagcgaataatcgtagtctcaatatatttatacgatctcttttattatagcacgaatttcatatgtgcacacgaccagaaagctaagtatcagcgttcgtcggtccgatgaaaagcacgtaaaaaatatttgttcacgttttttaattttttgaacgtgtttccaagatgctaatttatttttatatggcacgcgcatacgcatttctatttgcgccggaaatcatttcactctgaccgagcggattttatttttatattgcggccatatatttttggtcgccattttattttatttattcatttgactgttttgactgtttattcctatttttgtttatttatttttttacattatgtttgagattatatattagtttataatttaatacatcttatttaagatacgagccaaaatcagtgtcaacaaatgcccccttgccaaaattttggttttgcatccggagctcgaaacataattttggattcgtagggacatgatgcatgtgaagtttatcctcacaactatcgatgtgcccgttgtttgaaagattgttgagaaaattaaggagcatctctccgattatttggccacgttccctatggctaggggcagtgaggcacttgttcgttgaactcatctactactccagtcttctccctctttctcctcttctgtgcaaggatttgaggagagacttcatcaatgacagcatcaaaggtaagaccttgatttgatcttgcatactgaactggcgatctttttttttgtttcctttttactattattgttggctttcattcctccattaattaattccatttgggtttcttccctatgcacacatgcccgaaacctaccaagtcttaatttcagcgggtgattggtgatttaggtgtggcaagaggaaggtacagagagattttcttcaccctctttcagtcattcattttttttacaggttgatagatacatataactttctttaaccacatttgtatagaatgagttgctcgtataatcggggttcccggaaattttgtgatatgttacgcagccaatccgggttgttaattagatttgcatgtcaaacttgtctaacaataccttttcttcctcattgtatatttaggctgcacctatatacatattccgatatatttttttcatttgtagatgacagatgctggctcttctcgagcaacacataacttgccgctttttagaatggcgcaacttcagccctatgaacctgaaacaagtgacttggggaaccctactattgtggataaagaattgatcggtggtgaattttcgcgtaacactcgtggcaggacttctggtcacgctttcaagggccgctgttttcaccctctcacccctttgccttgagatgataaggcttccaccttagggaataggatagtatctgagggattgggttgggaaaaccataaggtggaatttgttctagctccttcaggatatgcggaatggggtaaagcagtcctgcgtcatcattcccttcatttgcgtggtagcgaagagggggtagattacatttatgggtctatctattgctcccttggtttgtactgtacatcaccattcaccaagtatgctgagatctctgctggaaaaatgggatccacacaccaacagcttcctttttcctcatggcgagaggaccatcacattactcgatatatacaaactctcaggactgccccttgacggtgatctttttgaagagtacgttccacctcacagtgagttagagccatctctcttgatgtacccaaagagcttaatgctacatatggacattaggaagagtcttgaagttggtggagaagtttcgcttcaggattggtgtgatcattttcacaaccgcatggaggggttgccagattcctcgggcattgagtcctcacgcatttacatagccgcctttatagctttgtggctttgttgcttcgttgttgttgggttgggtccagtccttcgtcatgggggtattggtcatggcttcctggatggccctagggtggagaaattcgttggctccgcccgccctatgttctttgtactattctttgatattggctagtacaaatcttatcatcccctcccatgctgcaagtagaccatggcctatacactttttggttggatgggcatttatttgaagaagttgtatggcaacaaaaaacaacacccatatttcccttcctacagacacccttctgctgagaagccactcatggagcataccatgtttaggatcccctaattttatacactgttgacggacgttatagaccaatctcgaccgtcaatataactataataaaggagaactagctatgcttacaatgcatatttgttttagaataacatatctccacttgtacttatagtattatttgttacaggaatttagcaaataaaataaagagaaagtgaagaaacctcactcctaagcaagcttatggataaggagggtccacaaatcaggtgtaaccatcctggaaaccgcattaactgccacaaccaccaataggacccacctgtcacccaccctgccgaagctggagacctgctgggctagcccaggttcagccaaaccctggctacgtcggctcaggtcagccctccacgtggacgctccaaattgattcccaatgacggttccgggggaaaatggacaattcgcatagctacaaccatcataactgccctataacaggaggagttcattcactatctcaacacactcaagcaagctcaagatttctcttcatactttagtttagtatttttagtgctaagtggagtagaatagaatagttctcggagtcctcggagtcttcggaagagttccggtatggctctagcagcttttctactttcatctataagactttcgaaattaatgaaatattcttctttatatactttcagtactttgcttagtctgagtattgctcttgctttatgtttgcgtcggtataattgtgtgggtagcctaccagagaggtgcaatggcatgggtttagtgtccgatttatcggttgctctatatcatgtccagaggtgtagagtagtatttattaatgtaagcatggtgcttagattactaattatcactatctgggcatatatgctgcaggacagtagaggtggaccactgatgatgacagctcaatacaggtattcctccacgttagtatatattcctaagactaattcctagggagggtactctcatgtatttagccccggttggacggccatgacaggttgtcgtaaggaactcggtaacccaggatggtctctcgaaacaccaggagggcactgttagggggtattagccacatgattgtatacttctgggtgaaatgctacaatggtatatccgtgcgcttgcggattacttctttgaccatacatatataccaggattattcatgcgccattgctgggaatgaatatttgtagtaatgtcgttaagaaataccaactagcatttctagcgctgtttctagggaagattagtaaagagattactataagctaataatcttttatatataattacctctgcataaatcattgtccgttgcaggctaacctttgtgtcatgaaaacagggtatgaaaacaggatagtgcatgactggtaaacctgccagaaaacttcaacgaaaatccagaagctttcttccagagcgtcagaccgagtgtcgtccctccgcagaagaaactttcagctaagaaaccagtcatcccagcgtcaccatgtttcaggaatatggctgagaagacacttcgtgagttcgctgctccgtccgctgacaatgtgcccgtcgggccacaggttaacctcggagacactgacttcgatctcaagagcagcctgattactatggcgcatgcaagcctattttgtggcaggccaaatgaggacgcaagtgctcacttgcagcagttcctagagatctgcagcacctacaccatgaagggtgtcagcccggacaccattaggctgcgtctgttcactttctcactcctgggaaaagtgaagcagtggttttacacgaatcgggttgcagttaacacatgggacaagtgctccactgcgttcctctcaaaattcttcctgatgggcaagacaaatgccctccgcaggagaatatcaagcttccaggagttttacaacgtctgcaggaatatgtagctgcctgtcctcaccatgggatggacaactggctcattctacagagttttacaacggacttactgtttcgtcccggaatcacttggacgttactgctgggggtgccttcttatcaaagacggtcaaaggggccgttgatctcatcgagaagatagtgtcgaacatgagctgcagtgaagaacatctccagacccatcagcatggcatgcatactgtcaaggagacaaaaatgctggccgcaaagctggacctcctgatgaagaagctagatgatcaggagaagaacaacccgtaggccgctgtcaaggcactagactcgcacatcacttgtgaggtctgcaggaacactggacactcggggaacgactgccccgacattcgtgaagaagccatgttcatggggaacaatggctatcatcccaaagaagaccaggggtggaaccagccctgcccgttctaccaaggaggcaacaacaacaacaataacggtaacttcaacaaccagccctccttaaaggtctatgtgggctccaccagaagactcatcgaggtagataagtcaaagtgtcacgtcaacgaaaccactctccaaacacagttgagagagtcaagttacaccggttttaataatttgggtttcaaagatatccggtattatggttcaaacgacatcaattgaggattggagctatatttgagggacacgaattggacttatttcctttttgttttccgtaagtggaccgagccttagaggctctgtagtaggccaggccgcgctaggagttctggcccaggcagaggagagagggtccagcgctagggttggcccccgctctcttcgccctttgcgccgcttctcctcttctcttctcttctcttctcttgggaacctccacttgtgctcgcctcctagtcctcctcctcctcctccccctcccggtaaggcggacgaccgagctgaggctgagctagggctagggcacccacctcctccccttccggtatggcctctcccctctcctcatgatttcttttgcgagttcgtccctgcgatcgatttgttaggcgagcgctagggatgcgcagatctgttacctgggtgggttggatggatggatggaacctgtcgattcgattcttctgtttgtttgtttggaacgtgtagatctgcccccaaatgggtgctttggagaatcacgcggatctaccatccgccatgggatgggatgggatgggatgccattttgactagtttgtttgatgcctgtgaaccgcctagatctgcccgctctgtttggtttccttggtacttgttgttagaacaatggaacccctagtggatgagggacggactagtgctgtggatttgggcatatggtccagtacgtgaacacgcatcgtgtaccacatggatcatacccatttttttccctttttcttgtcacgtaccaagtaatctttttcgctagatagattaggcacggctgagatatcactacatcatcatgaaaaattgagatgatttattcctgtggctacttatgttcaatgtgccttacagttggcacctaacaattgagatgatttcgcatggtatgtgcttatttatcgacaatagtgcaatgctccatttatactaatctaaactttttgcgatgcaagtttcatcttgtttctttgatatcatgttttaggtcactggcgtatctggtacacttctttttgtatattttcttgtaaacacactgattagaatactgcaatttgtgagttatggcctagatgaggtgttagataaaagttttgcaccatatgtctttcactatcttcatcctacttttagcaaattagtttacatgatatcgatatgtcaggtatgtcactataggcacatcaatataggatgttgccgtcatggtttacgtgcatgcattaggtcttctgcaaatgcagtaacagcactatcctctaattaggttattgatataatggtcttgtgttaaccacatagatggataaattggcctagttgctattacgcggtcttccacggtttgcatataagaagggggctaggggttgtagctagacaatcaaatctatgctttgtctatgcaataacaaggttccctttttcgacctgtgtaacttgtttaggtagagcattgtggtgagatagcatacatacttctttcaaggagcaagtatgtagtaagttaaggtctgcagtaaggtcaatttaaacagtttttttcagagattgtaatgcatggcaccaaatgtatgcttatttcttttcatgagttaataaaaaaataccattcagttgttttaattttgacattgggggttgattttctgacatatactccctccgttccagaaaaaaccaacttctggggacaaatctagacaaatgcatgtccagatttatctccataagttgattctttttgggacggagggtgtaaatttgcggtgaatcctcctggttattactcaaattcactccacttggatggttagatactgtaaatgaaatatgcacagttgcttctactaattatgatgccataacctcttttattgtacatctcagttttcaatatttgatgcagtatcctggatggctgctggtcggggcattaaccagctcctacggagaacactccataatcagtcctcagtaagaattttaatgaactatttattttgtattacttctgtcaaaaaccgatcgcttaccaatctttttaatatttattttctgtctgatgcctgtatgaaatgttatggtataccaatcttgaattgattattgaaatggcatgtagaaaggtattaccggacatcactataacgtgaaatgtatcagatggggttttggaaagaaatcacagttcacattcttactagttactactgcacagtttttaggggtttctgtttggcaggattgatctttattctactttttacagttaaacctgcattatgcatacaatgcttatttttgctgttctggttgagtaattagaccatgatatcaactacttatcctaattttgacaaagtttataatctgacagtaaccatttgttcaccataagtttcagtacccatgatcatctcctttttagtgtggtgacctgcttttttttaaaacattataatcatgttttcagggctcatctctgctatcctcgttccggataaagcatgaagaatcctccgctggactgagagcattggctcttcttggagttggtgcttctggtcttttaagctttgctacaatagcttctgcagatgaagctgagcatggtttggcagcagctgaatatccctggccacatgctggcattcttagctcttatgaccatgcatcgtgagtcatcctttttcaacttccttacaaaatagagtttagctcattgcaatatttcagagtctttgcatacggtatttggttattattaattgatccatgctcttggttaccccaatccttcaaacctacttcaccaatttagtttcccagtaggatagcgaaaagaatcacaatattcttttgctcccaagaaaatccttttaaccactactaccctattcttgctgtttactcattgtcttatatttgaacacttctatgatcagtattcggcgtggacatcaagtttatacacaagtgtgtgcctcttgccattccatgtcattaatttcgtaccgagatttggttggtgtggcctacactgaagaagaaacaaaggctatggctgctgagattgaggtggttgatggtcctaatgatgagggtgaaatgttcacacgtcctggtaagttaagtgaccggttcccacaaccatatccaaatgagcaagcagcccgttttgcaaatggtggggcatacccaccagatctcagtcttatcacgaaggtaatgatattttatgccattggcgttgcattgtttaatcttccaccttcaagttgtaatttactgtttgactccgtatgttcaggcaaggcacaatggccagaactatgtgtttgctcttcttactggttaccgtgatccacctgccggtgttcaggtaaatctcattctctgtcagttataccttaggcatttgcagttgctacttgctatgtgtatcgcccttaattcctttacaaacaataaagatgctcttgcatgtggattgaatcacttgtgtcacagggatacatattttacagacacatgatattgacatcaaatttgacactgttgtaactctgtaattgcaatactggttgaacttggaggtgctcagcttcaagttgtgttgtcccattgttgtttgagtgttttctctgttaatttacaattattcagcctctcatttgttgtcagttattgtttggaattcactacataatcactatttttgttcataattatgatgttgaactctattttgaaaaaaacctaacctgtcccacgaagtgttatttttctagctgtaatttttcaagctggttgtgttctgttatttgctttctgcagtgtgcaacattagtaaactctctggttgatttgtattctagatccgtgagggtttgcattacaatccctacttccctggtggtgccatagctatgcccaagatgcttatagatggagctgttgaatatgaagatggtactcctgccactgaagcccaggtaagtttctaatgcgttgttgggctcttacagttgtgacatgttgggttagcattaagggcctaagcatgattgttgtcatcctctaccacagatgggcaaggatgtcgtttcgttcttgtcatgggcagctgaacctgagatggaagagaggaaactggtaatcagctcaacttttgtccatttatatattactttcaattcgcaatatttcctaataccaacctactctaatttgatgtagatgggagtgaaatggatcttcctactgtcacttgcacttctccaagccgcatactaccgtcgcatgaggtggtccgtcctgaagtcacgcaagctggtccttgatgttgtcaactgagggaccactgtttcttactttcattaaaatgttttgagcatttaagcggaagcatttcaaataatgagtatgatgtacattctgccactggggtttcccatgcctagaattttctgttttcttcctctgctgcaaaagcattttcttcatgggagcacttgcaatttttgtcaatgttacctgaatggtaccagcaagcttctaacagaactgctaaagttcataaatctttatgttttgaactgtgcacaattcatttgtttcgagcacgctgatgatttgggtttgcgtttttatgtgacggatgcctgttgaactgtcctgttttgtgtttttgtcaagttctgtgtcgaatctatgcgttcattcgcgctcaagctacatcggtattgtcatgcgcatatcatatgtcaagcggtaccaatttggtattttttttccggtagcttcatgtactatgctgtcagaattttgcgaacggtctaatgtaacagaagatacatctaaacgaaatttaacatttgtcacaactcacttttgcaatggctaggagtagagtttacatcgacctgaactcgtaggctctgtttggcaaatgggatgaggagtgtgggaaatggatgttatttccatttttcatatttctactgtttgggtgtggatgggagtgggatatagaatcctgcttgatttgagggtggattgactactaggaaaaattattgaattaccctcaccatttgaacttatagctaatagctgtgctgtttgtttactcatttagcatagtttgaaggggtattttagtcattcttctagaaacttccttttccaatccatccaaccaaatatgggataaaattttccttcgtataaactaccaccacatcctaccaggatattatatccatttcccaatgggtataacccattagccaaacggagccgtactcctaatgagtcactaggcatttagctcgtaagcttatatgccagctcgtgaattgtccgtttagctcaaacagttgtccgtttagctcaaacgagtcgaaccttaacgagccgatgacttgtagtttgtgcttgctttactttggaccatccaaaaacaacaatttgttttgcataaaagaaagcttaataatatcaatttatttttccaaaaaaagttaacatgaatcaatgatgtctcatctaaagttttttttttgtttgagttggagttcgtttaatttgttcttcgtgttggatttatttactagagcttgtagaaatttttttcatggatttatcttgagtttatggagatgttttttttgtcgaatttcttttaattccagtagttcactacatccacaaaatccataaacctaattcaaatacaagggtgtatcaggagtacaggttgctaactcattcatctcgcttagaagacgaggttgtttattagtgcataatccattaagtttttagctaaaatgacttgaaaaatagatcttatatatatatatatatatatatatatattaaaaaacatactatttaaaagttcagaaaacgtacacgtgaaaataagggagaagttgagaaatacgagtgccaaacacaaccctcataaatattaggcatacacatgcatttcaattaggaatccagtgagcttagcgattaactccctccagttatgagtatctgtgttcaactttaatcgtccgtcgtatttaaattttttttaaaaaattaaaaatttaagtcacgcataaaatactattcatgttttatcatctaataacaataaaaatactaatcataaaattttttaaataagacagataattaaagctgaacacagaaatttataaattgggccagaggaagtaccattttactgtaggtctttgtcgaatataatggtgcgtgtgtagtggagtggtgtttccatgtaatccggggaaaaaattccctaaaccctgtcaggccaaatctttccaacccattctattcatctggctgaacccactcttctctgtcttcctccactcatcttatgtatacttcgaggatgagcagagcacctaaaataaataaagaaatatttgccgctactaaactaaactagtatcgccaaaaatactgaaatacaaagtcacaatattaaagaaatatatggtgaggaaaaaaacactttatgcgtgaaacaaatcaaggccatatcttgccatatctggccttatccaatatgtggtttgagtatcagctcttgataaatagtctcaaatgaacatgcaaaggagctcaccgttcagcaagtaaatgtagctaggcaactcaaactaaatcaaagccattctaggtacatcaagatcttaaacacaaagggaagatgaatggcatgcgtcgtttacaggatgcacatctgattttgaatacaaggatctaacacacaggcaaagcatgcttcacacaatttagacaaaccacatgcttctgctatgttgagcttttcctagcttagcaaacaacagggaaaaaggaacggtaacttcattgcttcatgtttgcggtgggggtgtgctgtcacagcctgctggcttctttcctacagctttggcttggctgccttttgcacctctatcatcctcatcagcctcatcgtcaatcagcgatccggagcgcatcagctccttcaccttgaggaattcatcatagtgagcacgacgatgttccttgaaactcagtcttgacttttcagcttctggatctacatgaacaccaacatataactaactctccgatgataccaggaaacatcccacaggaactatcatactccataagatttcaggttccctatggtgaataacagattattgccaattcgtaatgatggtatgtatcccttgcttatgtcgtcaaaagaaagtactccgtatacaacatgattttaagatgaattgacgaaatttaccaacgaggaagcaagaactaaacatttgtctaattatataaaacagatatattaagaagagctgtgtcatctgtcatcagatgcatctaggtcaaaattgaatttgctttggaagttaatagataaattggagctagcttaacatgtggaaataaatgaatattgataatcacttctgttcttttctgaccatcaaactcaaaaaatgtgttttaatcatcatcattttgagctggtacaaagtataaccttcaagatttattttgaactggttctcagaatctctattaaatgcctcctctccagatatgtacgttgctttagtagagcaatgctaagggtttggtcggtgtatgtgctttactattacaaaatgttaacatactataacttccagtaagatttgcgctacttatccaatgacaagacttttcagacatattcatgtaatttcctgataatcaattaattaatttttccatcaaaaacaagatgtcttcaaatgcatttaactgaaacagggaaaatataagagcaaattactacatgcagggtagatatatgaaaatgggaacagggtaagaggcacaaccatcatcttgttccatggcatctgcatcatcatctgaggatgcccaaccatcatcctttggatcagttttgcttgaagaagccacaccatttaaagcagttaaaatagcttcagcattaacagtctcatccagacacttgtcaaaaggacgcgttggtgacaatgaccctataaagaaagcaatggcaagacatattcaacaacgacacagtaactaatatggtcaagtaaaggtataatgagatcagaacaggaaaacatgtaccatcatcatctaccatagggtgatatggtgtcttaggctcagttatcttctgcctaacaggtttatttgattcaatctcatacaggttgtcttcattccacttcacacgacgagagctaaagaaaaacagtaaaatcaaattaagtaaactctaaactcacgcttgtgcagtagttttttttcaactagctcttaacagtccagcatttccacaccaaaaaagaaaaaaagatggtgtatgaatctaaaactccataaagttctttaatctaaaaatcaaacagtttttcgaaacaaaattcatgtacaaatcagcagctatggtgtatctgtctaagcacttagggccttattgtaagttattccaccatggtaccatcatcaaaaggagccgtgtcacctttttcttaacacaaaactttgacaagctctgtttgccctttcatcccttcagttttaacgtatcaggttctgaaatccaagcagcataaatcaacaaactactatttctgggcctaaaagattgagacatcatacttcaacaatcatacagctctaaattctcaactttttagtatttatagtaatatttgattttactaaacaatcatacaatcatacagctctaaattctcaacattgagtcccatctaaacaatatttgaccctgaagtaatccggaatggaaccactgatttcatcatcattgaaactgctgaatctttacaccacctcatattaataactgcctggctggaaccttaacttttgtaaggtaaaaaggaaaaaaaaaggaaaaacaactgtaaacaaagaggtgctgcttaaattgattctttgtcaagggcccagggttcgtggcctttcttgactagctttgtctgtggtttcttcttagcttgaaaagatgagggggcggtctttcccccgccggccgagttttgtttttttaatttacatatcatagcaactggaaaataacaaataatcctcagaatttaccaaacatacttcttggtaacgtgttatgggcgtgggcctaaggtatgcaaaccagcagaaatatgtccaaaggtaggaagcaagaattgacctcatgattaagcttcaacacctcccagtgatggaaaataaatgaagtttgagaaatcctcactcacgaaagctgccaaagtcatataatgttaaatggcttcatcatgttttcatgcaggaaaattgatgatgcatgatgccagaaagaaaaataataacatatagttggagatatgcaaatacggtaaaaacattagaacattaaggcccaaatgtaatgtgagattttttctggtttgtgtaggaattgaactgatatctgtgaaattcctgtgttttaaattaaaacagagcccaactgtcagtggcataagtgtaagataggaaagcacgtgcaaattcccagttccaacatatcgacacgacttaatatcatctcaagttgatgatcccgaatgactcataatactaacaaagttaatcaaacaattttctgcacatgacaaatgagataatgaactggtagaatgtaacttttttagagagtgcatcatgtgcatggaggtgaatggtcttgcagtgactgaagatcaataaagatatttgagcaggacaatctataaatgcataactaacccagcttggagagagcaccacaatattttgaacatagtatgctgtcgagacaagctattggcttaaagaaaaaataaacatagtgatacatttagcagcagcgatggattaactggtgaaaatggttactgctcctaccagctcagagtgatggttccatagtagtcagaaggggtaggatacccctgccctccacacgcacaacacacacacacatcaaaattagcatgtgttaagacagacacacacaaattgtgacatgctgatgttgccacaacgttacatacactatagaaataaatattggcatcatccaacacaaattactcttctggatgtgtgtagatttcataatactgagaagaaaaaccaacaccatatatatatatatatatatatatatatatatatatatatatatatatatatatatatatatatagaccattttctggttttcatttgtctgttatgataagagaaaggttttgcagcccacaaacaatttggcctgcatcaatggatgtgggggcacactgggtaccatccccaattcttgttacaagggaaccattagtaataactatcttaggttaactgacttttcatggggtcttaatcaacaacacagctccactgctgaatcgtgtcagccatgacctagtgatcactgattttccttggtagcgatggccactagacacacttgcatcaatacgcatatattatacccaccagctacaaggatggtgcgcaatagtttgtgcgtgctcaggaatggagaatgagcaacggcgcaatgacgagcaacgaattcatttattatatagaaccacaagtagtgcgggatggcagtgtaatcaaattttctagtcaggattacgatcgcccatcgactatctctacagagagaattattgtcaactgtgttcagctttatcgcaaggcgaaaaaccacaagcggatcataaatcctttggtactcgatcataaatcccccaccctagaacgatgaatccaggtgcaggcagacctaaacctaacacgcgggggcatatggggtttaatcctccgttttccgtttctaacaaaagaaaaagctacaggctagggagagaaacgagatcaaaccaatcgaatccaatccacgccgggatgggggatctccagtccacaccgcccccgctgatgaagtggcgcggaaggaggagggatgggggagaggggggctacgagctgcgagagagaggaataggtaccttccggttcgactcgagcgggctcgccggccgcgcgcacgacggaggcctccggcgac

SEQ ID NO: 9325 - DNA, 35543 bp, Oryza sativa
tatatatatatatatatatacatatatatatatatatacatacatatatatacatatatacatacatatatacatatatatatatatatacatatatacacatatatatacatatatatatatatatatacatacacacacacacacatatcatgatagtaagttacttggctagagaatttgttttgaatacatcattcgcattgaggtacgactaattgattgtattagtactttcaaaaactaaaattctatcttttcagttttatatgtaataacaagttgtgcattctacagttttatcatgagttcgtatgcaaaattgattaatcacttcgatttatcatcacacatggtatttagaaaatctcacttgacgatggccatccgatctaaagatacttcgactatagatttaatgtaatacctcatcaaaagtgctatttgctgcagagtttacgataacatccactatcaagatccgaccgccatcttcaaaaggaactccgaataatactaagtggatctgaataatatgaaatgcatcgatcgattaaaaccttgcttttttaaagtaatcaacatatacaaaattactagcacacgtaatcctgaaactaatacctagcacacgtttttagtacctttccacgggtaccttcactacgccagatcctcacacctctgacgggatacctgtgacgggcaaacgaattggtcagtagtgaccattacctttgacgggttatacgggatgccgtcaccggtgaggcatctggccgcggcccgtcacaggtatcccctcacctgtgacgggccgaaaggaaaacccgtcagaggtataccagtgacgagtttttcttccaacccgtcactggtatcccctcacctgtgacgggccgatacattagaagccgtcagaggtgatgggccgccacctgtgacggctttcatttctggcccgtcacaggtgagaggataccagtgacgggccgttgaatagaagcccgtcaaaggtatgagcaatacctttgatgggctttttttatctaacccgtttgaggtgtgttgggtctataaatacccccaaactgccaactgctttccatcccgaccattgtactgttcacaaatcggttgggagggcaaggggggcgattttttgctaaaattcaaggtaaaaaacacattattctccattcattctcaacatatcgatcatcatttatttttcttcgtatgttgttgatttcagatggatcgtagatggatgtactatgcgcatcgttcgtctaccgagtatagagagggggtcactgaatttgtcacatttgcggataatgacagaaaaagtaggatgagcatgcacatgttgtgcccatgtagggactgtaagaatgaacagatgatcgaagacaaggatgaagtgcatgctcatttgataatgaatggattcatgaagaaatatacctgctggaccaagcatggagagcaagaggcgcctgatgtcgcagctgaagaagtgttggatcaggatgtagagaacaccgccgcagctcgagaaggcatgttcgtaccttctcctttaggtggagagaccatagatttggacactcaatgtctatctacaatgttgcatgacattgaagacgcagaggacaacgacagagattatgagaagtttagtaagttggtggaagattgccagatgccgttgtatgatggatgcaagtcgaagcacagcaagttgtcatgcgtgttggaactcatgaagcttaaggctagtaatggctggtcggacaagagttttacataactccttgagctgttaaaggatctgttgccagaggggaacaatttacctcagacgacatatgaagcgaagcaagtattatgtccgttgggcctggaggtcagaagaattcatgcatgtccgaacgactgcattttgtattacaaggaatacgctgacttggatgtctgccctatctgtggggcatcaagatacaaacgagcaaagagtgaaggtgaaggaagtaagtcaaagaggggaggcccagcaaaggtggtgtggtatctcccaattgcggagcgcatgaagagaatgtttgcgaacaaggaacaagctaagcttgtgcgctggcatgccgaagaacggaaagtcgatactatgctgaggcacccagcagattcagtacagtggaggacaatcgataggatttaccaggaattctcaaatgacccaagaaacatgcgtttcgcaatgtgtacggacggcattaatccttttggtgatttgagcagtcgtcacagtacatggccagttctgcttgttaactataaccttcctccctggttgtgtttcaaaagaaagtacattatgcttgccatgctcattcaagaaccgagacaacctggcaacgatatcgatgtgttccttgaaccgataatcgatgacttcgaaaggctatggaatgagggcacacgaacatgggacgcatatgcacaagagtatttcaacctccatgcgatgctgttttgtaccatcaacgattatccggcccttggcaacctttctggccaaactgtgaaagggaaatgggcgtgttcggagtgtatggaggaaacaagaagcaaatggttgaagcattcacacaagacggtctacatgggtcacaggagatttctcccaaggtatcacccgtataggaatatgagaaagaatttcaatggacacagagatacagccggacccccgacagagctaacagggacagaggtgcacaacttagtgatgggaataaccaacgagtttggaaaaaagaggaaagttggaaagcgaaaagagaagagcacatcgaaggaaaaaacagaggagcatgtggaaaaacaaaagacaaaagagaggagcatgtggaaaaagaagtcaatattctggagactaccatactggaaggatcttgaagttcgccactgcatagatttgatgcatgtcgagaagaatgtatgcgagagtttaatgggattactacttaagccaggtactacaaaggatggtctcaacgcccgacgagatctggaagatatgggtgttcggtcggagctacatcccataaccacggaatccggcagggtttaccttcctccagcctgctacactctctcgaaagaagagaagattgatttgctaacatgtttgagtggtataaaggttccatctggttactcatcaagaatcagtaggctcgtttcactgcaagatcttaagttggttggaatgaagtcgcatgattgccacgttcttatcacacagctgttgcccgttgcaataaggaatattttgcctcctaaggtgcgacacacgatccagcggttgtgttccttcttccatgcaatcggccagaagatcattgatcccgagggactagatgaactacaggcagaacttgtgagaaccctatgtcatcttgagatgtactttcctccaactttctttgacataatggaacatcttccggtgcaccttgtgaggcaaacaaagtgctgtggtccagcattcatgacgcagatgtatccttgcgaaaggtacctggggatccttaagggttatgtacggaaccgttcacaccccgaggggagtatcatcgagagttacaccaccgaagaggccatcgaattttgtgtggactacatgtcagaaacatcttcaattggattaccacgatctcatcacgaagggaggcttgacggtgttggtactgttggaagaaagactattaggttggatcggaaggtctacgataaagctcatttcacggtactacagcatatgactgaggtggtgccgtacgttgacgaacaccttgcagttatccgacaagagaacccaggccgatcagagagttgggtcaggaataagcacatgtcttctttcaacgagtggctgaagaaccgaattgccaggttgcagaacttgtctagtgaaacacttcagtggttgtcacagggtcctgaatggagtgccacgacctggcaaggatatgacataaatggatacacctttcacacggtaaagcaagacagcaaatgcacagtgcagaacagtgggttacgcatcgaggctgctagtgacggtggtcgtcgtgatcaatactatggtaaagttgagcaaatattggagctagattacttgaagttaaagtcccgttgtttcgttgtcgatgggtcgatcttcgcaatgtaaaagttgacaatgaaggtttcaccactgtcaacttggctaacaacgcgtacaaggatgaaccgttcgttctcgccaaacaagttgttcaagtgttctacatagttgacccgtgtaacaagaaactacatgttgttcgtgaagggaaaaggagaattgttggattggacaacattgcagacgaggatgattacaaccagcacgtccacggcataggtcaagaaatacctctagaagaggaggaagaagaagatgaagttcaatatgcacgtgtcgaccacgaggaaggattatttttgtaatttatgtacgtagtttatgtctacatgtctgttatctgtatgactctaatatgttcgcaatgatcaatagtatattgcttatgaaatagtcaaataaaataattaagtgaagcacccactagaagtgaaataaaataattaagcaagtataagcattggaaataaaataattaaagtagtataataatgaagtgcaattactactgttagtgaaataaaataattaagtataaaaaaatatgtagtgtatgtgaaaatatgttaaggaaaataaaagaactaagtgaaataaaataaaataaaattgctctaggcaaactcacctgtgacgggctctatctgtagggccgtcacaggtgacctcacctgtgacggcccagagtgttgggcccgtcacaggtggtcttacctgtgacggctccacggttggcgcccgtcacaggtgacctcacctgtgacggccacatagttggcgcccgtcacaggtgagtttgactagggttgacctagggttggacatcttctagatcgatccagatctggcacccactctcactcactcactctctcgaccgccgcctcgcctctctctctctcgatccagaccctcctcgccgccgcctcgacctctccaccgccctcctcgccgccgccctctctgccgccatctccgccctctctgccgccatctccgcccttctccaccgccgcctcctcactcactctctcgaccgccgccgtcctctccaccgccatctccaccgtcgccgcctcaacctctcctccgccctctccgccgccatctccgctgccctctctgccgccatctccgccgccctctccaccgtcgtctccaccgtcgccgcctcaacctctcctcctccctctccgccgccatctccgctgccctctctgccgccatctccgccctctccgccgccgcctccaccgccgccctcgccgccggtcgtcctctccgccgtccgtccatcgacttccccgacctccccgaccctgacctccccgacgccgggatccccgaccaccgccgaccgcctcgacctcttcgccactgcctctccgccgccgccaccaggatccaggacgactacggcctgcgccgccgtctccaagtacaccgcttctccaagtatgccgccaccctcccccattcctccttttttccgatggatgaattgcattgtttagatgaatgaaatgtgatttgttgtttcgattattggtgctgctgtatagatgaattaaatgtgatttgttgtctgtggatgttttggatgaatgtaggggctaaattattgtgggctgttttattatctacacttgccccttgctgtctatgtttgcccatgctgttgcctatggttgcaactgttagttaaaacttgaatgtgtagctagtttgcaacttggatgtggatttaagtgccatttggacatatacctctacacttgttctttatggataagaacagagtatctacacttgttctttttttatgcataagaacagattttctgcacttgctcttttgatgttatgatttcctctttttatcccttcatgcaaatgaatataattgatgcatatttctgagcaaaactgaggccatatctttcatagtataccccgtattacatgattttggtgcagtgaatcttgaatgtggatttaagtgcaactgctgctgtctatgtttgcccttgctgtctatgtttgcccatgctgctgcctatggttgcaactgttagttaagtgcaacttgaatgtggatttaagtgccatttggacatataatcattcatggagtgtgtactgctatatatgttgctagacctattgaattttgtggacttgcatttatactcctcctgctgctgttttatgtcaatcatgcaaattctgtacccttgctgctgctgttttttaaatttgcatgattgattcagtggttatatacctctacacttgttttttttatgcataagaacagattttgtgcacttgctctttttttatgcataagaacagattttctgcacttgttcatttttttatctacaataatatatgcatgatttatataccactgctgttgttgcccctgtacttcttgttaaatggccaaggatgaattgcttaataacattctatctatacctgttcttttctttatggataagaacagattatctacacttgttgatttatatacccttgctgtctatgtgaatttccctctgctgttgttgtttatgtgaatttccaccctgctgttgctgtttatgtgaatctccaccctgctgttgctgtttatgtgaatctccccttgctgttgctgcccctgtggcatatatacccctactgctgttatatggccctgctactgctcttattgctgctattatatggccatgctgttgctactactctaatttcctgcacttgctcttttccttatggataagaacagatgaactacacttgttctattttattgataagaacagatgaactacacttgttctattttatttgggttgcttttttctcctagtagctgatttcctctttttatcccttcatgcaaatgattgtaattgatgcatatttctcagcaaaactgaggccatatctttcatagtataccccgtattacattggatctaatgctatttagtctaatggtaggaaatttataatctttttcgcgaaagttaaaccatgtcaacgcccggcgcaaacccgccctccccaacacctgcgaggatccaggaagaagcaaacccagccacagaggcagttgccgaaggtcatcccgcgacaacggcggtccaacaacccgaaattcatggtaatttataggataaattttcaccacatgaccacataaattttagctagcaccccttagcaaatattgccttctgtttgtgctgcagaattgccgcaggaacaacatacgtcgatgtcgggcgagacaagtgcaagtaggtctagtagaaatccgcggtcacaaaatatatggccgaccacagtgcaagttataagagaggttgacgctagtggtaggcccacggcgcccaggactgtcattggaagatggtctaactgctgcgggatagcggcacgtgagaacttcgggatcctccataaagatatcgggaaggtcacagaagccgagaaagagcgagcttggacggcaatggagaaatggttcacatttccagccgaagcaaaggataggctcaagcggaaggcattccaaaagatgggcaaagcttggaagaattggaagtcgaagctcttcaccgagtatgtcaacccgcccggcaatcatacgccgttcgatgaataccctcaaataaccgaagcggtgtgggaggaattctgctctctcaagaccacccaagagtttagggaatccagcgaggcacatcgcgtactgcaacagcggaatgagcacccgcatcggctgggcaccgcagggtacatcggcaaggaggcaatatgggcccaagaagatgcagccgctgcagcagcgaatgtacctgccccgttttcagacatccctgaacaaagagctcgcaactgggcgcgggcaaggggtaaggtcaacccggacggctctgtcacatttgagaacaaaagtgatgccgtcgtctatcaggaactggtgagttcactacttaacctaactaatttccgttcgtataaagtacaagttcgtataaacgactatcttcttttctagttgggcttggttgctgaacaagcttcacaaagcgaggttgagtccgcgccgaagaggcgcgaagatgacatcctcacaaaggcgctcggaaccaaagaacatcctggccgaactcggggaattggtagcgatgtgccctggaagcatggactccctcagtacagctcccaatacaggaaacggaaagtctccaaggaagagagggacgctcgtttgaaggccgaacttaaggttgaggtcattcaagaactagaagctagcatgaatgcaagggtggaagaaagggttaacaaggtgctcgccgacatgaatataccccgagtcacaacacctgctgtgcaaccaactcctcgtgtacaacacgacgcgagtccgtcacagcataggagtagttgtgcatccacagaggtgccggcccctggtctcccgatcgcaccactagctgcagtggaccacatcgaggtaattattgttatccgatccatatctaataaaagacatttacacattccaatattaaattcaaactttcaccttatgcagggcgcagcacagtgtgtcctactagcgagagtccacccaactttcgctcctgaagtcgctgagggcatggctttcaagccctcggttacagacaaggtccacggcgcagacctgctagctgggtatgccaaggtgtccatcgatacagtaaaggacacctggtcaggctatccgctgcccgtgcccccaaatgatgaaatcatgactttgggcgatgcgcgcaagacattcatacaatggcccaaagaagacatagttgtgaagatgactcctcgtccaagtcgaccgacggagcttacacctcccaagtctaagctatcaattgaggctccccgtggaccggcattgtcagtacctcattctcccggtggagctgatatggacttggcagatatagctcaaagcttggctccaataaagaccacaagaaaggccgatagctccccaccacttgtcaagggccagaagcgtgaacgaggcaaggggaaggtcggggagttggcgccggagccaaaaaggggcaaggctgcgacgtcgatgccggtgagcaaatcggggaaggtcgtgagggcgccagcccaatttgagctaggcatgccattggtggaggacaatgtgttagctgtgatgggtattgcttgccgagagctacataagcaatacatggagctaagcaatgccaagcggaaaatgagggagtcatccatagttggacatcacgaccaccagccgttcctatcgtcgcctgcctatataactataggctttgatgacctcttcgaccttttcaggatccggaagttggacactggtcttctaaaatgctactccttgtaagtgcataccttctatacttgtgatatgactggactatatctcctaattaaattagttctaatacgtaaatattttaaggttgtgttggatcgagagtcgtcgccatggtaatcaggttgggttccttgatccatccatggtgaatgaggttaatttacaacagagctccactgaggtggttgactatgtcaaccggtgtttatgggcccatcaagacaaggagtacatcatgtgcgcacacaaccaagagtaagaggacaatacccttcgtgtatattgtttttgaagttaaggttcttagtactaacgctacataaccactgcgcaggcgacattggattctcctagtcatcgtacctaagtggagtagggttacctaccttaactccaataagtccaaagattatgatttcagtgaaatcaccaaggccttaaatatggcttggggcccatatgtggaaaagggtggtaggcacaaggagggcaagaacgaactttatcatgacaccaagtttgcatgcgcacaacagatcggagaccaatgtggtttccacgtgtgccacaacatgtcaacacttctaagagaggtgaaagatttcgaccctgaggttgttgctaatggcgaataagctcatttcaatatctacattgctattcaaaacgtgctaattaacctcttatttattaaacagaaaggtagagctggcttcaagatctcacccatcaacccccccgctatcagaggcgaattatgtgcctttattcttgcagaaataatgaacaagaaaggacgttttcatgccaaatagactcatgaacttggctagataatttattgtgatgtaaaaaagatgtttttataatttctggcgatgtaaaaaattatgtttttatagagtgcaatgtaatttactttcatatgtgcaatatttatggtactttactaaattgtcatcacatttgatcaactacgatttatgttgtactattcatctgttttctcctttttttttcccttattgacaggttgtggaggttcacaacgaacagaatataagaaattttggtaatcatttgaggactttcatggggtatgaattgtgtgctataataaattaaattgttgcatatgtgatgttgtaaattgttgctttgtgatggatctgtgatatgtgatgcatctgtgatgttgggcagttggggaatatgtgatatggagggggggtgactggcacctgtgatgtttctgtttttcagagggcatggctagcaattcctgaggctagccaatatttagcatttattttttttctggaattaactcatcagtgacggttcggaagaaacatccgtcacaggtaacctcacctgtgacggactcgcaaacgtcggaccgtcacaggtgacccacctgtgacgggcttttactttcgggcccgtcacaggtgggtcaccctgtgacggctactatataccggagatcatcacctctgacgggcctttatttaggggctcgtcagagatgagacacctgtgacgggtcctaacaagccctagtctagcttagaccaacacctctgacggccttctattaacttgcccgtcagaggtggatgtcaccactgacggccggccacccgtcaaaggtgactggacttaccagtgaccactgatcactgaccaagcccaaaaccgtcaaaggtgagggtttgggcccgtcacaggtgaccttgaccagtgtagtgcttgtgttggaaaccgttagattacagccaatcaacagcagtttgtcatcagctttggtgttggaaaccataactcatgaaactggcagcttgtcatcctcattggtaaacctagataccatagtggctaccgcacacactcatagggacatgtaagcatttgcactattatgtttttctacctgatttcctcactcactcaaaccaaaaccatcttgttatcctgtatgataattaatcttcatcccatattttttctcaacacaatcagaggaacttgtagctcgaatcatattatcatttaacacaaataatggactttattatctcaaccttatcatgaactgatatcaattatcgaaaagtcattgttgataatgtgtgttgagtgcttgcaggtgcccgataaagcaatacattggaacagaaactaattagtttttatacaactctttgttagatatcatatgacaagacatatataggtgcattatttttcaatagaggatttgcagatagcttttgaagtatcactgtcatttctcttacaaacatcatgcaagaggcgaaatattacataatcagaagaaataatctcaattataccatactattggatcaaagaaaaatgttctaagaaaattctcacagtaatagatcctagatatatcttggtttgtaagtcgagatttgacatagaaagttttcataaagtaattttgatttattccccatgattggtgcaagcatatatatatgcttcaccattacaagtctaaaacataggctagtaataggaatcacacttcaaatcgtccatcgaagcagctgcaagagtcaccacaaccctggacactggacatcatgtgctagatcccggaaaatcagcatttgcgggtgtgacagcctgctcttcaaatagaaattgtgattgacatgctatttcaatatgtggctgtggcaatggcattctagtaccctttgcatcttgcagtacctggtagaactttgcaatggaagtgtaaggtagagctgagagtttgttgtgcagctcctccaattcatcctgccccaggagattaacttcagaagtcagtgattgcataagatgtcctgccctctccttctccattgcctcctgaaccctcttcttcttttccgacttttccaatgacttttggagctccacatattcaattttctgctgttgcgctatgtttgtcacctcaccgctatcatggtacccaccacccaaggaatggttattgggaatgcccatggccatggaggccaagcggtcagcaacatcatcaacagagggatgggcaaaggagaaacccctaccagcaggagaaatcacaacagcagctatatttgcattacatagcaatgaaagctcaccagctttattaaatagggtttggcgacgcttcgagaagcaaacgtcacgtgcatcctttttttcgatgcgcttgatctcaacctttttcctgccagcccttccctttcccttcaccatcacttattggataaggtgtggttctcctttggctatatttttcctaatgatggatataacatgctgtcgtggaacgtctgtttatatagagatttttgtaaggatataactagaagcacggatttacattgatgaaaagatatctagatttttgtatgtttggagggtatattaggtagcattcagtgcattaaaaaacagccaaaagaaatttatacactacttagagaattagtaactgtgcacatatggagagacttatctattgtgatgtatccaaatataaactcaatggaattaaaattggaatacgaaaaatgcataccatatattcgccaccatcaagataagaagtgataacaaaagggaaattgtaagggaaggaagaagacccatataagtgtgtcatctcgagtaaaatcttcaccatattgtttgtgtcactagatcaatataaaccattatttgtgttactaatgtaaatgacttatagattagttttatacattgtaataagattgaacactatagttcaatttactgaatatctattaaaagagaggttggtagaatagttggttggagataatgcacccatccttctagtgttcgactccagatgtgatgtcccatttttcttaattaattaacgattaggtcatctttggttctccaacatcttcaattgactaaataactactatatttagcaaagatacaaatggaaaatttatggacctcaataaaggaccctagcaagattgagacactttaattttgcaaagatacacgccacaagcatttttagtgttgtgttatatctatttatgttcattcttttatttcctttccaagcacttcgctgccaatacaaacctttgactgtgctagtgaactctctagttctcatatataaataaaaaatgaattcattcagtgatgatgtatgcaggggcagagaaagctcccggaccagtcgggaggctgcccgggctccgtcattgccgcctccactatcgaatgccgtcaacgtttgcagaagttgctagattgctatgaaacactattattcacccaggctcgacgatgcacctcctccgccactatctgtaaggataagtggaaggagaaagaatagataaattcatggaaagaaacaacttgtccattccagagccttctgccccataatagaaccactgttcaatttcttgacaatcacctataattttgttgtgtgacttgtccaatggttgtgtaccaatgtagaaatattatttctgttttgtttaagtgagatttctctaggatttttcattatgccgtgcagaacatcagccattaatgcatggttggtcatatgccatacacaacatcatcgattcttgttacttgctctctagtattgatccaacataaacctgatcaactgaaccatcctagtatttgcatatgaactcctagcctctagccacctagtcctatatgagtcatattcaataaatgttatgtaccatggaaggttacatatcataacaagttgaaccatcttcctttctgctactaaaactagcttaagtctattcttgcgtaaataaccatatatatcatgcctttgttgtttttactgaatatcatgcttttttgatgttggagttcattgttaaatcattaacttaggttatgcatgatcactgtcacaccctgaagttcttctcccaagcctaaattgaatttataaatggtctcaagaaaatatcggtgtaaaagcaaaagagaaaccctaaaggaattaatgtaaataataatcggaattggcatgtggaatttttcttgagttctacatgtcgaaatatgctaacatgatttttagtggaattttcagagctctagaaataatttttaaccaattaaaaatgagcacaagcaatatttaatccctagaaattcattttctcctttttctttttctttttccctccttttttcgaatgggccgccggcccattctcttcccctccccctccccgctgggccggccgaaggccacggcccagctgagccggccgcctccctcctccctttgggtcgccgacaggtggggcccacctatcgggcccgtctccctcctccagccgccgccgcgccccgcaaccgccgcccgcgcccgcgttccccgcgcccacttcccctctctcccgcccgcgcccgcgctcgagatggccgggattcgaattacgaatcccgcctctctctcctctcccactcccccacgtcggccggcgattcccgcctctcccggccacgtccggacccctcctcccctatttaagcaccaccgccatcccctctctctttttccccatttcgccgagctctcccgtggcctctatcgccctagcgccgtcgccctcctctccgccgtcgctgccgccgctccggtagccgctagccatcgctagccgccgcgccgagccgcgccgtcgccgccgtcgggttcgcaagcccgagggccacgccgtccacccttcctccgtcggaatccgccgccggaaccccgtccgcaccgcgcgtcggtgagcttcgccatggccgacgccttagccatccatggtttccctttccctctctaactcatcccttttgatcccttaggtggtcccagagctcgtctcgccgtcgccatcgccctccgtcgctcgccgtagtcgatcgtcatcggtgaggcccctcctcccctttctccctctccccccgtgccgcttagccgccgcgccgccgcctagcctcttagccgccgctatcgccgtccgcgtcgccgcgacgccgccgccctccgccgccggccagtcgccgccttgtgccgccgctgcgtcgagccgcgccgccgtgcgccatggccgccgggccggctagagccgcccatgcgcgccggccacgcgcttccgcggccgtccgatctaccggggccgtccgttcggccgcccgcgtggctgccgcgtggccgccgcgtcggcgccacgtcagctccacatggtgcgccgccccttttccggtccgtggacccggtccaccgcagaccgccccccccgagtcactgccatgtgaggctcgtatgtcggcgccgcccactctctctcccagggtttatttattgcgcaacaaatcaattaaggatttttctgtttatagtaaaaacacagtgaactttctaaaattcatagaaaattcatccgagctccgtttaagcccattcaagtctcagtaaatcaagaaaaatgcatagaatccattaaaaatggttttgttctctgtttcagtagtcttatagcctgtttgtattgtttactttgtatatcgcttagattccggctctcccaacgctccggtgtactttgaattagtcgccgaggttcctccagcagcagagcaaggcaagtcattcttgtcacttgaatatgttgatcctatattgcaaatgttctattgttttccttcaaatattgcattgtttcacaataataccatgggatgtttacctactgttatagccatgctatttttgtaccatgctcctttgttagcttgggatataacatgactagatattggtctagggattgcttagccatgcttagttcaactagcacacaatgggggaaatcatattaatgtatagacctcaggttctagtgttgatgttggattagagccaccgtcctggtgttgcttaattaaaataaatcatatagtgggctgtgggtgcatggttttgctagtcacgcccatggcacttaaggaccggttcgcgggaaaccctgaaagaatttctcgtacttaccacaagccagcgtgggcaacggctgggcttgtagtgtagctttcctctagctgacgcatccaggcaagggtgggtgtgatggagcggggcgggccttgcgacggcctctgtcgcttccggattcacctaggcacgagaggggactacccgttgcccgctggggataggggtgaaacctgaggtgtggtgtgcttggctagagggggttatgtgaacggtcctgtcacagcctctttccggtatgtcgtggtggcatgtcggcgcacggaaacgtgtcatggggctgtgtcttgtgggtacagttgtacacctctgatcagagtaaaactattcgaatagccatgcccgcggttatgggcggtcaaccagattcaccgtgattagattcaccctagactagtctaatggaattgaatagtctaggtggatggttgggcctgttgcaatgtggtgtagcgttggacagtggatggttaatattgattaattattacaactgtttctttgctttcaactactgtttataaatgctcgctttatgcaaatgaaccactctagctctcctttgatatttccctgcatcatacccctattccggtatgacttgctgagtatagtgggtagtactcaatcttgctctattttccccaaaccccagagtttgagtatacgttagatggtggtttttccgaggagtaggcttcgtccgtgccgtcgaggatgcctgtggagtggtgttcccgctgcagtccaagtcaaggcttagctccagttatctttgttttttttccgctgcatttatgtaagacttttataatgtttgtaagtcgtggatctgtatgtcaactttgtcgtttgtgtaccccggccggtcctggacgggggttttaatgcacattctgcttggaattctactcgggaatttctgggcgtgacaatcacctaatattttatgcagaattcagtgaaacatgaagcagcctttagtccccgttggtattgtagttgacgagcgggtgccggtgatgggatcaccctgcggcggtggtgataggaatgccgtgctgcggcgatggtgatgaaattcaatctttggtcccttcaacgcgcattaggatcagcaggcttatggttttgggaaaatcttaccgtacatgagttctcacccgtgtacaagaccgaaattcccttttatagtgtgttgaggggattgagggtgattccttttgaggaaactgctattgggggtgattattttcgacaaaacagcgagtcgtcgacattggtcatccaattccggtcatacaactcagatcgatcgagcccagaacaaaatctgcgccaggtggaaacccttgctccattaccctttctttccctaatatttctagcgtgagctgagtggtggcagtgatggtgatgccgagcaaagcggaggagacgacaatgccgagcaaagcgtaggtgatggtgacaaccggcacattggtagcgagctaattccatgagtctctcctcctcagttctcctccaaggtgtggccggagccacaccatggcaagcctcagtctcgcgctactgcctgatgcggcaatgggaccagttcgagatggtggaggcgaatgcacggtggcggtgatgccgcgcatcacacgcaagaaggcgacggaggagtagggtgcacgagcacggcatgagctgatgtgacacacgacgggctcttccgagttgaaacatgaggtcgatgaagacacgcgcatggcttgggtcatgccatatgtagccaactcttgcgagtggaggtggtgaggcgggcaagacgggcccccaatgagctgatgtaggtgcacatctcgctaataatgagttctcttgagccggtgagtgcttagtcccaaatttattagggtttgctttaattgggatttgttgggttcaagattttcttaatttggggatttgaggttcttaatttgcgatgcttcaagattagggttttgaattaaggaaatttcgaaattaggggttcggttaggacagaattggtggttttgggatttgttaacttcaactcaaaattcgtaattccctcctaatttctacccaatccaggaaatttgacttaaacaagcaacttaaacatcaattaaaccctaatagcacttgaacagaacatgatccataaaatttgacttggatgcaacatgaaccctaaaacatgaacaagatgatgctaggttacttgacatggcttaatggcttcattactggagtgatgggaacatgcaaatgcctaagaaggctctaataccacagtgttggagcacattcttaaatcattaacttagcccatgcatgatcactagatttcttatgtggaattcggtgaaagtactgaccagtgaaagatgaagctatgagcgctgcctttagtcgttgttggtattgtagttagccaagctggcatcggtgaagggatcaccatgcggaggccgataggaacgccatggtgcaacaatggtgatggaattcgccattcgatccccttcaacatgcattaggatcagtagactcatggatctagaagcgatgacgatggtgtcagcggatagcttctttataaaggtgggaggactaccaagagggtccaagagtcgtgctctaccagattggggcgcaccccacatgggccccacttgggccggggtcccagacgtagttacaagcccataggcctattattggtgatgcaataccttgcttctgtgattgcggccaaatgagatggaattccaagatgaggctggatccgttggaaagaggactttgagagctttccatcaagtactcacgggcccaaaacggagcacgtgtgtagatttggcggccgtttgaagtcagcaacgtaacacgtggccgaatcagattgcagcacatggaggacttgatcttgatgtcttcttgttgattcatgatgtgagcaacggttgtatcgatagtagccatggtcacatcagtggcttgggggttcataatttggaaatacaaaataaatgtctcttgagtaaatggttgtttaagttaataaatgaaaaagggggtgtggcaagacttattgaagagaaagtatctttataataaatctataactcgagttgataagaaacaaggtgatttccatttttggtaaggtcttataaaagttaagagtactttcttaagtattggttcgtggattgtgaatagtggggaacaaataagattttgggaagataaatggttaggtaacttggcctttaaagataagtatctttctttatatgctattgtcctgaggaaaaattcttcaattgctagtgttatacgatctgttccacttaatgtttcttttaggagagctttagttggtcagaaacttcttttttggcatgatttatgtgcttctattgtacatgtgcagttgaatctctcttctgattgttttagatggaactttaatcagaatggacggttctcagtgaggtcaatgtatctggctttaatcaataatggccatactgagagaaataaaataatttggaaacttaagatgccacttaagattaagatatttatgtggtacggtgttgttctaaccaaagacaatttggtaagacggaattggaatggtagtttaagatgttactgaagaatgagactattcattatctctttatggaatgtcattatgcaaagtttgtatggagaaccgttcaattttcttttggtttataccttcctaatagtatatcacatattttttatggttggcttttggggatagacaagaaaaagagcaagcttatacttgtaggagcttccgccttatgttggactctgtggctaagcaggaatgatatggtttttgataaatcaccttctatttcatatatgcaggtaattttcagggcaacatattggctccggttctgggctcagctacaaaggtgtgaggaagatggtgagcttttaaaagttgcatgtcatatgcttgcgacaacagttatacaactttttgcaaattatggatggagattctcaaatagacttcaatagatgtctactccttatcttagtttggttatttgttttttttttaatttcttatgttttgtttaacttaactctttttttagtgctactttgtaataattggctgtagctctttttgagcaaagtccgagatgttttattccattatctgaaaaaaatgtagaccctactctgtgacttatatctgggctccatagattcttttgaaattttttaaacatctaatgatatatgggtcccatttagatttatttttcttaaagtttttttggctgactttaattccacgtaaacatcaagtagaatgaagattagttcaatatgccacataaatgctgcgtcagcaatattcaccgttaatattgtcgagagagaattttattctccacgtaagagagagagaggactttaatatagagtcattataaccaattttacggttgaggactgaggatacgaatcatattcaaatcaaacttttttttcccaagttaaaagaactgggcggcttggggtgttgctgcgcgtaggaaaagaaggctccgcgggccagattataaattaataatggaagtcggtgttgaggcccaaggtctcttttcctcattttatagttttcttttgagcgtcagggattccatccgtcgctccgccgccgcgcatctgatcttccctgaaccccgctcatcatcgcctagccctagccctagtgccgcgagcttctccttctcctctcctatagttctaggctgggaacggtgaggatggccccgcccaggattcgggggaagctgaaacgcatcagccagttcaattctgcaaaaactgggaggaagaagaagatttccaagaagcgacctgcgcagcaaggtgtttaattccttcttctcttgaatgaagattgtttgcttcctttttgacggatttgcagacctatgcaattacccctcttgagtattttttttcttcctggggctgggatgcccaatttcagcacttattttggttttctagatatgagtattcagtacttttatctatcaaaggaacgtgcagtgagtgtgcatcatgtgcattctgccatcagcatgtctttagtttttgcaagttagcatctgcccctctaattgtttaaatctagtttgtttttaattttggctgtttagtttatgcatgcatctttgaagttcccaaacccaaatcataccacttagtttttgttccgttagttgttatttcagtgggaaactgcttgtgaaccatgcagaaagcaattccatatttgatgtagtagataggcaacaccaagtaaccaacaacgctaccagagtatgcaacagagtatgaagcaatcagagtatacaaagactgaaatttccagtgagcagaaacttgatagatgagcagaaacataaaactactcgttgcacatactagcaagacattttaattgtggacaactgcacaaggtaattaatttccttttaacatgtgtccacaagtctaacgcatatattttcttgctgacattaacagagccagaacggaggcttggcatgatccgattcagaatcatggcctgcgcaaagtccccagagcaagacatctgctacatctgcggagacgacgatcacatggagcacttctgcccttacaactacatgttcgggcgatacttcagcgacacctgcagaggagagtgccctccccaggagcacaggatcacctccagggatcatcgagagttcctgcggcgtttcgtgcgcgtgacgaacctgccgccggggttcggggtgtgggatctcgaggacctcttcagcccgttcggagctctgctcatgtggaatgttcccaagttcaggaactacctgtgtggatgcacgactggaatccacatgagcttcggcttcgtcgtcttcaagagacgcgaggatggggagagggccgtcgacgagctcaatggctatcaggccggtgaccggaggctgcgagttgattgggtttacccttcttgtgtgtagctcaaagatcaaactttctatttacccttcttgtctgtagctcaaagatcaaaactttccattacccttcttgttccatttacccttcttgtgtgtagctaaatatcaaactttccatttaccattcttgtgtagctcaaaaatcaaacttcccatttacccttcttgtgtgtagctaaacatcaaactttccacacgcactagcagagactaaagactagagagacatttgcattttctgttctcccatatgtataggggtggcaacagggcagagcggggttgggttggattgccccagcccccgaccccacaaaggaagtcgggtgaaaaacatcacctgttgcagcccccacaggggacccggtgggtgaccggggccccgcatcacccgcatacatgtatcattttgattcactctattgtttatccagactcttttaatagccaatatgtttttttatgatgtagcatatccttgtgcaagaaagcttgttgctttcactatataagatgttatgagtgtgtgagtttgtcttgcgtatctgtttgtctcgtaacgctgtcagatgggatcaacttgtgagtttgttcttttgagactgttgcttattataacttttttttattaaaagacaagttatttccttgatatcccttgtttatatagttttaaaaaataagtgaacgcataggtttgcaatttttttcaaagtgaaaacggagcttatgaaaaggaccagaatgcatacatcaataaagttggaccagaatagtgcatacaagcaagaagatatagaaaacttgtatgcctcacttcgatactgttcctcatacgacaacactgggtcgtttcaactaggaatgtatctggcgtacctggtaccgcacaaatttacaaatgattttatcgtggctatatcgcagttcagcaatggaaaggacaaacaatgtgggacggatagagctcgatacaagatagatgcccgttgtgtttttggcttgattaggatgctgggcatttatattttatctaatgtatgtaactacccaaaatcatactagagtttcacgcaatgggaagacggaattattggtctaaccaaatgcaagggatttctttgccaagattttcattcctatggtgactttcatatggtgcctctgaattgaaacaattcagccaaaactcctaagctgtaccaagtcaaggcaaaactcatactcgtagttatcaagtgagaatgagcctgcactcaactcactgcacccattcgtaattccacactgaaccatttaccaaaacccatcactaattgaactttcaacatagaaaaaaaaatccagatcattctactactactatttcttagacctttttgaaggaaacatcatttttgttttttcgattttgactgaatcggtcggaacatagacgagcgagcagagccatcagtttagacaagggtaagcccaatcgactcgcagcttgcggccaccgaattcccagcagttgagcgcctccacggcctcctccgcgtgccgatgtcgctggaacacgacgcagccgaatcccttgcatgtccccccggagcctcgcgtcgggacgtaccacatccacagcggcccgaaccggccgaacagctcaacgagctgctccggtgggcacaactccgacaggttgttcacgcggacgaggcaccgcaggaacccgagacgcctcgcgttcgcttcgtcgtgcatcgggggctcgctttgctcttcctctctgtgccgcgagcacttgtaacggagcgtggttgtgtagttgccccagagagcgagccgcgctctgcatgggaagtacgcagccggggaaagatagttgtaggggcacatcagctccagatggtttcccttgtcgtctccacagatgttgcagaactcagtatccggatccctccaaaagcgtgtagtggagcctgcatccagagatcatctcagtgtcccatgcatattttcacagggcagtataaaacaactatctattgctctctctaatcacaaacctatcactaagggaaagaacatggacaaacatagtgatctctgaccaatataatacttttgagaattttgattgtcacacaaaaatagcatggggcagaaatagttcacaatattgttcttcatctaaattattgcgttacctgcagctatattatgtgttagtatcacaagttcacaactaatttgttgcatgaggtagcaataactcggtaattagtggcgaagccaggatctgatcacaaggggggccaacctagatatgtgagaaaaaatagagaaaaatatacacaaatttgaaggttcccataaacaatatttatatcatatcaacaattcaaaagataggcatatagctataatgcatatatttatttattttaatttggctttatgagtagacatatcataagcagtgataatggtcgagctaaaagtctaaataaaaaggaaaatacaataaagctagattatggtaaaatgagtgatcaactatctaccttttgcaattattaactactccctccattctaaaatataagacataaccactactaatataaatatcaagaaaaaaatattattaaccctttgtttgaattatcccaataaatacgatgtatgaacccaatagaattagagatcttgagagttaggaactaaaaagaaaaactattttagagatggaagatgataattaactgcatgcatgcttgcgtgccttgtattgtaaagcattcaagaaaaatatttgcgccctatattttgaaatggagggtgcattttagaaattgaaagtaaaaatgttagccatatgtaaacaatacatacgattattacatagtctaaaaggaaaaatatgactgtatgactacgataaagacctttggtgcttttgattaaggattggtgtagcatttttgctaaacatctgtacgtacgtgcccatgccaggataatacggtgtcatctgaaactaacctacctaatctaatggcagattatttggggcgttcggtggggtgggggtcagtggctgttgggggaggccaggcctcctcccgcccctgtcgttaatcctgcactcttgcttccttgaatctaaaaaagtgttttagatatgggtctactaggctatgtagctctacttgccttccgcgcaatggagtcagtcctataatcagtagttcagtatgaagaggtcgacgaacacaccttcctgcctttttacaaaaatggactgaacaacagatgtatacggtcagaatgacaaatctttgtccaattccattcaatgcgtattttcaggctcagtcagcaacttaggccactaaacaaaactttttttatagaaatatgcacgcataaaccattgtgagataattgtgcacatgttgatatactagctgcctattatttaccccaactttatggtatatatagaatcagtattccgaacgatgaccatatggcatcagcacccgaaaaagaagctaatctccagtatgtttctgtcacagtatcactggtgtgaacatcaatcaaacagcggtatctaccacgtctagagtagatggccatatggcatggcaccaagggattggcatactgaatgagagccgtataataacattgaaatgaaataacgagagagatttaagtgagagcaagtagaagatagtactttcttcttccccgcttaatatgtactcacaaactctatctcagcccatctatgcgcccaagcccaagcatgctctagggtccatgtgttagtatggtaagatcgatggcaagcggtcacatggtatatgcaccatgatcattgccacgaccgtgcaagattatgatacctcttcatcgacacctggatgcctcagcagataatgcaatgaatattgaatctgtttcatcacacttctgtggcagcagatagctaccttgattgctgttttcttccactgaggtcattgtttcaggcagttttaggaagggttttaaaaggaaacaaaaccatgactagcgaaaacaagttgtgttagcatgagcaagctgagaacagattcaaagacaaaagaacatgtgcatcacttgtctgaactgcattgttttcaattcatacgttttcaccctaacagcccaacacagagactacataaataagtatttcaaataattaaacacaacaaaatcaattgctgtgtggtcagagttgaacacaacaacattcgtttctacttcctaggctagttgcagtgcgaccagttttatggttacaatgttttatgtaacttactctatttttagacatgaaaatgaaaagcgagcacgcaattaagttacttacattcctcctcttctgagaacaattctacctcctcctgttgttgctcccatttactctttcttcgacgcagaaagagcatctcttggagagtaaagagcctcataaacttgtggaacttgaagagttgaggtacaaccaaaggctgatttacacctcctgaaatcaacacaggcacaactgatgtgtactgttaactggaaattttagtctttgcatactctatatatgcagaaagccattctatcaaatgtagagttgctttctgtagggttcacaaggagaactaaaataataacaaatggaaaaaaaaaagtggagtgatatgatttaggtttacttcaaagatgcatacataaattagacaaccaaaattaaaaacaaaataaattggagtagatttaaagaaactaaacgaacggggccatactagacatactgatgtcagaatgcacatgttgcatttgcacattcgctgcaaataggattactgaagatgggcacgcaaagaagagtgctgaatactcatatgcagaaaaccaaaattaagtgctgaattgaagctgggcatccagggaaaagaaaaaaaaattgctgcagaggggtaagtggggaagtccgcagatccgcgagaacagtagaaaggaaagcaccttgctgcgcagattgcttcttcgaaatcttcttcctccacgttttattacagctgttcttgccgatgccttcgtctccccttatccgggcaggggccatcctcgctgttccagccctccaccccctcgcggcgtagcaaagcaggagagagagaagtgggcgacgaagtcagcggccctagggctaggcgatgatcagcggggtacagggaagatcggaagcaagcaagggcgggatgcggcggcagagcgacggatgggatccctgatgctcaagagaaaaagaaaaaaaaaatccacggaggaggtgaggccgtgagggtcgagagggagagagagagaatagcttgggccgccggactgtatgacttccattatgatcggacccgctgaaattttgatcattttataccttttacagcccgaaaaacttattgctctccgagttgcatcgttttgataaagacacggaggtgagtagagatcgggcgtctgatcgggggaaaaaaaaaatctggcgtccgtgccagccatctgatcgggaagaaaaaaatcagaggccccacagctactatatgcatgcacataaatactataatctgtagtcactgcatgcacagaacatgcagccatgcatgtgtcaagttttttaaataaaatttaaactattttttctctcaaattacttatccaattcacgatccgattgcactattgaatttgttgcaattaaatctttaaaacaagaccacacattgatataatccgatgaaaaaaatttagcttattattgaattatttttaaatattgcacgttgttccaccaagtatataggaattgtttcactaagtagatagtaattatttcactaagcagatcgaaaatgtttcaatcgtttaaaaagctgaaacacaaccaaattacctcatgaaatattttgctacaacgtttgaaacaatggtttctcaaaaaattgagcgttgtttcaccttatataaaaacaatatttcagcaaatagcgaaagaatgtttagtcactgcaacatttgattcatgcacagtgaaacatcacgggtacactaggtgaaacattttggtggaacaaaaaatgaaacagattcccttaatagagggttttcgtaatatgtgggtgatttgttgcaaaagaatatttcaattcaacgcaacattagatatatacatagtgaaacattgtgagtatattatgtaaaacattttttgtggaaaaaaaatgaaacggattctcttaatagagggtttccgtagtatgtgggtaatttgttgtaacggagtatacgtagggacacgtgactagggcggtatgggataggtggcggggcggtgcgcgcgcgtacggtgggaggcgccagggcgcgggcgcccggcgcccaattttttgcagccgcgccgggcgcctaacgtggaggattttcgtaaagatacaaccttaaaaaaaagataaatttgaccaccatattttattgtaatctatatagatatatcaacagatatataatttttattaaaatacgtattaatattaatcggcaaatattttcaacgttatttatagtcaaagcttgtaatgtttaaccatgtccaaaacgataggtactattagtccggaaagagtataagaataagggtaattttaccattggtacctctagatagcaaaaattttagttcagaatttaagtagttcaaggtactttctcaagaactgaaaattcctgtaagaataaacactaaacactgctaataattttggggggtttggggattcagagtggtagcctagcttggggaggggggggggagggggttatgtacaatattaccgtcacactgtgatgcgaaggtggatgaatgcaaaattattgcttatgtgaagcgtcacgtctacggtcaggtctagtaaaacaagctttggacatactatggttcactaaatcaacatcatgtatctgaacatataattttcaacttgagagacctaagcaatagctctgctcaagtttaaggattggtcatatatttgtcgacgtttgatgtcgcgattccgatatttgcatagtatggggatcgttggtactaggatatatgcgagattgaggtaaaatagatggggacgaagatttttatacaggttcaggcccctgaattgtcaggtaataaccctactcctattggccgaagccggtagttgctcttattcaccataatcacaccagtacaatatttggggtagtctatctatctgttgtcgacttggaggccataaaaccatcccgtagtcgacaatagaatagtcttcctcctcgaatccgtgtccggcgagatctctcctgacagtatccgtagacaccgtaggggactagccatgcttatctctcaagtcgatatctgacgtcttgtcttggcgtatgttggcttgtatgttgatcttgtgtcttgatctattgttccgtatcccctctcctactagggggccttgtatttatacccacaggtgtccccttgtccaagtagaactaaggaaaccaatatggatacaatccgaatagtccttgtcgtttccatgtagaactctaaactcttcctatatccgaaggttgtttccatataagacatggtatgtggtgggtcctgccgagatttagtcaactactattaggtatgtggtatctataacactgacagtagcccccgacttcaatgcaaatgaacgagttcatattctcaatccgaagacctcggaataactgttatcgagctcacgtgaccgttctcggtgagttcagagataacgttagacttcccttatcagcctcatgcgggcaccttatagggtttgtctgagtcaatctccgacgtcaaccaagaaagtacagagcatacgactaagtctctcgtcttgctgtaatcgagaatttggattgaagtcaagaaattttatctcggcgagtacaccatctcttcattccgtattccttgttgagatccaccaactgttctcgagtgatcgagaaggcgcagagtctgcgacggagccttgtcaatatttgtcgtactcgccttagtcgatcttggtatagaaccatagagacatggagtcttcgacaatgtcgaatagaattttcctgaaatcaatacttagaaaagaatattagatagaaatagcccccgagcgaacactcaaagggtgacatgttataatatgtatggaaaactgaaaataaactaaatttacagaccaatgttttgtgtacgggcgtcttctcttttaccgacttcgatcagtcaacttgttgagtcatacactctcccttgcccctagccttgtcgtcggagaatcgttctcggaggataaggctcttggacccttgacctgccttggttgaaaaagcgcttaccctagcccccagccgtgaagttggaaaacccaatttccgattacacggcttggttaatacgcacggcgagaactcttacatgaccaggtcttacatggtcgtttgtctctacatgatccgacaaggccttatccgctctgggcatccccagccaaagttcccttaggttcctcagaggccttgtcaggacggcgtaaagagacatgaggataggtttcaaatctaggtgtcgtcgtggtaagggatctctgggtaaaacacttggcgatattgtgtacctgatatcaattttgctggagtagaggtaatgggaggatcgctacactgctgatcgaaaatcagttgtagccccaacttgaccacttgaagtaaaggtagtgggagaatcgctacaccactggtcgaggaccatgtagtagtcataactcaaccactggaagtggatgtagtgggaagaattgctacaccactggtggagaaccaggtgtagccttaactcgaccacgagaagtaaagctagcaggagtgtcgctacaccgctggtcgaaaaccaggtgtagctttaactcaaccacgagaagtaaagctagtgggagtatcgctacaccgctggtcgaaaaccaggtgtaaccttaactcaaccatgaaaagtaaagctagtggaagtatcggtacaccgctggtcgaaaatcaggtgtagccttaactcgaccacgcgaagtagaggtgcgagagatcgctacagcttactggtccgagaaccaggagtagcctcatctctcggccgattgatgtcgaggtacgagagatcgctacggcctactggtccgagaaccaggagtagccttatctctcgcctgattgaagtcgtggtgcgaagaccactacactgttggttgaagaccagccgtagtcctacctcgaccatctgaagtcgtggtgcgaggaccgctacgctattgccgtagtcgtacctcgaccatctgaagttaaggcgcgagagattgctacgatttactggttcgagaaccagcgagtagaattatctctcgaacggcaatggaagttacggtgcgagaaattgctacgatttactggttcgagaaccagcgagtagaattatctctcgaacaccaatggaagttgcggtgtgagagattgctacgatttactggttcgagaaccagcgagtagaattatccctcgaacaccaatggaagttgcggtgcgagagattgctacgatttactggttcgagaaccagcgagtagaattatctctcgaacaccaatggaagttgcggtgcgagagattgctacgatttactggttcgagaaccagcgagtagaagtatccctcgaacaccaatggaagttgcggtgcgagagattgctacgatttactggttcgagaaccagcgagtagaactatccctcgaacaccaatggaagttgcggtgcgagagattgctacgatttactggttcgagaaccagcgagtagaattatccctcaaacaccaatggaagttactaaagttggtttattacatgtgcatcttatgtggccaggatgactcacatacccaacttgtagcatatccggatgtccgttcgcaatcatgtcaggtgatcaagccgacatcgttcgcgagcaattatccgttaacaacccttttctcaaatagcccagccatagccggtgctatgagataggtcgtcggtcttcgttggtaggttgggtgcgacaactctgcatttgtcgagaatgttctcgataatggggtgtactcgaccacaacctactcgagtgctcaattgtccctgaaaaatatttttctagaaggcaaggcatatagcagagcatatcgagtatgtaatcaaaaaactgcatatatcttctagtattatcaggatataacgagcagattaaatatgagggattatgtaaaccgtaaacaagcatgatttatacagaataaaatagatcaagcccccagcgttagactgtagttggcctaacataggaagcactcgcacaatagatattgtattaaaaacatgctctaggtaaacataataaattattgatctgacaatattgtatgatctgaaaagtataggtacgataaattgcctataaaatatcacgtatctctacgaaattagtagattaattaaaaatcgatcttgctaattaccttggtctacctgtctcgtataagaattttggaggcaagcagatagttgcttttggtgctatgggcatcccgatgatcatatagtgcatgtccagagcaaggctatccagttgcatgtagctatgccggctggtcgcatgtccgagtaggtgggaaaggtccaactagtcagaacttgcaggcgcgcattgtccgagtaggactcgtagtatatgcaaagaaaggtacatattactctattactccctccattccaaattgatctattatatatttcataggtacaccaagaccaaaaaaagctaataactctctcatactatatttactctagcaacaaactcaatgcatgtaccatccccactattttctagccaatagcaaatcaaggtattgcatgtgggttataaatacatatgtgcatggatgcatgcatcaatgtccatttactccaatgcacaaataacgaatagacctaataaatgaacacaaatatgtagatcatttaggaataacctcaaaaatactatatgtagatcaatttggaatggagggagtattaccgatctacagtaaacaagaataatctattcacagaaatttgggacgacgaacctgatgtcattgtagatcagtagcgcgttttgtcgtggtcggccgatttgatccggttagaattctggtggtggaagtccgctcagaggttgtaggacaatccatctcttgaacccatctcgtcggaaccttgaagcaccaaaaatcccctatctgacgcaccactgtcgacgtttgatgtcgcgattccagtatttgcatagtatggggatcgttggtactaggatatatgcgagattgaggtaaaagagatggggacgaggatttttatacaggttcgggcccctgaattgtcatgtaataaccctactcctgttggccgaagccggtagttgctcttattcaccataatcacaccagtacaatatttggggtagcctatctatctgttgtcaacttggtggccataaaatcatcccgtagtcgacaacagagtagtctttctcctcgaatccgtgtccggcgatatcagagacaacgctatgtctctcctgacagtatccttagacaccgtaggggactagccatacttatctctgatgtcgatacccggcgtcttgtcttggcgtatgttggcttgtatgttgatcttgtgtcttatctattgttccgtgtcccctctcctactagggggccttgaatttatacctacaagtgtctccttgtccaagtagaactagggaaaccaatatggatacaatccgaatagtccttgtcgttttcatgtagaactctattcatcctttcttatgcggaactcctcctatatccgaaggttgtttccgtataagacatggtatgtggtgggtcctgccgagatttagtcaactactattaggtatgtggtatccataaccctgacagtattttactttaattatattataagatgaaattacagtattatatgtgttgtgatatgtataggactatgataattttggttaggttcgctatgtcccaatggaaaaaaggaacatctccgtatgagtagacatgattggaaaattcgtatcatcttttactataatttgtgatagttttggcacatacggtgagtgcggtgacactaataaaaaaccctcatagggatcggcttataagtgctggtttatttaaaaccggcacctatagacaatttcccacctccctatgatggaaaaatacaaaaccgatacctttaaacactataggtgtcggttctagcgaaaaaaccggtacatatactattggtgtcggttttttaaaagaatcggcacctataatatattataggtgccgattcttttaaaaacccgaccccattagtttttgtaccggttttttcgctagaac

SEQ ID NO: 9326 - DNA, 58218 bp, Oryza sativa
tcgccgccgccgcctccgcgccgaggccgccgccctcagccgctgccccgcctgcccgagtgctcgaccgtgagagagagaagaagagtgagaagagtgaggagagtgagagagaagagcgtatgacatgtaggccccatattttttaaatatagaatgctgactggactgccacgcgtacgccacgtagaccaaaaccaccgcggattgggtcgaggggggtaattcgttcggtttgtatagttcaggtgaaaaatgtccggttttgtggttcagggagataattcagacgaccgcgatagttccccggggagggggggtaatttatactttttccttttcacttaacaccacatatttctacacttgatttcactttgggtggggtctattatttgggccagcccatccatgaggaaggaggcacgagctaccgtctgcgactcagccgtcgccgctgatctctacacaaccttgctatttctatcacatccccgtcaatgggagatcaattttctctcaccacctcaatgaccttgctctcggaggctggtctggccggagctgttcttttctccctgcacgcactcgctcttggtcatgatgcacgaagaacacctcccaagctttgcacccgcacggcaggaccctgaatcttgcagaaactccatttttgcttgcggcaactccgactgggcaagacctccggtgttggagaagagaatcaaagtattgcttgcttgcatgaatgggccaaagccagcaaagcaccccaaatcgccaatcctagtccaaagtgcaatcaaatgtaaaaacatgtggtgttaagtgaaaaacttgagtgggacctggtccaatgtaaaacttgggtaaaaaaaacctagcccaatgtgaaatttactctagaatgtttaaggaaaaaatcaaagttaaccccctaaaatgttatggttgtcctgcaacccctcaagtatgaaactaggtattctaccctctaaaatatgaaaaccagttcaaataagtgcaaatagtggttttataaatggttggcttacatggacactgtgacatgccgatgtattcggttaaataacattttaattattgggacggttggaaaagaagcacattagtgcttataaagtgattcttgggcctgctgattggagagagaaaaggagtggttgggttgggttgggttgggtaattttgccctattgtgcttgccgtgtcatcttgtacacagcaaaatcactacaaaaccattccaagtggttatttcaaacaactttcatacctttgagggtgaatacccgtacttaaggggattaacagacggaccaaagtgctttaggcagtttagtagacttctcttgtttacagaagagttttttgctattttgttaaaatcgtattgtggcctttttacctcctgcaacatgttcttattcattcaaacagttcataagctgttttttttctttatttgcttattcagaagcatatttgaacacaacgagaaaaaatctatacaatggagtgttggtgctgtaagtcctcctctgtcctcctcttttattttccttctaaaaatcccctcattgtgacattggtatccgttttttttacaccaaacacatctaatattactttcttaccacttgtcaggtggtaccatttattgggtttgcagtcgcaatgttcatgttttactctctagttccaattttactgaaggtatattagcaaacaatgtttcctttgtgcaagtgtgtatctactaatttccttagtcatgatttctcagttcttacatcccaagtttacctactgttccttgtccatctccttaaaaatggaaaaaaaaaagaaaaccgacaaaagggatattgttgtactacgaaatggcactgccacattaagcacatggtttttgctctttaagtttctcatatctatattaacttgtgcagatcagtggttcaacaatgctaaacctttcattgctagcctcagacatgtgggctattctcatccgtgtgtttgcctaccatgaaaaggtctgatcatcgggccctcaatctgcaattctgcataaagcatactgcagtttattgtcttacatgtaaccagcaattgaatgcactttcgctttccaggtcgactggatgtactatgtggcattcggtgtagttgcaattgggctggttatttactcagggtactcacctgttttactttctgttatccttctccatgaaaaaactcaatactctagctttattagttgcaagacaccattctgaagtttgacgttaatcattggaacattaattacatgtttttaatcaagctgtaattttgtaattagcggttattcgtcctgcaaactttataatgagcgactgaaaaataaaggcaggaataaattccactatctaaaaaaatccatcttctaaattagaccatcacagctgttctttctgttcactaatgctgacatgtcgatgcagcgattcgaacagcgacgatggcagaagtgggcaagttgctgaggccactgatgttgagggaaagctacctgatgaggaggaggctgctgttcatccaaaatgccagggtgcagcatcatctttttttagataatggaataaataaatatcccggcctttacttaaaagagctacagccaattattacatagaagcgtttgacgaacatagtgtagatctaattgaatagaacacaccgcaagcaacaataaagaatccagtctaacaaaggagattacaattattcaagtctatttgtaaatctccacccataattggcaaaaagttgcataaccgtagtctccagcttccgacatgcaactttcagaaactcttcatcatcttcacacctttatagttgtgcccaaaaccgaagccaatgggttgctctgaaaatgacctgcatataggaaaatgatggtgatttgtcaaaaactatattgttcctactcagccatattgcccaataaatggcagaagctccaacaagtatcagtttactcattttcttatcaactcccaaaagccacccatcaaaaatatgagatacgctaactggaagattaaatccaaaagaaaactgaactgctctccacagaaacttcgccaaatgacaatcgaaaaagagatgttgaatagactcattcttcaaacaaaacgaacacctcaagctaccattccaattacgccttgccaagttatccttagttaacacaacccctttaagcaagtaccacataaaaattttaatcttaagtggcatcttaagcttccaaatgcacttattcctgtcaatataaccattattaattaaagctaggtacatagacctcaccgagaacaacccattctgatggaaattccatctaaaagtatcagacgaatcattcaattgaatatgtactatagaggaacataactcatgccaacaatcaagattctgaccaactaaagctcttctgaaagaaacattaagtggaacagaacccattacagtagcaatagaagatgttttcctacgaacaattgcgtacaaagatggatacttgtccttaaaagcccagttacctagccacttgtcctcccaaaatctaatttgttccccattattgacaatccaagaacccatatttaagaaggtacttttgacattcataagaccagaccaaaaatgggaatcaccttgtttcttgtcaacttgggttatagacttattataaagatatttcctcttcaataagtcatgccaaatcccttcctcattaattaacttaaacaaccatttacttaaaagacatttattttgtacctccagattatgaatcccaagacccccctggtccttgggttgacagacaacatcccacctagtgagcctgtattttttcttatgatcatctccttgccaaaagaatcgcgatctataaaaatcaattttatgaagaacccctttcggcacctcaaaaaagatatcataaacatggctaaacttgaaagaactgaattaatcaacaccaatctacccccaaccgataaatgcttgcctttccaactactaagctttttctctattctctcttcaataagtttccaatctttattagaaagctttctaaaatgcatcggaattccaaggtatttaaaagggaaagcacctaacttacaaccaaaaatgtccgaatattgctcataacactccttagcctgaccaaaacaaaataattcactcttgtgaaaatttatttttaggccagatagcttttcaaagaccgataaaatcagtttcaaattctttgcctgttgtaagtcgtgctccaaaaagatgattgtatcgtctgcgtattgcaaaatggacaaaccatcatcaacaagatgcggaattaccccattcaaaagaccagcctctttagccctcttaatcaataaagtgagcatgtcagctactatattaaaaagaataggagataaagggtcccctttcctaagacctttgaaagtttgaaaacaattaccaatttgatcattaacttttataccaacatgcccaccttgaacaaaagatgctatccactcacaccatctaggagaaaagcctttcattctcaaagtttgttgtagaaaagaccatttaactttgtcataagctttctcaaaatcgatcttaaaaattacaccacttttatctttgcgatgtaattcatgcaaagtctcatgtaaaataaccactccttccataatattcctcccaggaatgaacgctgtttgagtaggactaattaccttttgagcaaaatccattaatctatttgtagcaactttggtaaaaatcttaaagctgacattaagtaggcatataggtctatactgttgaatcttcatggcctcagcacacttaggcaaaagaataatagtaccaaagttaagtgaatataaaggcaaactcccagaatgaaaatccttaaaaagttgtaaaaagtcaaatttaattacattccagaacacttggtaaaactcagcaggaaatccatctggacctggagttttgttatgttccatttggaaaatagcctccttaatctcattttcagaaaattccttagttaaagcttcattctccaaatgtgaaacttgaggaatgccagcaatataattatcatcaaactgaagatcagattcattaggagggccaaaaagacctttataataagtggtaatatgcgactttaaattggcatcacctcttattaattgatcaccatcctgtaattgataaattctagttttcctgtgttttccatttgccattaaatgaaaatactttgtattagagtcaccgtccataatatccttagtcttagcccgctgataccatttaatttcttcttcccttaagatcgcagataacctattccttaaaaaccatctaagatcaacctcctcttgagacaaaacaacagtctcagcctttttatctagcgcatccaacttatttaagatctgctttttctcttttttgcataaaccactagtgtgtttagcccagcccctaagatgttgtcttaagcggcgaatttttgcctgccaacgctccataggagtattgccttcatcaacccagaccaaacctcctttaccatatccacaaaaccatcacgtaacagccaaccaagttcaaactgaaaacaatgttgagcgtcactaaaagaggaagattttgtatttagaagcaaaggaacgtgatctgataaatctctgtttagagcaacaacagaagataaaggatacttttgctcccattccgttgatactaacactctatccaatttctcataggttgggtttgctagattatttgcccaagtaaagttcctaccagacaactgtatctccctaaggcacaacccatcaataacagcattaaacaaaaagggccatctatcatcataattgttattactcttatcattaggactacgaagaatattaaaatcaccaccaataagaattggtatagtctcatgactgcacatgttaactaattcttcaaggaattgatctttaagctcattctgtgcaggcccatacaccaaaactaaagcccatttaaaattatcagccttatttcgtaaatgaaatttgatataaaaatccccctcatcaatcaaaccaatgtcaaaatttagaagattaattcctaaaagaagaccaccagatctgcctctaggagatttacagtgccacaaaaaatctttactaacacaaagattattcagagcagatgtagaaaattccttcttaaccgtctcagataaaacaataaaatcaagttgatgttctttggttaaatcagaaacaaacttatgtttttttcgggtccttgaacccgtcacaattccaaaaaaacttctcccactattagacctaacgagccacatgctcaaacatgaaagtaactatggactacagaatatagaggaaacagaaaaaaatccaacaaggagagattttgttaacgcggataattatgtttgtcttttaggaaatggcccatatcatgccctcagcaacgaggagctgagctgagaattatctcgggaatgactaggaaataggattatagaatcatagtattggaataaacatgtgtggtaggtcagcatattcatgcaatttgctgtaatgtaattttgcgatgtattcttttatcttttctttgatgcttctaaaggaagctccagttagtcagagtatttgagtgcaaaatgttgtattggggaaattctctgccatgtaactgggtaccgaagatttgatgtatcaggtgataaacaagcatattattatgatttttctcattttatttcttcatacttgaagactgaaagcatagaagagcaaactgtttctttaacggccataactttagagggctgcataaccaaattgccacacatatgaaccttacataggtgaagtgttcatttcctataaattttctttttttaaaaaaatgaccataaggttggcatttataaattgcagcatgagcaaactagaggtttctcaatcgttgataggaacatcatgtaatttgtggcatgacagactaattatcggtcagccagacagatcgcaatagcaacagggtaggaggtgattatctccaccttgaactgaaattccaaacatcacacatgttttcagtaacacacaattgtgttgaacgaaaccgaacaagacttaaaaaagaaagattacaatatactacaataaattgttggatccaataaaattatgactggacagtacacttgctatcatccgtgtgcgtggtagcttgagaaggagctatggtgtgcatcgaaggcggacgatgaacaagagtgaagctttctcccacatcagccgacccatagatttttcgcttgatgtagactgctatcctactatggcctcggctgtatgggaattacttcacaaacatgcagatatcatgctcttgaatagctcatgtagttacagcatgattcacttgcagcatctccaggattagtcttccatatagttcatagatcatacaacctacaaggtttcaatgaatggaaatagttgaggtcaattaatgtataacatctacagaaactatggagaaatggaaaaaatatatatacatgaaacaaggatgtgcaaatgccaagaacaacctaggaactaggaaaaatgaaatgcagcattgtgcaaatgatgagacaggaaccagcaacaagaaaataatctcagaagttaatccagctgagtcaaataatctcacagtttggaatgcaaataagtaaatcaatttgcaacttaaagaaatatatcatttagaaatactatacattggaaacaagcatcacatcacgatgtataactgttaaaatgacaattcttatctgccaaacaaaatgctaccttgagtgtatggcattttacatcttataggaactaagcaagcagggaatcataacaaaaaattacaaataatgatgtatgatcatgggtttatacctcagatcttaatatgactccaccacagaagtgtttatacctcagatcttaatgatcttggcagccctgatcacaggattcgcgcgggcaatctcctccctgcccgcggttttataatcgaaggagcactcatgggtctcggaatgccggtggcgaggacagaagagctccccgcagcggcaccggaatccggtcaaaccgaccctcttgcggcacacgttgcaccggttaacaaacagcaccggagataatggctcggctaccgccgccacgaccacggcattagcatcggtggcggtggcttcggctagtttcctcttcttggaaacctctatgagaataccttcgcagttcttggctgagaattgaggagctgctgctgccgatgccgctgctgctgctgccggtggtgttggtggtgtcgattgcggaggcggtggttctgtcatttgtgctgttggtggcgatggggaggctgtggttggggaaggagaaggtgaggatgatgatgatggcttcaagatctcagcctcgtccttgttgagatcacagctctcctgcgccatcggatttaacgcggacgaacaaatcaagggaagtggaggcgaatcccaagcttggacaaccagatcaggacgaattgggcgtaggaacagcaagaaatggagtttgttgaggtaaataaaaggttcggaaatgggaaatcaatggctttttttttattccttgatcgaatcggtgcaggccttagacccaaaaccaaagaggaaaacgagatctacgcaggtagaaatcagagaaatattattcggaaaaaagaagggtaaaaattctagcttttcctgcaccaaatcaaacgtggaaatgaacagaaaatcgggctgaaatgtttacagagtaggaattttcccccctgatttaaacgcaagaacaaaaacacaaaatctacaacacgcaatcgagccaggagaagagaacacgcgcagatcagggggaaaaaacccaaaaaaaaaaaggacgaccttttcagctcataccaaacgcaccgaaccacggatttctccccaccgcccaaataaacccaaatcgaaaccgcgggagatggatcgccgccgcgccgcgccgcgccggctaagctgccggcgagggatcgaatttcgaaggagagaccaaagaacaagaaccaaaggattggggaaggaagaatccgaagaagaagaaaagctccgaaacaaatcggcgggaggggggctcccccggcggccgcgtggaatcgacaccgaatccgggcagattcgacggatcgcgccgcgggagagcgccgaattggggacggaattgggcgaggaggcgagcgcaggagggaggaggaagggaaaggtgggagctttgggtggaggaggagagagaccgaggtgcgtctctgttgaggtcccgaaaggccaaagggaagggaggtagtggagaaaagtatttatttactcctcctctatacttatctatctatagtttattctttttttctattattttgttttattttatttttatttgtgtgaaagggttttgtgtgtgtggattttgggtgtcacacgacgccatctttttttattagttttttttttcttatggctcacctcacctgctgtttctccctagcttcttttaatgaccacatgtgttttactaccaacgagaatgggggatgtatactggtggtagtagtactagtctattgtagctgtatctttcattcttttctactcctagctggagaaaatctggtcaggctggctgctggtggagtttgtgctccttggagggaagtaacgcatataggattccaattaaaaaaatacttatcgcatttggagaatttggctcattttatagggaaagaaatcaggaattttgtaagagttagttcaatacctacgaaaatccctcaaaatcacgttattatatcaaagtattccggatgagtccatgggtcggacgcccgatcggtttagagaaaaatcgagcgctgatggcagcacgacatcagcgcccgatttacatgcaaaactattttaaactgatttttctcttaaattacttatccaaatcataatccgattgcaccattaaaattcgttgcaactaaatctttaaaacaagaccacacatgaatatattccgacgaaaatttttttagcttactattgaatttttttaaaatgttgcacgatgttccaccaggtatatcggaattgtttcactaagtagattaaaaatgtttcacttgtttaatcgggtgttgtttcaccttatataaaaacaatatttcagcaaatagcgaaagaatgtttcagttcactgcaacatttgatctatacatagtgaaacattataagtacactaggtgaaacatcttttatggaacaaggggagggacaagtaggtgggtccagcatggtgcgcgcgtggggggagggggagcgactgattttcccacctctccccggtcgaccgatagagagcattttcgtagtattcctctattgctcgaagaaggtatattaatattttagagagtattgttgttccatggtgtacctttcgaagtctacatggtttgcgctgttcttttctgataaagattcagattttatcttagtttcgttagcacgtttttgaaactactaaatggtgtattttgtgtaaaaactttctatatagaaattactttaaaatatcaaatatatcaatttatcaagtttgtaataattaaaatttaattattcatgtgtcaatatctttctcattttacgtgtgctaacttaatttgcatcttcatcagttttgaatactagttttgcaaaagtctaaatgttttttttataaaatggttgtcatctgttccttgtgttttaaatagtctttttttctttcatttatgttgcttttagttatgttgtctttgtaacaaagaaaagaaatatgcattccacctattggattttcattttcttttagaaactgaagtattgtaaactgatgcaaatttcatataaaatatgacgcattaaaggcatttcacatgttttccctacctttctattgtttacattgttatcatgtttggacatgctgcatacattatgttctcctcataggctgcgttcgttagcatgggttgggaacacataaaacaaagcatctgtttaatgcatgattaattaagtattaggtaaaaaacttgaaaaggggattaatattattttttaaagcaactttttagattttttttttgcaaaaaaataccctttatcagtttaaaaagtgtgtgcgtggagcacgagggatgtgagttgggaaagttggggaaagaactcagccttaatattactcgaaaaattctggcggccaggattttttttcatctggacaaacactttgacttttcatttctcaaacaatcatggcctttttacgtttatcattgactttgctaggctatgttagggagctggagattacaagaagccgctataaacaagcatccaactagtggtaatatgttgaagctctaggttccctagcctctagctattagctcattactggatcctagaactatcgggtttcacaatctaaagagaggattcagattgttattttagggtagttgtagctactcaaaacaccctcccaaataaacatgcatcaacttggtgaccacaattccacaactgtagtcgtttccagtgacatgctctttcaacgatttcatacaaaatagttgcatatcgagtttggttcgttttgatcatcaaagagatctatctgtatgtttgagaaatgcacttggccaaaatggattttcaccatcataatatatcctgaaactcagcataatatattgcattgttttgaggttaaaatgtgatactaaataatttcaagttcacagtaccaaattatgatccattgctgtagagaatcatgtcctataggatagagagagtttaaagttaccaatatatcataagaataagaacaagaatataagaataacagagtaggttagttatgatgcttgtctctacttcagtgcgtcagtgcccatctaaaattgtccctaaatgagtgcttctagagatggccttttatacaaactaggaaggtagatttgaaaaacctataaaggtggtatagcagcgaaataatatctgcaacgtttcaaaattgtgttttttttcatgaattttcttcattagaattgcatgacgaattataaaattacctattagagattagggttgataacttacggtataaaaaatggtacctaagacatatgactcttgaggttccatagggaaagagagaaaacataagttataaaagacattacatatacaaccatatataattaatggctctacccattttttataaaaaatgataattaatttattatttgatggcaaacatcgattggtcatagctatggataattcttcataggaaattatgagtttcataggaaaagagagaaaacttaagttataaaagacattacatacacaacaatatataattaatggctctactgatttatattgaaaaattgataattaatttattaaacaaaatatatgaccctcaattttagaccattatttctaaccattggatatgtagatgatctaacatattgtgcagagtcaaactaaccaaattattcgtctttcctcaccacggacggtggacatgttaattcgtgcctccggcaacatgctcgcatcaccatacttagaagaaaaaaaagtgccctgcatgtatatgcataatacatgtaactatctcatgccccttttttcatctgagaaaaaatattatatacccatgcatgcacaccgggatgcaccagccagccctccaatttgttcactccatggacattatgttcctttgttctagtgattagataatttaataaggataataagtatctaaaatcaatttttattagtaaaatatccataaggacagctctgtagacaccatctctccttcttcttttcttggtgtattagttggatttgagcaacgtgatataggtattttgggctataagttaatgtccaacttccaagggattaaggtttcccaaccttcagcgccgaacacagcataagatcgttcatttatccttaaaaaaagatcatatcttttatcaaggcattgggattaagtaaatagcatccacataaacgttgagagatataattaagttggttatgagtcaataggtccattgatgctataattaaagttaaggttaatggtttataggttattttgattttattaaaaaaataaggtggatattttgatttttaatgataacttttaggatttttttttggtatggatgtgggtccaaaatataataattttataagcaattaaatatagttggtatagatattaaactattgatttaattaaaaaatacaatggttcaaacagatcataaattgaatatataatttaaaatttacagctattgaagattctttatttatttataaaaacataccaagatcaatatgtatgaggtatattatctatgtctatatttgcaagtgcatgcagtctttgaaagtgcgatgaaattaacttaattaccttggaaaaaaatgggtggcgagcgaggaaaaaatcacacagactcttatcatgcgtatggatggaaacatgtacgtgcgtgggtggactcgtaccgccagattgatcttaagtttgttactaaagataaatctaatgtatctgaggtatattataataataataataataataataataataataataatagtaatagtaataatagtaataatagtaatagtagtagtagtactaataataataataataataataataataataataataataataataataataataataataataataataataataataataataataagaggtatattattattattttcatatataataggtggttgtatatgagatataagtacgtacgtacgatctacagggctgggtggggttaggtttgggttgttaactttttctttaagataaatctagtggttgtaaataatgggtccatcaaatataatgaaaatcaacggttatttgttagagtggcatgtggcaacttaggaacatttctaggatgccacgtgacgacttacgagtgtttgtagaaagtttcgtggacttttaattaatacaaatctaataacgacgtaaaatattgtgttcatcgattttagtggaaaccaatgtttggatgtttctctaatttaagagtgccacacacgcgtttgatgtcttttgtgggggtattcttttcgataaagataagttcaattttaattgtgttggaaaaagaaaagaaaggaacaaagggaaaaaaaaagagaatggacagatggagtagtatgtgcgtactgcacggaggtggggccggtgggaggttttggttttgaagatagatctaacaatgtaaaataatggttccaccgatttaaatgaaaatcgatgattagatttctctattttattagagtgccatgtggcaatatgagagcgttttgagggagctacgtgacagcttgagagcttttatagggagtttaatgaacttttagtacataatagatagatagttttcttttactttctaggaaaggcaattcacttagacatgtctctatttttttttttgagaacgggggcattgtgttcctagtttatattaagaagaataaggaatcgacccagtttatgaagaaaaccggatatgaaactaaatagtcggcaaaaacacacatggaaagcaggaaaaaaaagagcctgtggcaacaccactactgagacccgacacaaattatcgttaccaagctcatcacaagacaagaagctctgacttcctttgacaaataactgtctcaaaaccacctagcacactaattattaagtaggaccttctaagcaaagcctccaaggaagaaaacaatgtcaaagacgttgccaacacccatcgagaactagactagggatgcctccaaggaggaaacgacgtccacaaacgtcgacattgccggcaatggtcatataccaagcatggctttcacccaaagctctcacatttgtcgaacacctctagtgttgccagaacaaaggtattgcgggttatcgttgctcagcttgccacccggcgcagtagctccgcctccacgacaactcaattgctctacagaagccatcagcaccactccacctaaaaaacccttgccacacagccagaacgaaaatagttgagagttatcgttgtcaagcttgccacatcggccaagcggctccgctttcgcccccaacacattaatgcatggttgctcaatcggaactgcttgcatcgccacctctctcatatgggagagaaaacccacacgggatccctcgctgccacaagcctcgtgaaagcaatatcagtgtcatagaccacctgtcctccaccacatggaaatcctctcagtctaacggtagtccccttacatccctcagtgcttcccacgatcgaagtttgaaagcaaactagccattagaggggaaggagcaccaagaagagggaggcagcctagctggccaaaagaggactagctcgctgtcatccatgccgccaaccgtactgatgaccgccatgtccaactgatcgagccaccaagcgatcgattagcctacaagtaacaccgtaggccatgagctccaacggcactgcatcaaaaccacaacaccaccgatgctgcttgtgttagtgcctcgccatcatccggcccatctaactgtctctaggggcggcctacaccaactgcaccacatctgcactgagcaaacaccctcaagtccatctcagacccaatgcaagaagcttcctcgaagtggcgcccaccccaacttcccaacggccacctcaccacaacttcttggctaccacccgctcaggcttcctaggttaagccggcctccgccgacctttcttccctagcagagcaactaactcgtagcatcacctcatgtttgcttgcccgcatcgttagtcggtccgtgctacctctcccgacctgaggcctggaccaaaaccctcctttgaccaagtgcttgctcgcctgcggccactgctgggtcgagtccatggccatctcctcaccaccccaaccaccatcatcaccatgggagggataacaggtcctagatacatgttgcagcgctagatctaggtgaggaaactccagatccaaccgctgtccatccgtcatcgtcgcatcttgtcgcaactcccactaccaccgtggtggacaccggctctcacattaagctgccccggtgtggtgcccccgcagctcgccatgcatcggctgcccactgtcacttgctcgaggaagaagaagaggccccgtcgttgctgtccttgcggccgtgtggttcctggaggcttgctccggcggcagcgagggaggggaagggagaaggatggcagccggtgggatggagcaccgcccgtgtcaccccgtaaggagcgacgcgggagaggagtttttagaattccagacatgtctctaatgatgtgctagtatattatattacaaatttaaattttttatcgtctcatgaaaattttctcaaaactctcaatccatcctttatcttccattatcataaacaaacaaagctccgttcattttcttcctctccttgtccttctctcctcatctcctctcacttagctcctctgctgtggttataagtggtgcgtgtattctatgatgacctagccatagcacatgtatatagtgtccagacttgtagtattaggttatatttaattcaatattagagccaaatttatttatcaaggttcccaaccttcactccctcgttttcagcacgtatatttcccaaactgctaaatgatacgtattttgcaaaaaaaaaaaagaatctataggaaagtcactttaaaagtcacattaatccaatttttaagttttttagctaatacttaattaatcatgtgttaatctaccactctatttttcatgcgtggggattagtttcgaaactacagtaaaaacaaagcttagaccgatatattttagaagcgagagagtagaaaagtaagataacccaataactaaatttgtactgatcataataaagttgtctagttttatatacttcattaaaaggagagccaccatgtggcatgaagaacaccaatagaaattaaaggtgatcggtggtgccatatcgtgtgcaaaggattaaacaagtactcgcttgtataattgcatagcactagttggaaattttggtagaagatgggatcaattttaagtaacaggacaagattcgaactacagtattgtgcgccttttttttttcatacatttagaaaaaaagttcaaggggatctgtggcaaatttgattttagtatataaatctatataatcaacatatatagttggaactatatttgattctgatgattgtcttgaccaaactagaaggctgttgacagcaaacaagaaagccgcatgacggaacgaacgatcgaatcgtcaaaagatgattgagaacaaagatagaggaaaatatgaatattttgactggtttttgttagctcgccagctggtgatctgggagaggatactgtaatgatgccatacaatatttttcatttatgttagtttgtcacctcaaactgtggcatgtcctagtaatgatgttacctatattttgtttactatcattacctatattatggccctggttagatctcatcccaaaactttacaccagatcacatcgaacatttaacacctacatcaagtattaaatataggtttaaaaataactaattatacagattgcgactaattgcgagacgaatcttttaagcctccatgatttgacaatgtggtgctacagtaaatatttactaataacggattaattaggcttaaattcgtctcgcagtttacttacggattctgtaattagtttttttattagtgcccgaacacctcatgtgataccctatataatacccgatgtgatacgccagaactttacacccttaaatctaaacacccctatattagtaatgatagtaagtcctatctcacatatcatagacggattcagtatcgatctagtacattagtactgcagaggtagctacgtgaaaatgagtctggcacattgtttaaatgcacacacatatataaatgtatcaaaggtatgtaatgcagggcttgttcactttgctactattttcaaccttacatttttttggcaaagttactaaaaaagtggctacacttagtttgttgctaaattttaataagtacatatgaaatcttgtcacaatttgacaaccttaccaaaatttaacaatgtaaaacttggaaaggttgaaaatggtagcaaagtgaacaagcccgtaattctaccgtgtgaaaaaaataaaattgtaactgtaacatcaagattgtagggatatgattatcctcgggcgaccgggtgggggaggaaaaatcgggcactcccccagccccccgcgcgtgtgcatgtctgcactccccctggcccaccacgtgtccacacacaaacaactctattgcaacaaaaaacccatatattttggaaacaatctattaagggaatttggtttattttttggtccaccaaaaatgtttcacctagtgtactcacaatgtttcactatgtatagatctaatgttgcagtgaacgaaacattccattgcaacaaaaaaacccacatattttagaaaccccctattaagggaattcggtttattttttgttccaccgaaaaatgtttcacctagtatacttacaatgtttcactatgtatagatctaatgttgcagtgaactgaaacattctttcgctatttgctaaaatattgtttttatataaggtgaaacaacatccgatttaaacgagtgaaacattttcgatttacttactgaaacaattccgatatacctggtggaacatcgtgcaacaatttaaaaataatacaataataagctaaattttttttcgtcggaatatatccacgtgtggtcttgttttgaagatttaattgcaatctgatcatgatttggataagtaatttaagagaaaaattagtttaaagtagttttacacgtaaattgggcgctgacgtcgtgcgcccgattttttgaagttttcgatcgggtccctagtcacctccagattgtagcagataacttgaaccatccatatcttagtcggatggttaatttgtaacctcagtatgtttcactacatcgtccacgtaagaccatggatacatttctgtcatagacatactacagcagaactaggttcttgtaacacagctatgtgctactacagcccttaaaacgtgtgtaggtaatttttttttatcttttgaattcatatatacgttcatgctgtgtttcagcatttgattgcccattgcttgcctaacaaaggcttatattagttaaaatgtttgctaaaaaatataacattttacatctaaaaaaacaaagtctgctctaaattgtatgatcagataatatctgtgcttcctttacttatccacagcaacactagagtatcagttggttaactggtcattcccttccatttctttttttatatactatagagtatgatcatgatctatgttggctcatatatcatacagatggaagttctacatttccgatggtcactctgcaatattctttttgtatggaagtcactctgtactgttgaccatattcacatgtctagattgacaacatggtacgttaagatttagttaaaaaaatactaggtaaactaaatcggttttgtatggagcatggtcatcgacttctagtgagtgataaatataatctcagttttttattgaactagtactgaccaaaaaggcatttaccatatgttagattaatttgtaatatgctctaataaaataaacactagttttgcatatacaagcgagcatgctctttgaaatatattctgcttgagaaccctgatcatgggtgattcttgggtttatgtttgttggtaagctggaatatttttggcctgcaggaccatggagatcaagcataatttggcttgcagacctttggagagttggggaactgttatacttgtgcatagtttggttctaactgcttgtaccagatgcatgtttttctcatgactataacaaatgtggaccaaggtgctttcagcagagcacaagatgtctcgaaactgccttatgtaatactggcactaaattggcccttggtgctatcaactacccacatgcttcaattaatcggtatttttcttacatgattgaaatgctcttcctacaaagcatttgatggtttctaccaatttgtacctcaactgtcaaagaaatacatatgtattttctattttgtgaaagcttcttattttccttaagagtagcagtttagatagatagataacactagcattaagtcccaatttgcattttgctaaaactgaaaacaagacctaccgaagaattagtccaagctgtaaattacattcttataaaatggtgatatgcctcaaacgcatcaattgaccatgcttaatatataacagcgaaagtgaacaaggtttagttcttgctttcatagataaatatattgatgaatatagtgcatcctaactatttttacattatactgattctggtatcctgaatttttaatagtgcttgtcgtggggctacccaaacttgcttctgattcactaatccattgatcataactaggttcactgtcaacgcctgtgctgtacaactctccagatgcaagcttatataagttgtgaagagatccttgcagcaaacaaaatgaggagaatgccacaagctttatttgtagcctgtgtatttgttctgtgcagatatgtggcacaagttttaatctacagatagtttcagaagattctttttttttcccaatatgagcacatttttgtattctatcatgggaactataggttatttcttaaactatttgttattcttagttagaaatttgtattttcacatgtatgcatttattttgttttgttttacatgaatgtcaagtgcgcaccacgttttaaaacttattgttattatatctcaaggtttaacatgctggagtaaatatttattggctctgacatatgcacgaatggtttagcctttcgatcttcataattgatataatgtgcctttgggacatatcctttgtaacatatattttgtgatcctactagtgcattcctggaaaaaaattttctttcttattccaatgtgttacagactactcttgtagcacatatgatgtgttactgtgatatttcctagcagcacatctattaatatgttacagggttatgttagtagtagtgacaatggtagtactagatgtattaatcttgcttagtactactaaagggaattgagggggcaaaccaggggttgtcagcagaagtaaaaacgaaagggattgtcggccgttcagaactggaacatttatagaaaattaagtcgcttttgtcgtcccatgtgaacctacagatccatcgtttgcttatagacttattggtgaaaaatttaaattctactaaaacttaactttacaattgattataagtttttttcatcgtagtttattttttatattggattttagatagcaaatgataagctagtgaaacttgaaactcctgattaatcggcgttagaaaacttgataaaaataaataaaacattggccttcttggatcatcagaaacaaaggctttatttagagaagtttagctgtagcttatttcaaaatcgttgatcattaaaatcttctctaaacaatttagattgttataccgattctgagaatccaaaattatagaatttagaaaataaactagaaaccagaaaagaaaaacccagctttttcacactttcactagctagcttattaccagctaattgactacttctcaaaatcttaaattctcttaacagggctaaagttgcccactccctcagctggattgcactagaaatcttgtttctttagttgggctcacctacgtattcggttaatgtttttgttttttgtttttattctgtggaaggcacctgggcgcaccaccacagtccacagagtcacacacatcaataagagcctcattttaaccgttaacacattcacgcttaatctttatcttcatcttgttgaaataataagcacataatgatttaatttatttcataaataaatcatgacattgcatatgtaaactagcatgaatgcatcattgcatctacacatataaactaagtaaaaaaatatgaacagatcaaatatgcgcataccgaggttgccgaaacatcggttgctcagcaggaattacttgcggttgcgggcgttgatgaaagtgcgcaacacgcgagcgaacaggaagacgagccgtcatgtacgaacagggagcagtcgcgtgaagcgcttcccaaaaaccttattgccttcttttctcggtgcaggatgtcgaaggcagaggttccggagacctgctttcccgatcgccggtgtacgccagcgagcgggatggagtagtctacgagcgatggcacggcatagagtaggaggcaaaccttagattgatttcgcgtatgttgcgtgaaggcggtggctcggtttatatagagaaaggtcacttgatcagggtgcccgcacgatctccactccacgtaaccgaaccggataagtcgcgcgtaacttatccggactccacgccgttttcacgcaacggatttttcggaatgtttccaaaacaaacaaatccgaatttcccgcagcaaaacaaaactgcaaaaggaggctacatcagcgcaaaggtgaggaaccaattttgcggaccatttgacgcgtacatcgtgcacgccctgccaggcaagggcgtgcgcgcgtgtgttccccctcttctctccacctcatttgcttcaagtggctaggagggcatcctcccttttaaggaggtcaccctctcctagaataagtaatgtggtactaaacttcctatgcatgctacctcataaggtgggtttttatgattttccaaagaattaatcttcgagtggcctaagacccatctattaattccaacacatcttcatctttaggagattcaaacaccacctaatacccagtgcctgtctttttgtcatttcaccggtttcttttttttttctattcacgatcttgctttttcaggctatctgcaacttggtgattttcaccaaagaaccaaatccaaattgctataaatcacactaaattctacaattaaagatcaagaaataaacatataggtgaattgagccatgcacgatagattgaatatcgcatgcctatggtacttcattgtccctctgttttgtgcatgaggatagatgacttctagcaatcgaaaatgaaatttataattttgaggatgcagacgggtctcattgtctactccttggtttatctgcggtaactaaaatttaattttagagttaatataggtatctttcatcataatctatttttcagcataaagttttatgcataaattttatattttgtatttgtcagtaatttttttatatctatatttttagcaatttaaaatctaatgttgccaacaacgatttgaaaaaaaaaactcaaaatcaaaattttcaaattaaatttaggccctatttagttcccaaaatctttttcccaaaaatgtcacatcgaatctttgacacacgcatggagtattatatatatagataaattaaaaaaataactacattgtttgcatggaaatggcgaaacgaatcatttgagcctaattagactatgattagccataaatgctacggtaacccacatgtgctaatgacggattaattaggctcaaaagattcttttcgcggttttcagggagttatgaaatttttcatttgtgtctgagaaccccttcagatatccggtcaaacatccgatgtgacattcaaaaattttcttttcacgaactaaacaagaccttatatttcaaatttctaacagcggtttataagatgaaatacaaatgatcgttcttttgttattccaatgggatttcaaaagactcattaagtcccaaagtatataaaaaatattcctagaattcacagccgacataaattttaaaaacatttttttccagaagaaaccctacaactgaaatatctcaacgaaaatgggagtactccgtctaaaaaaataaaacataagacatgatataacacatctagccctataaatctaaaaaactcccctgttcaaaaatcataatagtactcttttcgttcaaatataaaaattttgagctaaagatatctagctttgagaataattagagtttcaaacatgacattagtacaagtaaaccccagggcctcaaaatcctttctccgccgccgatgtgaggagaccgaggaacgggcggaaataaaaccccgcacgtgctgctgcagtgagccagtcggtcagccgtcagccagcgccgcctgccgcagcgccaccccggcggtacaagcgggtagtatatccagggaaaagcagcagcagcaaaaaataaagaaaaataaaagtgacagggaccggtgaaaaggcagtgggacgctggaaaaaagagctcctcgcaaaaatgctctcgtgtcctcgtccgtccgtcctcccctgctgagcctgcagccttttgtggaccaccccgccccgcgcaagcgcaacagaagatgaaagaagcacaagcagtcgctactagttcgctaccgcttgcgctggtggtgatggccgaaggaccagaaagaaatacgattcattcatgccaagccagtgttgaggccttgaggaggcccaaagagggcagttttgctgcgggttgggcttttgttgtagcggcgatgaaacgttctctgccttcgctttatttccttatgctgtggtttttgttgtagcggcgataaaacgtcctctgccttcgctttatttccttacgctgtgtttgagaggaggggaaagaaaaaaagattaaaaaaatacgtaaaatgagataaaccattaacgcatgattaattgagtattattaatttctttaaaaatagatcaatatgatttttaaagcaacttttttacatttttttttcaaaaacaccgtttagcactggcttacttgtagtggcgtatgtgtgggtggtttgcatgtgatgatgtgagtttatgcataaatttagatactacatagcttatacttgaagggctgatgcataaaaaaagagttttcatgatgtcattcagagttcaattttgatctcttctactccattgaaaaaaaagatcggttgcaatgcgacaggagagaggttttttagtggcgtgcatgtgattgggaggatgtttgctacagagccatccttagcattttggggtctgtgccaaatataaaggaagagccttatctttagaaaatactattatataatatattataattatatagtattatttataacacattgggttggatatctgcaactactgttattttgcttgatcgaatgcagtcaatggccttctaaccacggcaggaaagccgtcattaatctaacactactttctttagctatatcctattatcaaacaaacataaattgtttttaaccaattataactatagctatatcaaagaagttcactgatctatctatcatatagttaaataaatggttttactcattcatcgtgtgacatatccaatgatccaaaatcattctgtgagttgcatccgacatcacatagctcgccacgctccctccctcccttcgatctcattcccctgaaatcacgcaaaatcacgtctaactgttaacaaccaaatttggtaatccaagtatccgaaataaagataggatcgaagcagaatttgagatggaaattgttccggaaacagagtaaggattggctggagtccgaatcggctgcgactgggatcggcagagtccgaattggacaaagttagccgattgagccgaatccgacaatgtgacacggtacacgttgtcgggttgagttaacgtgcttcatgaggattgctacgcacggattgagtcctgagaaggcaattgtatctattaattaggatatttcatgtaatttccttagagatatgtttgggcaaaagtctgcgtatcttagagtttgttagagataagagttgtatccgacacggacatatattgtaatcttgggtataaatagaccccgagccccatgtaatacaacaatacacattcaatacaatctcagagcatcgccaccattttactttcgttttgtttcgacaagttctcgctttcgggttgagctacatcggtttcgatcttcaactagaggtaaaacttgttgtggcggcttgcgttctcgagattagtgcttccatctttacgatactctaatcttgtttatgtaattcatcgagttaccatatattctatataatctttgacaatattgttatctaacctctagtcggctaacatcttttgctagaaggcagccgattaggttgaataccaacgttgacttagattatatatgatatttaccactctatgaaacatccaacggcttaataccaacgttgacttagattatatatgatatttaccactctatgaaacatccaacggcttgattgtctagatattgttcttcttttcatacttatagctgcatcagttgagtttaaccttataagtcgtgattagaatctcaatctctagcctgcttttggttgccgattagtgtagcatcgggatttcagccgaccttacctgatttaactactttcatctcatatgcttgattgacatgttaaatctgccctttatattaagatcttgttgcatttaagtatattaggcttttgtttagtatattctacttgctttaatatcttaatatagagtagtatcggagtattagccgatacatgctagatctatctgatcggctatgctatgaatatatatagtctagttgttaatatatatttcgatctaagtgatttatactgtctcggcatggtgatcgatctatcccaatcacttgatgtaagtatatattgacataaggattatatattattaatatctatagccgatcgagtagatttagttctttcttattcattcatgattgccgatcgattcacatatgacatcggcctagagatagatgatatgtaatcggcaactagccgatcggctatcatttatggatttaaccgcggtctctttgtctttatttcttgttgattgcaggatcaaattaactggcacgctcacacatctaaaggaaagcttttggacctgcactgaagttaagcagatcccccaggcctcatgttttcacatgaacactaactgcaaaaatgatgccgccgtcaccaccactcggattcggtgcgccacctcgcccgtgagcccctccacacatcggcgcccccctctaccctagcgtcattgttccccttgtgctagcggaggcagtggccggttataggaccaaggtccaagtatgcggcagcggcatatgtgtaggatggattttgttcggtcaggcgggcggccgtgaagcggcgagagaaggatgcggtggtcgaaagggaggcgtccagttagcgttgacacgatccaggcaacaaggtaaccttgcctcgaccgcgtccacgccccgccgcgcgccagtcgctatctgtcatgaccacgttgcccccggtgtcctctctctcctacatcatctctgtctcccctccctctcgtgcatccatggcggcggcgagttcttcaagcacggcagcacatctgacaccctgagatcaattcaatcttacaagaggtaagcatataagaaccatacgattcaccattatcaatatcttgtccaagattcatgcttcatgcgggacgcggagggagtggaggaagaggtcagaggaggtagtctgttcggcacgaaaatctcaggaagtgcgggcaaggagaatggtccctggtgaatccaagtccgttgaggccttaagcagtaacgaaatccatctactactataattgcatctattgtttctgtattgcagtgtgcaacacagtgctgtttgtgtatgcacataacaagaatgaaattaaggttggaaacaaccaaaaagtgtggaacctctttcgttctaagctgacatccgctgaaggaaattgtggcctccttttttctgattccttttctattttgtgctatctttttcatgtaggggagcagctctggtgcgacggggaagttggcagcacatacgcatttcattgagcacatcttgagcgttttagatttcttgaatgttttatattgtgatcagaccaataaggtattcaactggcatacagttttctcatttgggcttaagtgattggattggtttattgtatcttgcaatttgttgtgttaaaaaaatgttatagttttattgctaaaagcaatctatcttttctgtcatccagatgaaagcaattacttgtggtatcttatgttagtaggcataattatggaagaactggattagcatggataattaatggactacattaattggcgatggtttttggtttagttgagttttctatgcacggtatcttctggtaacgatgattgaccttttccattttaaattaagtgaaatgaatcattagggctgctatggacacttgagtacatttgcatgaactatagcaacaaagcctgtgctttgcaagttgctggtatggacatccagtgtttcttcactcaaatcttgcggacacacaagagtccaatttttcacatatttatttttcttttttgtctcgatggacaaaaattacaattttaacaagtagtggggattgaatttgtgtaacacaagaattctccaaaatggcacactgcttgatgagatccacattgtctgaaacttgttctgcgtgatactcagtacgctaatatgaatactaggtttttgtagtgtcttggcttaactatttgtttgggtaaatctaaaaccactaatagtaattttgctttgttgatccatttggggaaataaatgagataggacagtacaatgatgccaggtacgtatcatcgccagaggctatataggattcttggtttcccacagttcgatatctatccaactattttgcagctccaacttcatcttcctaacatacagtatgtcacgtatgatgaggatggtaatatcgaggatgttgtcaatcgttcatcttcttatatggcattaaataatctcgaggatggtttaaatttaaatttgttggatgggcagtatgaacggtctatatgccctaaccttttgttacatattgggaaaaaaaagctatgtgtagagatcagatggacttttcctgtgcgaaactctggattatgattcatgttaggcatgttttttaaggttaatatcacacatctctttttttttttgccttgtgtttgataaatagtttatttcagtattagtttgtattcatattaaaatggatattccattttaattttttttatgtataactcttcgaaccaataaatttatttgtctaatgcaaggtagctaactattcaaatttcttagtaccttgtcgggttgtatcatacatctctttatgcgtgccttgaaaattactttatattatttttatttattttataaataaatgcatttgtaggatattaataagctaaggcaacaatttttgctacatatacaaatgtaccaacaaaatgagtgcgaaagcaacattcctagcgatacatgagtgtcagggttacggataaggcataccttctatcctacgacttatggaatataccaataaggcataccttcacgtacatggattgtttccgtatacgtcgttaggaatttatcttaaattacggaaaatatccctatgagttaagaaactaccaaagtcctactcggagggggatagaatctctgttatatcgtatcagattacatacctccaggccttacttggggttcaagataatccacggtataaaaggggacccctagggggaggtgaaggacatcgaatatcatcgccaacacacccaccatagcttacgaagccggagtattcggagccaagtcaccgggagatctcgtcgaatccatcgactacgatctcgtcggtatcgtctgttccatctactctctttgtaatctgttctcatcgtcatcaatcttatataaactggactagggctattacctgttagggggcctgaaccagtataatccttgtcttctgtttgcttgatgttgtactacgtagaccctcgttccaatgtaccccaatactcaacttatccggtccacgagtatcactcgtcgacagtggcgcgccaggtagggggacttggtgctcaaggatctaccagtatgacttcaagacttcccgacaacagaaccatctccaacgtcaatcaaggagcttctacctcgacatcgttggtttggactcaagtcggatccattgtctttccggtctataccgttacgccaatctcggctggcccaatcatcatcgggaatgagaaaggcacggtaacgactcagagaaacgacgccccgccgataattcctcccactcaggtggagaatggaacatcgatggccccaacactcgggaggaatcctcaggcggctgaattttgtcccccatacaaaagatcagagccgacaaggatgaccaccctaagaccgagatcttggtgtcttgtgcataagacatccaagcatactcttgaggactgttcggtgatactccatgtgcaagctgaactctacgcctattgggaacgtgggattcagcgtacttcatcgacaggagccacctactgtccgaaacatagatccagatctcatgatctcacaagctgcagaatcttcctcaggaccctcaaaccaccgcatcatcgtgtccaacaaccacgagttcaaactccgtgcgttgccaaggaaccagatgcagccccaatcccgtatcggttcgtgggatacatcggtgataacgagccatctgttttacacctcttggaaggctacgaatcctcttcggagtcaacacgagatgtaaacgtggtcgacaacactgagacaagcgcgtccgcggcagagagaacgcccgctcaccagttgcgaaatctagacgcgatattgagggaaagtccttttgatccagcgacaaacccagacgccggccaatgggtagagcgactgcgagagaccgtgaccaacctcaatgccgcgtttgccgaagcagcaggtggcccagaaccgcgcaggtacgaagaacaacctaccgaggacgcggatggagaaaatatcgccagaggacgtctcaccggtgaccactcacctcggcaggaatgagatcctactccgccatgccgcgaaaatcgcgatctccgtgagcaggagggatcgtgacaacaacgactgccatcgacatcgctctccttctcgtcgtgagggcgacaccacgcatcgacaacaccgtcattgctctcctccgtggcaagaaaggaaagacggccgagggaacacccccaatgaagaccgagactgtcgactccacaatgaccgacgcaacaacgacaaccaccgagatcaggggaatgatcgccaaggccaagagcgggacggtgacaaccagcgagatcgaaactcccaatctccacacccgagtcaagattgaggacgcgatcatcactcgagaagccgagctcctgagccaagcagcccctcgtcctcatctttgtcatcttcttcatcagatcggcctcctcaacggcgtcgcaaccacgggccacccccccgtcccaggaagtggatgcagggcattcacgcccatgctccaaaacgtgcgatggcctgagaagttccgactgggagcgatggagaaatatgacagaagtacggacccagaagaatttctgcaagtctactccacaattcactacaccgctggcgcagacgacaacgcattggctaattatttgcgagccgcgttgaaaggctctgctcgttcatggcttgtccacctcccgccctgctcaatctcttcgtgggaagacttatggcaacagttcgtcaccaactttcaagggacatacaagcgccacgcgatcgaagacgacctgcacgctctaacttagaacccgagcgagtcattgagggactatattcgacgctttaacgagtgcaggaatacgatccccaagatcaccgatgcttctgtcattcgagcattcaaatcaggcgtccgagatcgatataccacaaagaagctgacgacgcgccgaattacgtctgccctaaagttgttcgagatcattgataggtgcgctcatgcagacaatgctctgaggcgcaaggagggaaaaagcaaagcgggagaggagaagaaatcgaccaataaggatgcaccagagtcaagcaaaaagagaaatcgcaagagtgggaagtgcaagtcctcaggagaggtcctcgccactgagcaaaaggaatcacctaggcgccctaacccccagaacgacgactcacgcaagacttggtgtccaatccacaagactagcaatcacaccatggaggattgttacgttatcaaaaaggagctcgcgagacaacatgcaatcgaaagggggaagcgagtacgtgttgttgaaacggcggaagaagccgccaccggtgactctgactccgccttcctagagtatgacctacatgtctcccacatcttcggcggttccacgttgtacacctcaaagagggagtacaaaaaagtggaacgcgaagtctgcttcacgtcgcagacgagtacaaccaagatgaagtggtctcaacacaagatcgaggtcttttggatcaccccaagatcgcgactacgcctgacagatatccaactgtggttgaacccactatacggaacatcaaagtggcgagagtcctcgttgacagcgggagctcaatcaacctactctttgccagcaccttagacgcgatgggaatacctcgaagcgaactgacgcccacagatcagcccttccatggaattaccctggaatcatcgtctaaaccattgggcaaaatcacgctacccgtcaccttcagacaagctgagaacttccgaacatagcagatcacctttgatgtcgcagaattcgacaccgcctataatgccatcattgggagaactgcgctcgcgaagtttatggtagcgtcacattatgcttaccaagtgctcaaaatgccgggaccaaaagggacaatcgctatctaggagaacgccaagttggcggtatagtgcgacaagcggagtctcaacatggtcgagcatactcccaacccgcccgccacaaccaattcggagtctcccatcacgattagtcgcttggcgccaagtgcacaaaggctacaaatgctctagccctgagttagccaaatatctcgccgaggttagaaaactggaacgcagattcgatgggatcgaagttcgacatgtctaccgaaaagacaacgtcgaaccagacgacctcgcacaacacgcttccaggcaagaaccgcttgagcctggaaagtttttggacgtcctaacaaaaccatccatcaaggacacggacaacgaaagcaccacaactgataccggcgtcccgcagggggctgcagaggtcacaaacgtcatcacaaatgcagagacgacaaacgactggcgcactccgctaatcagattcttggagtcagacgagctaccggacgacacagatgcagagaaactgtctcgtcaggccaagatatattgtatgatcggcaacgatctatacaaaaaggaaccaaacggaattctcctcaagtgcgtatcatccgacgacggaaaagctctcctcctcgacatccactaaggcatttgcggatcacacgccggcgcgcgtactctggtcggaaaagcttttagacaaggttttttctggccaataactctcaaagacgcctgtgaaatagtgcaacgatgtgaagcttgtcaattctttagcaaacacaccaagttgacagcacgagcgctccagactatccccttaacatgtctgttctcatgctgggggctcgatatactcgggccattcccacgaggacaagggggctacaaattcctgtttgtggcgatcgacaaattcaccaagtggattgaagcagagccgacaagagaaatcaaagtcgacaacgccataaaatttatcaagggaatattctgcagatatggattgcctcaccgcatcctcacagataacggttcccagttcaccagcggtgatctccaagattactgcatcaaactcagagtcaagatcagctttgcctcagtatctcatcctcagagcaatggacaagtcgaacgggctaacagaatagtactccaggggatcaaaactcacgtgtatgatagcttattggctacgacgcaaagtgggttgaagaactctcgtcggttctatgggccgtacgaactacaccaacgacatccaacaaggaaacacccttctttctcgtatatggatctgaagccatgctcccaacggagctacaacatcagagtacacgagtacagaagtatgctgacgaggaacaggatgaaaggcgaagcgacgatgtgaatctactcgaggaacatcgagaacgagttgccatccaagcagccacatatcagtaggccctacgtcgatatcacgagaaacacatcagagctcgcacacttgccatcggtgattatgccctcctacgagttcaaaaccaggcagggcgtaacaaactctcgcctaagtgggaaggaccatacacgatggtgcaagtcctgcgaccaggtgcgttcaagattgtagacggcgatggccgtgagttatccaactcttggaacattgatcaattacgtaaattctatgtgtaaagtcaatgtatctcaaatatatacaaaccgactatccaaaggtattttgatttcttcatgaaatacattagtgttcttcccggagatcccttaccacgataacacctactcttgaaatcgaacctactgaccctttacgctgtttcgacaagcttccgagaaacctacgagaatttcgactggggacgcccagagcagataaggtcttgtcagattctaagagccgaacgaccatgtaagacctagtcatgtaagagttctcaaaaggtgtattaactaagccgtgtaatcggaaattgatttttccaacttcacggctaggggctaggtaaattgcattttcagctaggcaggttacgggtcatcgagccttcccctccgagaacaggtttccccgaggacaaggcttagggctagggagagtacctcactcgacaacgggccaaaggcagcctgtaaaaagagtagtactcgctcacaacacaacctgtttaagcatttactagatagatttctactttgattacaagttcttaatagagataacaatgtattataaacccccttttagatatttttctatagggaatgaagcctaccacgacggccactgccagttcatggaagcgaaaacgtcctcggctaaaggagcaagggatcacgccaactggtcgatctcatccgccgataaccgagaacggcgaaaacccccgcgcaagaatctgaggtacatttgcgagcggcgatcttggatgcaggcgaggacgtgacctccggcgtaacggctggcgcggcgacactcctcttttaggctgatgtcgatccactgtccaatgccttcaagctgagcacactgttgatagtcgttatcaatcagtttcgaccgtcaatattaccaaaatagaggagaactagtgatggttgcaatgcatatgcttgttagaataataatattccactagtattaggtttactaaccttttgcagagaataacaataaagtgaaggagaatcgagatcaactccaatgataaatcaatcggacgatgtcgagaaccaaacttgtgtatgaatgggccaagaactcagaattgacacgacaaactgggccaaaattcacaagtctgcggagaagaacaacagaggaggctgccagccaaaccttgggcttattgggccggccccaggatcggccgaacctggtggttcggccgaacctggtggttcggccgaacccccctcttcgccgctggatgcagggtttcttctggacagtgtggattagctcccaatgacggttggagggtatttccgaccattccaaccgtcacaaccgtcattgggaggctatataaacccctcaccttctcacttcactcacacacctcaagcaagagctctctcgttcctctcaagtttagtttagtagtatatagctggtggaatagaattagaataggaatcaggagtccggaagccttcggaagagttcgggtatggctctagtagctttcctttcctcttttgtaagctttgtacttttattagaatactcttctaaatacatttctggtattgaaatactttccgagtatatgagtaccaactttacattatgttcttgttatactgaatatattgctagcttgtctgggagatgcatgctttggtgcgggtatagtgtttgcttatgcaattactctatgtcatgacgatgatattagagtagtatctggtagtttagacgtggtgtctagattacaggatatcattatttggggttatatattgcggatgagaggtgggcctctgatggtgacagctcagtacgggtattcctccacgcctatatataatcctaagttaatttcctggggagggtactcctccatatttagccccagttggatggtcatgacgagctgtcgtaaggaactaggcagtcaggggtggcttctcgaagtaccaggagggcatcggatagaaggtattagctagtatatcagttaactagaatgtatgtatactatgtatattaaaagtatagaaatagattctctttctcttttcttttcgcctagcttagattatttattatgagtagtaatgcatgtgtgtcactctacccttggattatcttaacccctacttagaatatgattatcacaagtattatataaattattagttgagttctctctacgtgatcttcccacgggataaaatgaatacgatacccttggaatactctcaggcgaaatgctacaatggtatatccatgcgcttgcggatgaactctgtaaccataatataccagaagtatttctgcgccattgctgggaattatatttctagtaatgtcgttaagaaataccaacacacacgcccccctcagctagaacaagtagcccgtcgtgttctcctcggggtccgcgcgatcgaccctcagctggtggtagatgtcggccatggcattacaacagctcttgaggtacgagttcatccagacctcgcgacctcggagagcctccacggccttgtcttttttcacgaccacgagcgatagcccaagttcggtgacctcaaactttgtcctccaagaagcgatgcgtttgtctcgttcggcgatgacaccttcgagatctgcgaaggacaaggatgtaggagatgttgcctccttaataagataataagctcaaagggacaatttctctatgacatcacacctgagttctcgcgagggagcccgactatgcccggactaaacgggccagaggccgcgcccacgcctccgagcacaaccgcatccgtaacgacatcgggagcaggcatatcgcccaaagagggcaagtcgatcatcgcgacatcgggacatccgcattgctggacatcctcggaatccacacagctatgaagaataaaagacgctacagattaacaagtgacgtgaagagaaggaagtcactccgcctaggagattaacagaagtacttgtacaaaaactacaatacaaggtaaaaaaaagtttactcctcataaagggggaggacgcactccccgagatccatcacactagagacatgtcctcgcgcgtggcatctgctgcccccttcgacaagatctccttgagatcggtgacagggagagccagcttcacgcacgcgaggacgtgacacgccctgtgtgaatcccgttggagatttccttcgagaccttggcagtatgccgcgacgggatgacctccatctcgcccgccagctccgacaacgccaacgtcaaggacgtctcgtcgaggtgcgtcgggatagaagacatcacaccacacgccaaggctagctggtgaaggcctatgaagctcttgcggagggagtcgcggagggagaagaggtggtcctgcaggtcgttcatcttcttctccaagccctggtgctgcatcttgttactggccacgatctccttcatcttttgaaggtcgtcgttggcgacttcgagttcaatctccagccgggccacctttccgtccgacgctgttgcacgggccaccgcgcgatccatctgggccgccacctcccgagaagtgttctcgaggaggcggcggcactcggccatcatatcggaccaagttgttagttcgggcgacgacgcggccacaggcgcgacggcaggcccggcggactcagtgacaacaggagcgacctccacgcaaggaatgacaacggcaggaaacccactggtcaccgcctagtccccgctttgcgcggagatcgccgaggctttcctgccaatgtcaggggacatcattagtaaaacttacagatgtgacgacgaaaggagtcaagagtttcacttacttgccggcgagcagctttagcacccttctcttcggaggaggagcgagactgctcgtatcctgagtaagatggcaaattatgacctcattctaacacttcaagaaagaagctaaaggacgacaatgatacgccttacctcggagccactagatttctgtcgagaaccggcgggagcgctcgacctcgcccaaggcttcctctgggtcccgctgcctcctgcgatggctggaacggaggggatgttggcgacttcgtcggcatccttgtccttcaacgaggcggaggcctggtggttgacaagggggccgataacgtccgtcaacggcagaacctacaggagttgaagtcactttgcgccttcagggaatagaaacatgaggaggtctggttctcatttacattgatagcagccgccttgtagactgccgacttgccgcaacgcggagccggtgtttcatcgaccgtagaggaaggactgatcaagacttccttgacccgctgcgccacgatgttggcggggagatctgaaataaatgaagatatgagaggatgagttaggctttggcctcgaaatcatcgtcgaaagcaggaagaagattacaacataaggacaaataccccgcgaagagattcgagttatatcctctgctcccgtgtagtcgaacacggggtgagcacgggcttgtagcggttggatccgaccgctgacaaagtccttaatgacttcatagccggtcaatccttgctctcgaaggtcgctcacagcgttgacaaaggcttggagagagggtgtcaacggaggtttagaagtccagttctcggaatgctccggctgaacctcgggtatgacaagaaccggttcaagttctttgagctctagatagaaccatctcgacctccattggctccgggatgtgtggcattggaaagagatgtatcttgccttcatgccatcacgaaggcgaaaccatcaacatcttgaaacccgattggcttccatccaccggagttcatagaaaaagcaaaaaagatctaagaaaggcactacctcgatgtaggcctcgcaaaggtgagcaaatatgctcaaaaaggcagtggagttggggtttagatgcaagagagaaaggccgtaaaagttcaagatcaataaaaggaatttagaaggaggaggcaaaaaaccacagcggacgaaatcctctagagctaccatgcgacctaggatgggggaaggatcaatacctcttgcttcccaagccatggtctgcttcagagggacggccccctcggtgtacagcttcttcagcgcgccgcatcggagaaagattggtcgaggtccgccatcggaagaagatcgtcggaacaagatcgccagtgggagacgtggaagattagggattttagggaaatggaaagtccgaggaagccgaggaacagtgagggttttttggcaaacagacttgaaatggatcccagaattccattaaataggcgcaccacctaacggttcgtattttgaggaaaggagagagattgccgccgaaaatttctaaggcccgttggaggtagttgttcagacttcaatttaaattcaaattttgcaccgttggactccctctagcgttgtcgatagctccatgtctctacggtcagtaaccgagatcgacctagcgagcacgacgagacgctattaggagaagtcgtgggcgacaacatgaattcatttaagttgaagtcgggggctactgtcagggttaccgataaggcataccttctatcctacgacttatggaatataccaataaggcataccttcacgtacatggattgtttccctatacgtcgttaggaatttgtcttaaattacggaaaatatccctacgagttaaagaaactaccaaagtcctactcggaggggatagaatctctgttatattgtatcatattacatacctccaggccttacttgcgggtcaagataatccacggtataaaagtggacccctagggggaggtgaaggacatctaatatcatcgccaacacacccaccatagcttacgaagccagagtattcggagccaagtcgccgggagatctcgtcgaatccatcaactacgatctcgtcggtatcgtctgttccatctactctctttgtactctgttatcatcgtcatcaatctcatataaactagactaaggctattacgtgttagggggcctgatccagtataatccttgtcttctatttgcttgatgtcgtactacgtagaccctctttcaaacataccccaatactcaacttatccggtccacgagcatcacttgtcgacaatgagaatttcttaagtgtatcctaaatgataaacattagggtagttatttatctacggggtatattctatatatgtatcaaatgctttatttttgtacttgtttatacccataactatttaatggaataactctatacttttaacatttttttagaactttaacatattttcaaacgtatatcgccctcgtatattgtatattgaagtgattatatgttactaattcttgccaagatttattctacccacacaatatcatattattataatttgcgtgaaatatatttgatatacgacataaaattaattaaaactcaattgcacagatcatataaaatactttttgctaacatgaaattttaaaagttattaaagataatagaatgcacagtagtgtttagcatgggcatattactagtatatgtaaatgactaaatgttatggctatttggctaaatagaagaaaaaatgttgcaacaatatatacagttttcagtactacatatgaaaatggagtccttattacctagaaggtatgtttacattatcacgagatatagtttttttatatatattcatgactgccatcgaatacttaccatagtagataaaagaagtagctccttctagctgacttagtggagaaaaagaattaaattttaaaaaacaaaaccaagagattctaaatatatcggaacgaattagcttaaattaatacacacgtgaccagggacgggctgttcggtggctcctttttttatttttgaggaagacctagtattcggtatttcgttatatttcattatagatatgtactatttttaaagcttcgattagactaatatgagtgctcattcatacgatggaccgggctgtgactgtgcgcactgctctgggtggagagcatatatattgatcgatcttatttatttttcatgagaaaatataacatttatttatggcaagacgttattcacgtcaactatggctgtgttagggagtagcactctaaacaaagccgcatttagcgcataattaattaagtattaactaaaataatttttaaaaatgattaatatgttttttaaaacaactttaatatagatttttataaaaaatacactatttaacggtttgaaaaacatatgcgtgaaaatcgaggaaagtgagttgggaaagtagagataagaatttaagcatatatctatcagtcaatgtggtactccctccgtcccaaaaaaacaaaccaaaccatgtgttttcgtgtccaacgtttgaccgtccgtcttatttgaaaaaattatgaaaaaaattaaaaaaacaagtcacacataaaatatcaatcatattttatcatctaacaataataaaaatactaattataaaaaaaattcatataagagagagagtcaaacattggatacggagactcagcgtttatttttttttttttatggagggagtatatagtagtacaacaatgcaacagccaatttccagttcgatcaggcgtgtgcgtgccgttgcgtccagctaaactccacgacttagatgtcggctcgtgtgtcaaatgcaaaattctcaagaatctgccgcagccgatcgatttcatcggattcttcgtggtttgcgtacgtcgtgcgttgtactatcgcgtgagtgctaacgagcgcacatccaaaaaatagaaactgatgcagttctcccgtacgcgtcttttcaagaaaaaaaagaatcgcgcaacgcaactgcgatcctacccttgtgcgtgagtttttcttgctagcactctctccgtaaaaaaaatcaaactcgtagtacgatgtgacatatcatatactccctccatcgaaaaaaaaggcaaatactgggttttcgtatccaacgtttgactatccgtcttatatgaaatttttttataattagtattttcattgttgttagatgataaaacatgattaatactttatgcgtgacttgtctttttaatttttttcataatttttttcaaataatacggacggtcaaacgttggatacggaatcccaggtgtggagattatgggtaccacatacccacacggcatggttatccgactggttataggggataacttatatctatgaaatatgtaacagatcatgacttgggtattacgttttcccgtatattatggaatggcctaaagtcctggtttgataagattgtaaagtagatttaggaaaccgataccgtattgattaaggtttctatcttgtaatcctgcccccatcctatataaggtgggtaggaggccctctagggagcatgagatacaactagatcgtcagatctatactacacccggcggattcaaatccccaaacaggagtagggtattacctctcattgagagggcctaaacctgtctaaatcctttgtctccgcatccatccacttttaggtctcgtgcgctaccccttttattattgcctaattcatgtttcgacagttggcgcggcaggtaggggtgcgtcgaattacccatcgaaaagtgcaatggaatcaactgcagaagaaacggcgagatcaatctcaccgacgtcgatggctcaactcttcaaccgggtttgtcgtttcaatctatctagtgttttttaacaatgtctatgacagattgatttcctggtgtactattattattgtagtactactgtcgacgagatcgtcgatagcatatggagccacctgggagtatacacggcatgctgcaacccctgtcctcagaacaggcgtagtgtgcggttgccggttggttgcgaatgttttggcccggccgactgctttgattgccaaagtaacagtctagcacgcttctcctcgcggcgacgtaatcaggggcaccggaacagctgcgttgatcgcatgcatctactgatcaccgccatatatgcaagtatacatgctggccaataggccaaccaatcaggagtcctgcgtttataggctgctaccaacatgcacaggcttgaatccaattattcaataagcagctatcgacacatatgagtcaattaatatataggagtgtatgtagttgtatgcatgcatcttcttttgtttactaatctgatttgactcgtatttacatgtacttccatggatcgatggccatggccctgagatatcgttctgatccaacaagccggtaaagcaatccttctactattactgggtgggttgtcttcatcaccggccacacattggagcagctgcctacaatttaccagatggtgatcatatgacaaatatcgtcatgcccgcaactggcgccgtcaactcatcgagttttatctcttccaacttattattctatattattagattgatttctaatttcagattaatctcttgctatttttgttgttgtttgcatataattacacggcactactgaggcgattggcgttggtcatggactcgaggtgtctcgctatgcgattagttggccatgagtctactccaccggcttgccttcaccactgccgttgctaatggcaacaacgtcttcaccgccggcctgcctccgtcgccgccgactggtgtcctcgcctatacgattggttggtcacaccaccgttcatggacgtctacgtcttcatcgaccggctggcctttgccgccgccgactggtgtttccgcctgcacggccggcctattatgccgccgttgttgggcgtcaacgtcttcaccgccggcctgcctccgtcgccgccgactggtgtcctcgcctatacggttggttggtcacaccaccgttcatgggcgtccacgttttcaccgaccggctggccttcaccaccgctgactggtgtttccgcctgcacagccggcctattatgccgccgttgttgggcgtctacgacttcaccgccggcctacctccgtcgccgccgactggtgtccttgcctatacagttggttggtcacaccaccgttcatgggcatccacgtcttcaccgaccggcgtgccttcgccgtcgccgactggtgtctctgcctacacggctggcctattatgctgcatttggtgggcatcttcgctttcaccatcgaccaccttcgtcgctgccgactggtgtctttactgttattgatggacgactttgttcccacattggccacctctgccatcaccaaggggaatattacaaagctaagtcatcattaattttctttatatgatattttccttttcctctgcctcactacatcaactggttcgccgttgactagtgagtcgggggactatagatgtcatatcatattttttaacaatttttcataatatttatcttgattgcttgcgaaataatccgagtaacaataaagttcctatcgagttatggagttctattttcctatgctttccatttggtttgtcgatggatagttgcctttgggccgattcctagcacccgggggctcgttggatggaccgagtaacgcaaggtcctaagtattattcggaataaatcaaaagcatagagataagataaatttattttctgctcttacaattgcaaaagtacccgagtagtaaattttgattcgtgaaactttgttccattaatgacgaactcatgtcactcatatgcatgtttgggaagtgcctaaaccaactcccgatgcttgggggctatgactagtcgggcagagtgtttaaacgtacggagtcatctgctcggggaaatcaaaattgacaagaggagaaatacatatttataaatattttaaaatacttgaatttttctcaagtactgtgcttgcatcagatactactcattctatatgtttgttctgcaggatccagatccagatatgcataatagggatttatagctttaagcttatctcctacgcttcaggaatggattagtcagaatatcaccattggcttgctgtcgtcgtcgccgactggtgtcctcgcctatacggttgggtggtcacatcaccgttgttggacgtcatcgtcttcaccgccgacttgccttcgccgatgtcgactggtgtctccgcctgcacggctggcctattatgccaccgttgttgggcgtctacgtcttcaccgaccagcttgccttcgtcgccgccgactggtgtctccgcctgcaccgctggcctattatgccgccgttgttgggcgtctacgtcttcaccgcctgcttgccttcgccgccgccgactagtgtcctcgcctgcatggctggcctattatgccgtcgttactgggcgtctacatcttcaccgaccggccacctcgtatgacaccgactggagctatcgtattcacggctggccatatcgccgccgctaataggcgtcatcatcttcaacgtaagctgtctacgtctgctgctgactggtctcttcacttacatggctgcatgattctgatactgttgattggccttatcgtcttcaccgccggtcgtctcgtctgctgggattcgagcccaggtctccacgaccacaacgtggaattctcaccactaaactactgccgactggtttgttcgcctccatggctgcgcgtcttcgtcatcattaactgggtcatcatcgccgtttgccttcgccgccgtccatagtgttttcactttaatagctggcctattttgccaccgttcatggacatcttcgttttcatcatcatactacttctttcgtcgccgactggttatgtcgccgctgactggtgtgtttatcttcacaactacacgccttcgctaccgttcgcaagatttgctacttcaccaatcacgacatctacaagagcttcgacatctcgacatgcgtcaccaaatatgatgccttattattttactatagcaagtggtgttctaatcatcaatatttctactcggacatcttcaacacgtatcttcactcaagcaatggctactcgacgacaagctagagttctcgactctatgttcagttgttttccaactaaccaaagagtcgggggctacacaaatacaaggctcaaaatttgacatgttttttgtcaaaatgaagcaatcaatgaatcaacaagtaaattttgggagttattatcttggtcttcgcttcagagccgacattttacttcagcgactctagttatttcgtcgattcaacgagttggacaacatcatctatttttcttcaagtgaagcatcttctacagctacaacaccaagttctactgtcatcttcataaatcaagaggcgttgcatcaatctacattacgcgcactctagcgtcaacgaaattactcgagcttcgatatcttctcaacagtttgatggattattgtcactgacctcattaccaacgcctctactttatcggccctgacgtctacgccattgctaatgggtgactacgtcttcgccttcggttgcttacgtcattgccgacttgttatttcgccttcacggttgacctactacgcaaacgctgatgagcgtcttcgtcattatcattagctgctacactgcattgactggatcaccgacttgtcatcttcatcaccatcctgtcaagcttcttcgacatagcctactctactactatcgatgggcaacttcgtcatcatagtcgatcatgtctgttgctgctaatcgtcattaccgtcggttgcatttgccgtcgccgactattttcttcatcttcatgattgatggatttcgccattgccattgatgagcgtctacgttttcaccaccggcttgcctccgccgccgcccatggtgtcttcgctttcacggctggcttattatgcctttactgatgggcgtctttgtcttcttcaccggctgtctcgtctgtctccgactaattatttcgtcaccatggctacaaaactccgtcgctattgctgggtgccttcatcttaattgttagttgatctgtctgccgccgactggtttcttcgcctccatggctatgcgacttcattacctttgattggtatcattgtctttaccaccaccaacatcttcgtcagctttgatgggtgatatcatcttcatgttagtcatttcgtctccatgtcgactgcatcagctattgccaatggacaattttgactatgacagaaggacaagctatatattctcaggggcttatcaactcaaacactaggatcataccttcaagttggattttgttctgagattattttctatgctcgaagactgaaccaatcattattctccgtaagggctatcaaccgaatacttgcgccagtcgggattcaatttttatatctattttggagtatcccataagggataatcactcagatcagaagctattcatatgagctacacttggtctatattacccggaagatttattactcgggagcatgttatatgcgtcatcctttaaagggtgtcgaaggcatttttttttggcctaggcctaatatgtttgcagcccatattttcatgtgtggcctgtcacgttcttttagggacttaggcactttttgcttaggccaaagtgtgcgtgatcaagtgcccaatatcttaaaatccttttataccgcagttactcaactttttaggagttggtacaatgcatcttaaaaggtgtcaaacagtaaagctttatatagctgttccgctgacttttttatataagtcaaggtgttgtttgggtttttaagcaatcgattggatacaatatcattgctttttgccacgtaagtgtgcgtttttattgaccaatattatggcttaggctgattatatatcttggtcattttccaggcggttggtaaatcctttatgagtttatttactcggattttacaccacatatgccgtatatttccgggtgtggtgaaaccatgtgtcttttagggacttaagcacatctgttaaagcagtgtgcgcatggcgtatgcccaatactttggaaatttctttattcacaacattcaagcttttttatagctgttttgctatgtgtattttcaatgatgtagtcaactttaggttgctctcatcaatttttacaaagcaatcggtatatcacttggatcatgttattcggggattcacaccgcatatgctatatatcaagtcatttggttgattacaattatcaaaaccactcggttggttggattatttattccttgactatacgcttagtttgttcagctaaccacatagtcggaggctacacctattaggtgcatctagtcgatgcacctaactttattttccaaccctccacagtctagtcgaagattatcttttcgactatgaaggtctcaagggctactatggagattatgggtaccccatacccacacggcgtggttatccgactggttataggggataacttatatctatgaaatatgtaacagatcatgacttgggtattacgtttccctgtatattatggaacggcctaaagtcctggtttgataagattgtaaagtagatttaggaaaccgataccgtattggttaaggtttctatcttgtaatcctgccccccatcctatataaggtggacaggaggccctctagggggcatgagacacaactagatcgtcatatctatactacacccggcggattcaaatcctcaaacaggagtagggtattacctctcattgagaggacctgaacctgtctaaatcctttgtctccgcatccatccacttttagatctcgtgcgctacccccttttattattgcataattcatgtttcgacaccagagtttgtcttttttttttggaatggagggagtgttcagattcattgtactagtcacattatagtactagggcctcgtttagttccccaatttttttcccaaaaacattacatcgaatctttgacacatgcatggaacattaattatagattattttaaaaaaactaattgcacagttagaggggaaatcgcgagacgaatcttttgagcctaattagtctatgattagccataagtgctacagtaacctacatgtgctacagtaacccacatgtgctaatgatggattaattaggctcaaaagattcgtctcgcagttttcaggcgagttatgaaattagtactttcattcctgtccgaaaactccttccgacatccggtcaaacattcgatgtgatatctaaaaattttctttgcgcgaactaaacaggccctagttgtctattttttttgggacggaggaagtacttgcttgtgagcctttttgttgctatagcccaaattaccccgtgtccgtggcccatgaaaaccagtcgcttccgtcctcctctgtgtgtcgggcatcatgtaggaagtctaggaacgtatttacacggtgcacaaaacactcatcaattctaattagtgcacacattgtttaacaaaaaagatatagcatatcttgtcatcaatacaacgaatctagacaacgggtagtctagattcgttattctaagaggggtcgtatccccttagagattgagttttctttagaacggaggaaataggtggcagtagaaggccaaaaagaagagggaggtggttcagcccatccattgaagcccatgtttgtcagccaccaaatctatgaagccaagagtaaaagattattatctgtcttatagtccatgcattcctccataaaaccaatatatgattcatatattgatcataattcctcgttactagtaattcgctagtacagttgaatgcaaaatatattgctgtccactgctataaggaagtaagctaagtattgaaaggaatacgaattaaaagtaaagagagaaaaacgataggaaattcaaacatagatccggcgagttttctctgaggtataagagattcggcaatctccactaatactcgttggagcactctacacaaagagtacactgtctctgatagtcacgaagtccattggcgctctcatcatggtggttcttctccgctctgaaaggtgaaccccgaaacctccacaaccacaccggctctcccacaatcttcttgacagatcaccgggttgccttcgagactggctaggcatgccaagatgccaatagttaacaggaagagagccactcctcctgttaagaacaggattcttgttggtgcacactaagccactcttttttgacgtgaaacagtaggaaaatataatttacagggagggtggcaagcaccagaaaaaagcatactctcaactcaaactagcactaaattagtgaagaaaattatcacaattagctcaatgatgctcttagactctcccatcaattgctcagctcaatagggttccaaaggacaccggggagtcaagccaagggatgtataaagccccaatcaagctccctagcggtttgcagccatcgtaaagaagcagccaaaactgcaaatcgtcaaacagtatggcaccgacccgaactattctgcccttcatacttttctgattgtaactgggcaagtagttgttgggccataaagcataggacaatccaacatctcctagattgcccaggacccctttgtccacacggtgtcggacaatccgcaatgttcaaaaaccaatgaccagtaacaatcgaatgaacatgccagattaaccgacgtcgtgtcgaactgtccgctagttgccaaattaactaggcatcagacaattcgagagctgccggacagtctagccagttcatttccactatctagtcaacatggtcagacaatgaactggctgaggatgtttcttttgttgcgtacatatgattgtaaggatgttcagtgcagggttgtccctagtaatttggggcctcgtgcctaatataaaataaggccttacctttagaaaatactattatataatagattagaattatatattatttataatacattaggtgggtatgccctctcacagctcatgagtcatgaggagaaagagcggatgatgggtcccaatcatatgattctcacaactagcataccccctcatctactctaaacgaacctttggctgcctattgcattcttaaagtaagaaacaacaataacaaacaccttccctgaatcgagtggacctagtagccagagtcttagatggtacaaagaagcccatgatgaggaggaggtagtccaatccctgtattgaaacctatgttattagtttttttttaaaaaaaaggaagaaacatatgctattaactattagatgtactcacctattttacctttgtattaatatatttgccgtatagttgacgcatttcaatgtaaaccagcgattcaaatattgatttttttgaaagatccaaatatacaaacgttactaccaatctgtcgttgaagataagtcaaaaacaaattcccatccacctatttaagaaggtggacaagtggatggttggtaggcccaccaacgtgccccctcacacctcctgagtcacaaggataaagagcgaacgatggagcctactcatacacttctcacaccttgcacacacaacacaacccatctgttttagccggacctttggccgctgcactattaaaatgtagaagtagtgcaacccctattaaaacccatgttattaaatactatgtctattcaaccacattaatgttgtatttatatttttctctatagtcgttgtattctaaagtaaacgagtgattcataaattgaatataatttttcaatagatccaaatataaagtctaacaataatttgtcactacatatgaatccaaaacaaaattttcatccacccatttaaggtggaaaagcggatggctggttgccccaccaacatggccttcacacctcatgagtcaatgaggaagagtggatggtggatcccagtcatatgactccgacaactaacatacccactcatgtagtttagataaacctttggctgcctagcaatatcaaaataaagaaacaatgttaacaaatacattccctgaatagagtggacctagtagccaaatacttattaggtggtataaggaagtccatggtaagaaagaggtagaccaattcctctagtcaaacctatgttattcactattaggtatattcatgtatcttatctttgtgttaatttttttataattgatgaaagtaaaccaacgattcactaacagattttttttgaaagatccaaatatataaaggatactagtaatttgttgctaaagattagtccaaaattaatcacctatttaagaagttgaaaaagtggacggttggtaggcccaccgacacacccctcgaacctcatgaattatggttgtgtttagttcacaccaaaattggaagtttgattgaaattgggacgatgtgacagaaaaattggaagtttatgtgtgtaggaaagttttgatgtgatggaaaagttggaagtttgaagaaaaattttgcaactaaatacggcctatgattaggaagagtgaacggtggggcccactcatatgcttctcataccctgcacacccgcccatatgttttagccggactttttggctgttctgctattaaaagaaagagtaaatcttccacgacgtgtcataagcaggatggcatgtactaatcatatgcctattataactagcatacacacttatctagtctagaaaaacctttggctgcctattacattctaaattaagaaataagtaacaatagtaaacaacttcccttgaagacctagcgtattaataaggaggtagtccaacccctctcgttgaaacctatgttatttaacaattagatatactcacctactttacctttgtattaatatctttactgtataattgatgcaatcatcacatattgtatatatatatttttcaaaaggtcccaatatataaagacaacaatccgtcactaaagataagtcccaaaagaaatttctatctacctaactaaaaggggtaattgcacattgactctcttttgaaagctaactatcaatttgaccctcttttatcaactttaattatttaacccttttcttaaaaattgaagatatggtatgaccctattctattaagggcatctaacgatgttaactgaagcacaaaatgtcccttctgcccttactcatttgaccctattacatgtgggacccacgcgtcagttctctcttgtcctctcctccacagctccacacgcagggagaaggccgcgagcagcgagagggcgagccagcgccgaccagcagctgtggagcaccgcctccactcctcgtcaccgccgagccgtcgttgcccctcccttgccggatccagccatcacagctccatcgctgggttcgccaccttcctttcttagtgcatgccggtggcgcctcctcttccctccgcgcgctgaccgccgctgctacctccctccttccgtgcgcctgccgctgccgccgcggcctcctccctccttcagcacgcctatcaccgccaccgccaggcccggctcccctccctcccttcgccgcgcgccggcctctgcctccctcctcgctgcacgcgccgccgcctcacccgacggtgcgcgcagctccactgcatgctgccgccaccaccgcaggggaactgtcgccgccgtcgcagaggctcggcgcagccgctcccttcctccgcaagccgacgccggtgcagatccctccatccgtttcccaccaccgccgctccttcccttcacaagcgtgtgccagcgaggatcccctccacgcgcttcccatcaccgcggcccctgcctccacgagcgggcgccgccgcggatcccctccgcgtgcttcccgccggcgccgcccccttcctcccttcagacaccgagtgccaccaccgcaactcgctggcaggagagagagagatacacatgtggatagggttagggatggatatggtttcctcaagggtattttggcattacgaattttatttatatttctttgtttttttaaatcaaatcttaacggtgtagtggaaacagggtcaagcggaaggttcgtttttgaaaaacatggtcaaataagcaaactaaaaaagtagggttaaattggtagttagacttcaaaatgggataaaataagcaattgtccctattttaaaagataaacaagtagacagttgataggtccactgatgcacgccccctcacacgtcatgagtcatgatgaggaaatgcaaacgctgggacccactcatatgcctctcgcaccccgcacacccacccatccactttagctggacctttggccgctctaccctctatcaaagtaggaaataacagcagcaacaacagctcacagccgtaaaagctcacacacctcctcctcctcctcttccacgcgcgtcagtgggccgcgctgcaccgcgcattgcttcacctctgcacacctgaaaccgaaaaactcaatttggagtgaagcagggagagagagagagagagagagagaggagagaggtgtcgtggagggaagtttttgaacaaaaaatttccccaacccgttgggcacgatgccgtcatgatccccccttacctcactgccaaaaaaatttcaatatctcacccacattaatcaccttcctcacgagtctaacgagcaaaaatcccatttcatcatcattcatatcaatcctctcgatttcttccacgtccccggattctgtttcctcctcctcccccgtctcgatccctcctcctctttccctcgctccagcgcgctcgccgtcgcccgccgcccgccaaccatggaagcagctggactggaggaggaggaggaggaggaggaggcgatgccatggtggtgttgccgcagcaggaggaggcggcgtccgtcgaatccaagggagtccacgtcatcggcagccgaatctatgatccggagaacctacaggtggtggcaactagagcctacaggcggggtaagctctactgcgataagtagggacgatcttggcaggggcttggtttgatggaggggttggcggcggtgtaggaaggtgactgggtaagggggtgtgactgtggaacggtgaacttgagctggcacacggctggctcaggctcaacaacacgagcaccgctccatgcacacgaactcccagtctaccacaaacgccacactccctaacgacattaccgattgggagggtgagggagagatgagaaagaggctaacatgtggccctatcctcgtcttggatccagatcaagtccatgagggatccatgtggcatatgcccacgttgtctcatggagcggatcaggggctagtttttgaccagtgatgatgcacagtatacaactcatacttgaagggttgatgcataaaaaaataattttcatgatgtcattcagagttcaattttgatcccttctactccaatgaaaaaaaaagatcggttgaaatgggacaggagagacatgttttttttgtggcgtacatatgattgtaaggatgttcggtgcagggccgtccctagcaatttggggcctgtgccaaatataaattaagaccttatctttagaaaatactattatataatagattagaattatatattatttataatacattggggtgggtatctaataccacttcttttttcttgatctgcattgcaatcaatggccttctatccacatcaagaaagctagctttaatctaatgctactttctttagctatatccacaataagcatgaattgtttttaaccaatgataactatatctatgtcaaagaagttcaccaacctacatctgtaaatgttatggcaatccggctaaatagaagaagaatttatgggatctgaaagtgcattttgagaattcagggacttcgatgacatatacgaacaagtttagggactagtcgtgtactttactaaaaaatactagtaatttggtactacagctgcgtccaatacaaatttccatccaccctacttaagaaggtggacaattggacggtttggaggccctcacacacctcgtgtatcatgaggaggaagagcaaacggtgggatctactaataagcctctcacatcctacatgcccatctgctctaaactgatctttggctgcctaccaccttgtcaaagtaagaaatatgcatcaacaacaaaagggatgtttagatccaggggtgtaaagttttggcgtgtcacatcaggtattatatagtgtgttgcatggagtgtttgggcactaacaaaaaaataataattacagaatccgtcagtaaaccgcgagaagaatttattaaacctaattaatctgtcattagcaaatgtttactgtagaaccacattgtcaaatcatagagcaattaggcttaaaagattcatctcgcaaattagccgcaatctatgtaattagttattttttagcctatatttaatacttcatgcatgtgtttaaacgtttgatgtgacagggtgaaaaattttgaggtgggatctaaacagggccaaaaacacattcccaaaatcgaggaaacctagtggctagggcctaaggtagcatatttacattaattattgattaggtggtacaatgaagacaatagcaaaagggagaggcagtacaactccctattaaactcatgttaatatctatt

SEQ ID NO: 9327 - DNA, 53472 bp, Oryza sativa
  unsure (1)..(53472): unsure at all n locations
agagagaggaagagtgagaagagtgaggagagtgagagagagaagagagagaagagcgtatgacatgtaggccccacaattttttatatatatagaatgctgactggactgccacatgtacgtcacgtagaccaaaaccaccgcagattgggtcgaggggagtaattcgtccggtttgtatagttcgggatgaaaaatgtccggttttgtggttcagggggtaattcatacgccgcgatagttcgaggggtaattcgtactttttactaagtgaaaactttaagttagatatggtccaatgtgaaacttaggtaagaaaaagtagtccaatgtggaatttactcaaaattctattataataagagaaacaaaaatggttaaacacggttaaaacaaaggagcattttacatctgacaagcattctagatggatttttttagatagtggaatttattcctgacaatgtggtgcctttatttgttcctcgtagcggtcggacaagccatcggaggaagccgaagaggaccgggacgggaacgggaaccgccggctgtggctgcagcgacgttgttgttgtccccctggtcggacgccgcggcggcggcggcggcggggagaagccgcagcggcggcattgcttggtggccgcggagtggtccccgtcgcccctcggcatgttgacgccggcgctagccatcaccatcaccaatcatgtcatgcgagcagcagcagaagcagcatccaccatgggaagagagatgcgttggaggaggcgagaggaagaagaagaggtggccgtgtggctaaggcccaaacacaagggcccatgagcataaccagttccttccgttacattaaaccctagacgctcctcctctcctgcccgcgcgcagttctgctgcttgctgctccggcgctggccctctcttctcccttctccgaccttgcgcctccctcaggttccccgcttgttgatctgcctcatcttcttcctatttgatcgaaagccaatttgcttatctgtgaatttatttcgctagccttttctgatgccatctttggctcttggatttgaaggctgaagatcgattacatcgcaggacaggacgcgcaatcgactttgcaggtactcttccttccttcctcacaattgtctcctggatcttggtatgtactactgcttaaatcgcctctcgacaaacggatcccctcgtttccttctgctctgcaaataatccacccgctttttttttaattatttccctagctttgaagatattttaagtatgtctccgtcgacgattgatttctcgcggcggtttcttaatctgatcgtgggcaaccgcacccctggtgtcaaatcgctatggtgcttcgacctgatgcgccagcagctgttctatccggcaacacctccaccgccacacaaggttgaggaattctggcaaaagtttagaccgccgggcacaatgatggacagcatggggcttcccttctcctgcttcaccttccgagcttcagctctcaacgtcaacggccaatcgaggatggactgtttcccgcttgctggcggcgaggtgatttgcatggatcagtctggccgcgcgttcctcgtcgacgctgatgcgtgccaggtaggaaccatgcccagtcttcacaagcccaagtcgatgcccttggccgtcttcgtccccaatgccaaggctgacaatgactatgaccatgatggctatggcagcagcctctttgtcatggagaggattcccaaaccggagttgggcttcaacagcgatcagtttgaggccttcatataccgcaagcctacaatatccaactacacaaaggcctggcactgccatcaactcccacccccgccttttgtccgtgaacccaagcactggcacagctgcagcaacccagagatcagctcctacgctgtgcttggcggtggctcacacatttgcttatctgtcaatggcatcggcacctactgcctggagacagcaagccacacatggagccaagttggcaagtggacactgccgttccatggcaggattgattatgtgcctgagttcaacctctggtttggcctctctgctgaggcccgtcgcttggctgcggctgacctctctgccatggactcctagccacagctagtgggcccttggaaggaactcaacctgccagaggaatggagggaatgcaaggatcctcaacttgttaaccttggctcaggcaggttctgcatcgctaggttcttccgcagcaacagtgactttggggatgaacaaattaccgtgtttacaggtgtggaggtagtgccacacgtcggcgatgccaatggctatgcaaataagggcagcaatgggaaagtgcaactccaaatgatccctcactgatcaaaatgtcacatatctaatgctactaccatcgatgttgtgttctgactaatattagtgctggcatccttttttatttgtttatattttatctgaataagagatgacttagaatattgttgtaagagatggtctccctatgatctctatttactagtagtgcggtattgtatcctgcaatggtagattctaaaattaactgaatttagtcccctttcctaagctcaacgagtggccaggagggctgaggtagaagaacccgactgaaggggtatattggtcaacccaagtgaaaaaatggtggaaatccagtgaattggcaaatatggcaaagaaaaggtttggtatcgcctagggatggccttttaacgaatccaatccgtggaatggcatttgagcgaaaccctcttttggtagtggcagaatgtccaatttctcgtttcgttcaacacaattgtgtgttactgaaaacatgtgtgatgtttggaatttcagttcaaggtgttgataatcacctcctaccctgttgctattgtgacctgtctggctgacagataattaatctgtcatgccacaaattacatgatgttcctgtcaacgattgagaaacccctaagttgctgatatgctgcaatttataaatgccaaccttatggtcaatttttttaaaaaagaaaatttataggaaatgaacacttcccctatgtaaggttcgtatgtgtggcaatttggttatgcagccctctaaagttatggctgttaaagaaacagtttgctcatctatgctttcagtcttcaagtatgaaaaaataaaatgagaaaaatcataataatatgcttgtttatcacctgatacatcaaatcttcggtacccagttacatggcagagaatttccccaatacaacattttgcactcaaatactttctggctaactggaacttcctttagaagcaccaaagagaagacaagaatacattgcaaaattacattacagcaaattgcatgaatatgctgacctaccacacatgtttattccaatactatgattctataatcctaatttctagtcattcccgagataactctcagctcagctcctcgttgctgagggcatgataggggccatttccttcaacacaaacataattatccgcgttaacaaaatctctccttgttcgattttcttttttgtttccactatgttctgtagtccatagttactttcatgtttgagcatgtggctcgttaggtctaatagtgggaggagttttaccatcatcgaattttcggatgccagatgatgctgcaccctggcattttggatgaacagcagcctcctcctcatcaggtagctttccctcaacatcagtggcctcagcaacttgcccccttctgccatcgtcgctgttggaatcgctgcatcaacatgtcagcattagtgaacagaaagaacagctgtgatagtgtaatttggaagatggatttttttacatagtggaatttattcctgccttatttttcagtcgctcattataaagtttgcaggacgaataaccgctaattacaaaattacagcttgattaaaaacatataattaatgttccaatgattaacgtcaaacttcagaatgccttgtgtcttgcaactaataaagctagagtattgagttttttcatggagaaggacaacagaaagtaaaacaggtgagtaccctgagtaaataaccagcccaattgcaactgcaccgaatgccacatagtacatccagtcgacctggaaagcgaaagcgcattcaattgctggttacatgtaagacaataaactgcagtatgcttgatgcagaattgcagattgagggcccgatgatcagaccttttcatggtaggcaaacaaacggatgagaatagcccacatgtctgaggttagcaatgaaaggtttagcattgttgaaccactgatctgcacaagttaatatagatatgagaaacttaaagagcaaaaaccatgtgcttaatgtggcagtgccatttcgtagtacaacaatatcccttttgtcgggttttccttttttccatttttaaggagatgggcaaggaacagtaagtgaacttgggatgtaagaactgagaagtcatgaataaggaaattagtaggtacacacttgcacaaaggaaacattgtttgctgatataccttcagtaaaattggaactagagagtaaaacatgaacattgcgactgcaaacccaataaacggtaccacctgagaagtggcaagaaagtaatattaggtgtgtttggtgtcacaaaaacagataaagccaatgtcacaatgaggggatttttagaaggaaaataaaagagggaggacttacagcaccaacactccattgtatagattttatctcattgcgttcaaatatgcttctgcataagcaaataaagaaaaaaaaagctcacaaactttttgaatgaataaaaacacgttgcgggaggtaaaaaggctacagtacaattttaacaaactagcaacaaactcttctggaaacaagagaattctaaagaactgcctaaagcacattggttcgcctacttaatccccttaagtatgggtattcacccctcaaaggttttaaaactggttgaaataaccacttggaatggttttgtagtgattttactgtgtacaagatgacgtggcaggcacaatagggcatattactcaagccaacccaaccgctctttttctctctccaatcagcaggcccaagaatcacttataagcactaatgtgcttcttttccaaacgtcccaagaattaaaaaatatttagctgaatacatcaccatgtcacagtgtccacgtaagccaaccacttataaaaccactaccggcagttatttgaactggttttcatatttttgagggtagaatacttagtttcatacttgaggggttaagcaggacaaccacaacattttagggggttaactttgatatttgcttaaaaattctatgataataagcttatgaaacaaaaaatgtttaaacatggttaaaacaaaggatcattttacatctgacaagcactgatgatagctccaaatagtcccagcatccccatcaactcaactcgatcaccgactttcacaaggaactcctgaaatgcaaaagataaatatattgagggatttggtctcttagtgaagctagttttacaccttacaccacaaagcttgcacttattaagcccgaaggatgagaaacatatggaaacaggtgatacgtgagagtcattttcaccatttctttggattagtcttttttgacaataaagaagtgaaatatgaatagcttttggcacagactattaacaaagtttttttaatatgtattaaaaataatatctcaaaataatgtgtttcctgtgcagttgagatcaatgctttacctcactaacgttactgatggcataaagagtagcaccagcaattacaagtatatcacctttaactgggcttgtaccccctgcatagaacaacatgaccatgaacatttcagttgtacttcatttaggatttaactggtcataaagatgacttccaaaattccacgcaaaacttaaattattctccacatattcgtcaagcatgactggagtactgtatttttttaaaaaaaaatccattaatctagcaacatattaaactgtggaatagtctttactccttacttcagaaaacagactagttatttttgctaatgtgaactcaaggttcattttgttaccataattataaatggtctgcaatacaaaaggttttattgcacttttttgtggtaagtgaagaagaaatgaaacaacaaagacatatataaatactaatcaccgaactattacctgccctatcacctgcatggacatcagaaaatacaactagcacaagtcctgagacacaaatcgccacaccactatattttctgaatctgtagttggtcttcaaaaacatccatgtaaggaatatcacagcaggaatagcccagcaatcaagaagcataacgcttgtcagagatgtgtactggtaagccttgacaactagaaaagaatagagggagttagtataacattgtaacaccatctgtctattcagtagacaggaaggactgtcttgttatttcagcatagatgaccaggaacttttggtcaacacgctgctgaattatccaacaaataaccaacaaagtattgcacatacctagataatttgcctctacatcgaccaaggctagtactaagtagtagtaccatttcatctgcaagagttagttcatgcataaatcagttccacagtagaatacaaattgaaatactacagcatcagtaggaaattatataaagttatggatattacgttccacaaaatatatgtaattgcttatttaaaattttgagaacagtttatgtacaaatagatgtatttttcaaaaggaagcaaactgttgttacaagtgaatagagcagtaacactaaggcactaggcacgtgtgcttttgaagttataaacgctaatttaactaaataacaataaccccctccgttttaaaatgtttttaaatgcatgatgctgttggcttttgaacattacgtttaaccaattttcttattcaaaactttagtaccttatcttatcttatccttcttatatagtgaaagcagcaagctttcttgcacgaggatgtgccacatcatcagaaatattttagccgtcggataaagagttcggataaataatggtcattggattgaaagagtgcatgtattaaaaaaaatcacaaatgggctaaacatatggaaatttacggaggtttttggtatctattgccctagctaagtatagatactttgtaaacaaattaacttatatcaaaaccttattaagagctaaggtaaattaatagaccatatataaaagttcttaaacaggatcaaaagtcgcgctttggctagtaaatatgaaaaaaaatataagtagtatcttcaatgacaaaacaagtcacaacaaaataaataatatttacatagtttattttttccaataagacgagtgatcaaacataaaatccaaaatccaacagcatcatatattttaaaacagaggtactgctgaaccaaaataagtagtatctaaaatgacaaaacaagtcacaacaaaataaatgatatttacatagtttattttttccaataagacgaatggtcaaacatcatatccaaatgccaacagcatcatatattttaaaacagaggtactgctgaaccaaatgaacttgaattcttgatgcccaaacatagatatgcctctggttcactatatacggcactcacgatgggtagctttttggtaaggccattgaccaagtttcactcaaacattttgccaacccaacatttctttaattgccatactccaaagattcggcgattaaacctaaaaattgtgaaattgatatgaaaatgcaaagattgctgaacctgcaaagacttccttctgtatagcagtatgctcccgtacacgaccccaagcagcacgtagttgagcagcgactgtgacgttggcacattgatacctgcaagtgtaaacaagtagcaccaccgttacattgagaattgtgttaattaatttctctgggcgataacacggcaagaaagcttgcgaacggcacgcaagatcagcctgtacattgactgattgacagcagaagagagcagttccaacaagcaagtgattaaggaaaactacaaccaccaaaatagcagaaaaagggagaagaaacattgcgtgatcgaataaaaatttaaagaaatggccaaggaaatgactgctcaatctccacaaaaatccaccaaaaaaaaacagagagagaagaaattgaactgcagtgaagtagtctgaaaaggatcagaagaagaacacacgcctctagaaaaagaaagaagcagagaatcggaaaagaaaaggaaaacaatagagcagatagaagaagatgaatcgcggaaagaatcagagcaaagaaagaaacagcgattggggggcaaggcaacggggcggacctcggcgggagagctcggaggaggcgaagccggtggcggtgacgaggagggagacgagttggcccagccccagcccgaccagggtcttccgggaccgccaccacccgccgccaaccgaccgcgccattgctccgccgccgccgccgccgccgccgcgagcagagcaggcgaggaagaggagggagagtgggggcgtggactcgtctggttcggttacaatttgtagccagcggtgaattgcagtaacatccctattgttttccgatatttttcactctgattcaggggttgttgtgtaactttgttttttttttaagtaaattgcatcggcggtacaccaacttatcaggtgggtgtaatctagtacataaacttgtaaaacgctcgttttggtgcacgaacttgtttggtgcgtgcgaacaagattaaaatcgcattgcaaggttaatcttattaattctgttgttgatttaaactctatgtaaacattagtctaagaaggataaacatataataaggcataatgattgcataaaaaataaaaatatgagtaatgatgcaagggacaaacaaagaaagataaagtggattctaagtttacaaatataacatttctactatgtacatgcaagtcatctactaatttgtaatttataatgttgaacatagaaaaatcggacttgtcgcgccattttagtcttagtttgcacgtaccaaacaaattcatgtatcaaaacgagcattttataaattcatacactaaatcgcacacacctgataagtttatgtaccgctaatacaatttactctctttttttctagtaaagtttttgttccatactgtgaaagatgatgttgttttgtcatgagtcaaatttctctaagaatgcgtttgtttctccggttggaggaagctactccctgtttttcgttagcacgattttttaaatattaaaagttttctatatagaagttgttttaaaaattaaataaatctatatttcaagtttgtaatagacaatactcaattaatacatactaatggattatctcgttttacatgctataaaaattttcagccaaaatgctttctctgaaatgcggcctaagtgtgaccaactttataaaagagttgaatcaacacgtataatattaaattaatttcattaaacttcatcataaattatatcttcatattttatttattggtattgttgatgataattattttttctatgaacttgatgaaagttagaaaattttgacttgcaacaaaactaaaacatcttatgatatgagagagaaagtactcgcaaaccttcatgaactccttaaaaatattaaaacataaagatataactaagtactcataaaaatttactcaaaataaaagcgcacaacaaataattaacaagaaataagtattgaaatggccatttggatatactccatatcaaaggtacatgaatacaaggagagaaaaatatccaaaataattttttgcatgatgctgaacaatactttaaatttcctatagattaaggtcccctttaatccctttgatttgtagaaaaaatataggaaatttggaagatttcaatcttatacaacaaaatttctatgaagacctttgaaacaaatgattaaatcctttcatttactttggaatggacatcccgatagagattttggagaaaatttatgaaaggcttcaacctcttgaaaaaatttctttgatccgattcctatgtttttagtgtgttatgcacttatatttctatcaaaatcctttttttttctatccttcctttttttttcaatgctatctttcaaaggagccctaataagtcatgtatgaattttatacgattcaaagaagcccaatcctttatttcatatgattatttatgaaaattcctatagtatatatttctatataaaacctcttcacagttcaaaaggaggtctacctcttgatttcactagggcacattataattttatagttagtttcttaaaacaaatagtttgatatcacaatatctgaagcagaaaactcaagtgttccgacaaagcctaaattggcaataatagtgatgtacttcacaaatttcatgattcatatacaaatctgctaatttgtttgtatgcctgagttcatttggcgttaccaactcgctgatacactctcctatggattgttgctaccgtgtgttgacgaaaaaaatcaaacacaccggcatgggagatctgcttagctcctgtgcaagtccaaatcttgatgagatgcgggcatgccagtcagtttgatcctgcaactgacaagatatgcaaacaacagataaaacggccgattggctgataagccgatggagtagttccagccgataactgataatagccgatgccgataccagccgatagcgatagggtttaagcaatcggctgatataaaggcaatcggctgatgatgatgtaatgaaataacaatataatccagtagaaaccaatcggctagaaacaagatataataagcactgatctgaaggttaaagcatacatcggctagaggtccgatgtcattaaatccacaggattagataaacaatgaaacctttgttgcgatcggctaagtccaacttatatgtaatctctataagccgatgcaacatccagataacttatcggctagcactccgataaaacatcagcatgaacctatcggcttaacaagacttatattatcaacaacaatctagtaggtcgaacctaaccgatgcagcacgagattgtatatgataatctaatactcgatgagccgatagatctgtctaatatgatggatataacaaatctatttataacagcattgtgattgtagagatatatcggctaagatagaagatcggacctaactgagacagtcccaactaaaccgatgcgtctctaaacacaatgcaactagagatagaattgaaatattaggtaggcaaatatatcaaccaaaccagagcgatccaagagatcgaatcgatgcagccttgaataacaccaacgtagccgataaattcaccagggccggcggaacgtaggacttaccccttcgccagagatcgaaagccgatgcagcccagcgtcaggtgccaaattccgccggttgataaagtaaaaatctcaggaaagagggtggcgatgcgccgagaatagttacattgatcgagagattgataaattacatagaccctgggtgtacatatttatacacatgggttgatacaagtccttgtcggacaagaaagaaactatcctaaagataaaaggaaaacataaagtccttatcggacactaaacatactttcctaaagataaaaggaaactaacaaactattcctaattaatagataacttgccatgccgcatccttcttgaactcggtctcttctagataagcttccttgaatagatcaatttccttaaccaaatcctccaagaatccgactgctggcgacttaataactctcgtcggctgattccgagatgctaaagccgatactgactctaagccgatgatgactctgggcttaccaaatttcgtcgttaacaccatgccatttttctttttgttgtgcatatatacaactaatttctatagtgaacctcactaaggctgtgtttggcagctcctcttcccaacccatctccctcgttttctgcgcgcacgcttttcaaactgctaaacgctgcgttttttgttaaagatttatatactaaagtttcttaaaaaaatcaaattaatccatatttggaaaaaaaattagcaaatatttaattaatcacccgctaatcgctgctccatttttcgtgcgggcacttagtgttgggaaccaggggttccgaacacaccctaaattcgtttatggtttctatggttttgactttgtcaggtaaagtcatacacacacagaaactacattaagtcacattgttataacttatgttgcaatgtaacccccatagcctgagtttctgttcctttggtatgtgtaactaagttctaactcataccaatgtcgcttctcttaatacatatttcctccgtccctaaaagagtattattgacgggctatacctgacaacggtattttttttaaatataggggacgttaataccaggatatacgcgagatagcggtaaagtagatgggagacagtgatttttatacttgttcaggcccctgaggtgggtaatatccttaatccaaattatatgaatggctcttaaatgtatctcacatcaattacaatgggggagaaagctagctaatctagcctaccaactagtattcgtcgagaactaatccgatgacttaagagtcagtgactagctattggcttcatcctagcttgtattcgatgtggtttgtggctatggatcatgattcgatgccctcttcctgagggctatatatttatacgtgtaggcaatttcttgtccaagtagaaatcgaacagttcatgtaggatacgagcatatatgacattgccttccctaggccgaaagcacttcctcctgcactcctgatggtggttgtgggtggttaccgacaaacaaacatcataagcaatcgtcatcaggtgctattaaaggaggagagcttcttcacttgcaacacacatttcaaggagtaattctctcatttcatacgttatattctctctattagtagtggagtttggcttataaatagtcttcagtcctatggtcttctctgagattccggtacgtttttagtactttacttttcttgtaagataatagttgcaataattgaattatcttctttattatattgtgttcatagttcattaattatgtgctctatgaatatattatacttcatttatatgcttcacacgactaagctagtcaatctatgctacagtaatggtttaatgatcttaatggattgcactagttctaacttatccatgcgaagggtgggagtctcgggggaattagtgacattatttattaatataagcatggtgattaggttaggtaaatgttgttggatgtgggtatgccttatgaaaagtgaggtaggtggcaagtagtgacagctctgtccgtcttttgtattcctccatgtccgggtattacgtaagagttcatacaatgacataactatattggcataccagcactgagtggtctctcgatagtacctgggtgcctagaactaagtcctagccttaagtatgtgtgtgctaaatgtaaactaaacattacaaatatagacatacatatgaatcttagctttctatagttcttctccattgcctagtgtatcattattaaagatgaatctcctgtgtgtcatgctatcccattatcatttatgaattaacccatgtcaaaccatggtgaaataattatagtctgattaaggaatatatgaactctatctttacaccgttgttttccctacggaaatataaatacgatatccttggaatactcttgggtaaaatgctacagcagtatccgtgcgctcgtgtatttacgtgtgaccataagaaataccaacaaggacattttcaaaaaactaataatttactagatgataccgcaactcttattttattatttccaatccaatgaaaaagagaaaccatgttaaatgatgattttgcctcacgggccagcacatgttattcggcttgtttggtcgaaccaggctttctccccgtctcccctcaaaaaccctagagccgcagtgacaactatattttacaacttgtccaaattctacctcaaaaaccctagagccgcagtaataactacattttgcaacttgtccaaattctaaaccagatcaaaaattttgttttcttccccaaattttcaaactacatatgatgcaactcccaatataccgttgacgctccaagtattgttattatacatcatttctacacattacacattagtacagttgagcgctaggtcagaagcttgtggcctaaggggtattcttgtctttttgaaaactttacctctatattattttagaccaaatagagaggtaaaatttgtctctaagaatggttgtaatatcttgcaacaaattatcagtttttggaagtgttattattcaatagcgacacattaagtgtcatatagcaaaatttaccttattaatgcggagaaaaagaggaggagagaatactactggttgagtggctaaaaagatctactgcatcactctaaactacgttgttttgtggacagattttaggctaaaaccacgctagtatatggaaatgcatttgtccattatttatctaagatacataaattgattgccctacttgatttatgtatgtagttgacttcgctttggatgggttctgtaacggtggtacctaaatacagctgtcaactaaccatgtgactacgtagcaggatgcaagcgggcctacctgcgagtctacttatagatcaaataagtggtaacccgtgggttttcgcgtcgtggtccggcttgctgcaagatataaatatgttaactcataaacttatttatagatcaaattaataggtaactcacgggtcaatccgcgacttaccactaattttacctatatacaggttcacgggttagcctacttacatttcttctatgttggctcgagcttgaaatgctctcgagcctcggctttgttgacaaccttatacctaagtatgtatataagtgagttggagcatctccaagacagataacaaaaattataaacaatggattaggaaaaaaaaagtaggcccaaaaacctttctcatcttcaagagaggcaaaaggaaatttagatccaaaattagtttatggggcacgtaggcaaacatggtgggaccggtagttatcatttttctttcgttggtgtgatctttttctttttctgttttcttgtacacagccgatcaattttcccctcaatttcaccaattggaagtgaagcgccggttggaaatatgatcataaatcggtatattttaatccaaaatattaagataataaacataacttgcacagtgtgaaatgatctagtgataaaactaaaactaaacataaccatgagtatgcttaaggtaaaataagtatcaactataagacaacgcaataacattgcgactaacatatttaaccgaatgaaaggtagcagaaggatgttataccctgtgaaagtctctctgctggattatgaggcagaattgtctccgttggtgttgtcgatcggtgcgccacctcctgctcctggcgcaccacctcctgctgcaccggaaacgccaccaccagtagacatcgcgatgcagtgcctccgttggtgttatcgatcggcgcgccacctcctgctcctggcgcaccacttcctgccacaccggaaacgccaccaccagtagacatcgtgatgcagaacatagacgaagaaaacgagcggagcaatcgtgcggaagcactccccaaaaacacagaggaagatgaaccaagcggtggaaagaatgcacggaggaggattcgcttccgttaccgcagtaacgacgcaatcaatgagtattgaatcgcctgcccgtgcccgttacagaggtaatctcgtggagttgaattctgaaccgatgcaaaaggagagagagacgagacgccacaccacggctcggcgcgcgcgcggggctttccgatccccatctcaaccggtcaatatggagcctccaataactccctatttaagttgagttactccacttttaattcccaaggtggtattattatctttaatatttattatgggcccttgagatttaatagaaataaatcgggcctaacccatttattctaacagcgcctattacatgctatagatttacgagcatatttaagtacagtatggtttttttgaaaaaatatatcagtttcttataatagtattttaaattaactttcaactttgtagtatttaattcatttatttgtgcccacaaaatgtattaattaaaaagtcagatgatcagataaaaagactacacaccgagtcaattcaggttgaagaattagtgcttaaggactacctttaaccgcctttgagcttttgaaatatgacccttttttgctggaaagcacagtgagcatgacacgagagatgctcggcgaagggagaacaaaacctttgttcaaaaccattttcggtaggattccatagtagaggattttctctaatctcttactcttcttacaagaagacgggttttaaaaagaagaggctattcgcttatacgatacctttttttcttacaaaactttcatttggtatgccgtgactaaatatagattttattttcttttagaaacacagacattcacaacgtgttacgctcatcactgtgaacatgtgcatgtacatgtaccctaccctcaagagtaacttcggaagactgagttggtaacttgagattgataaagtctgatatatatctcgctgtggatgaatatctagttgatcaaatgattgtgaactttgtttgtgttatggagtataagatttttattaaaagttcatgtagcagttctctttttttaaaaaaaaatgcgacatacatattgtcctttcttcttgtcctaaaatagaaactccattagtgtttgtgaatactccggatgccagttatacctgatcgatgttgattaaagttttgaccgtttcattataagcacaaaataccgtaactgtagaatattagtattttagttttctttatgagaaaattaagctgtcctaaacacttagaactttcaaacaccatcgatcaaagcttgttaattgagtcaagataaataaatcatcaagaaagcaaagtattagggcaatccaacccaaaaaatagagtaaattgcatcgccggtgtatcaacttggcatgtgggtgcaaaatagtgcaagaacttgagaaatgagcaatctagtgtaacaacttggtagataggtgtaatttagtataaaaattttataagtgatcacataaatgcaccaacttgcaaggtaggtacgattttgatacaataattaagaagttatgtggcaacttaattatttgaagcttatttatatttttatcatagtaactagtaactgaatttcaattaaactgaatgtagaaattattatatttggttgatatttgagaaggtgaagaaaacaaaaaattcttaaaaggtaattgtgtcgacggtgggtacccgtagaccggatatagagggtattggggtacactggtacgaggatctacgtagtacgacatcaaggaaacaagagacaaagattatactggttcaggccccttagcaggtaatagccctaatccagttgatgtgggattatattgagagaaccacagattacaaagggaataatagaactcggtggtaccgacgagatcgtagtcgagttgattcgactagatcacccggcgacttggctcctgtagtctccggcttcgtaggctgtggtcgttgtgtaggctatgagattcgatcccctaagttccctcggggggttccttttatatcgctggtcaggcggtctccaggtaggaactcggagacatcagaccctgtacgatatagtaacgacccagtcctacacgggtaggaacctttccattggtagactccgtgatggatttccttagcgtgtccagataacgtccgtatatgcaccgctatatcgtatttccgtatagcatacatccaagggtagagggtataccttatccgtaaccctgacaaattggatgtaaattatatgtgcagtataatttttaaagattaaattcaatattataaggtaatatccgtaggattactatgtaatggcgtattgacatcgtgaaaaaaaatcacctagcgtatgcttagccaaattaatgcaccaaaattctaaattatcaagttcttatactagaacgcacctatttgtcaagttgttgcactcggacgttcaattctcaacttcttatactatatcgcacccacttgtaaagttggtgtaccatgagtgcaatttactccaaaaaatattataattttcatacttgccatatcatatagatattatgcatgagaactatttgcccaatgggtggtttattcaaaataaattctcgtccaatcaccttcttctctctccttttacccacctatcctttattttcatttttcgtttacgtgtagagcagtttttttcctaagaattagtttcctcatatttttccctctctcttcattaactctcttgccatctttgctctttacttatgtggcagtgtaattagggtgaataagtatagtttcttatacaatacaagattatttagagatcgtatctttacaacagtaagatgacaaaagctctaaccattacctcaaaaaatattcttttgattctattctttccattttttcccctcatgcagccatgctttcatattatagaggctaagagttattgttacccgcaacaatgatgttttatctattctctttctctctattttatgtcaacaagcatttttaattaggaaagctaagacattgttataaataatcattgtacatgtccttaatgctatagaaattagctaaggtggagggttaagagtgcccttaacagttacgtgtccccgagaaatagaaagttagaaacgatcacgttgttcttctatcaagttctgttcatttttctctttaggaaaaagaaactgagtgctgtaactttgtttttgggtagaaatgatgcggtcggggaatcaacggctgccgtgagcgaatagcctcaaaacattgtcgtccgtccgccgcggcgggccctacgcgctgaactccctaaaggcatcgcgtccggcgagtagcggcgctgaccagatcagccgagtgcctgcctaatgtggctgtctatgtggccgaattttgattattgtgtctctgactctatcgttttttatttttcgggtggtgagtgtgttcgctagcaggagttaccaactccccccccccccccctctcctttttctccttttccgtgtgcacgcttttcaaactacttattttttaaaaaaaatacttccttcgtttcatattataagactttctagcattacacacattcatatatatgctaatgaatctagacatatatgtgtgcctagattcattaacatctatatgaatacgagcaatgctagaaaatcttataacctgaaacagaggtagtagctaatacttaattaatcacgcgttaatggactactccgtttttcgtacgtgggtgatgggttcccaacacccaccaccgaacacagccaaaataacacgctgttaacgacgaaatttggtaagcccaaagtcatcatcggcttagagtcagtatcggcttcagagttatggaattagccgatgggagtcatcaaatcgccagcaaccgtgttcttgatggagtcggatcaactaaagggaatttatccagaagagtccgagttcaagaaggatgtggcatgtcagtttatctattaattaggaatagtttattagtttcctttatctttaggaaggtgtgtttagtgtccgatagggactttatgttttccttttatctttaggaaagtttctttcttgtccgacaaggacttgtatcaacccacaggtataaatatgtacactcgtggtctatgtaatttatcttcacgatcaatacaattcggcgcatcgccaccttttatcttttctactttattttatcgtccgacgggacttggcacctgacatggggctgcatcggtgttcgatctctggctaaggggtaagtccaatgatccgccggcccaggcaattgtatcatttacgttgacgtcgttcaaggctgcatcagtacattcgacctcttggattgctctggtttggatgatatatttgcctacctatttatcatatgtctctgttaatctagtcttagcatatcaatttagctttatcggctgcttctcgttttaggatttctgccggtatcgactaaatcgcgttgctagattagattagcttagacatctaccactctgaaaactcagtcaacggcttgattatctagatattatgtttcttttcatatttagtgctgcatcagttaagtttgatctactaagtcgtgcttagaaccataatctctagcctgcttcttgattgccaataagggtttcatcggggtttcagccggtgagttatctcgacgttgcatcggctcataaggattacatatacatataagttggatttagccgatgacaataaaggtttcactgtttaatctaatcttgtggattttatgacatcggacatccagccgatttgtgctttaaccttcggatcgatgcttatttatcatatcattatttgccgattggtttatactggattatattgttattttattacatcatcatcatcatccgattgcctttatatcattatctacattggacatatagccgattgcttgaaccctatcgctatcggctggtattggcatcggctattatcggttatcggcttgaactactccatcggcttgtcagccaatcggctgttttgatatactatttgcatatcttgtcagttgcaggatcaaactaactagcacgtccgcatctcatcaagatttgggcctacacaggagctaagcaaatctcccaggccggtgtgttcgatttttttcgtcaacacacgccgttgctcaaactggcttcagtcgacagaggagccgtcggatgaaattagggctactaaaatagctcgaggctacctcaaaatcaacattggtagctaaacgtaagaatgtcataagagattcaagcaggatgacgatagcgatgtatgatactccctccgtttcatcttataagatattttgactttggttaaagtcaaattgtttgaagtttgactaagtttatagtaaaatataatactccctccatctacttttgatagtcatatttccaaatctgaaaattttatttttgataggcatatttcaatccaacaacttatcatcttaatgactttcttggatttaatgcatgactcttcgttcttccacacatgattggctacatgggcattgagaaatgtaaatattaatgaatcgcttatttacgaggaatgactagtagcatatttaaatggatgataagtagaattacttatccttggtctatgtgccaagataaaatatgactatcaaaagtagatggagggagtaatatttacattaccaaattagttttattaaattaataattaattatatttttataataagtttatcttgggttgacaatattacacttggttaaacttaaagtagtttgactttgaccaaagtcaaaacatcttataacctgaaaaggagggagtatttactaacgaaatttagtcgaaacctacatctgcaaggtactaattatgagtgctcctcccggatcctgaataattataatgtatcagagttataaacgaccctcggtcggacgacgttggcaaccgctacctttcgcctatactaaattaccatgcggttataacaggtatgcctctctatttaagggagggtctaggggcctatttgagagagcttaagattctgagaagcagctggttggaagccagcttctaagaatctggaaaagctgggtttctcagcttcatctcaaaatgtttctcgacagttgtcgatggtttccttgaaaatgttcaaatcagctactcatcacaaatcccgttttgaaaagcagtgagaacgatctcatccttactttcaggatcatgttgcgtgcctccgagaaacactaggggtatgtttagttcacgttaaaattagtaaactaaaagtttaattgaaattgaaacaatgtgacggaaaagttgaaatttatgtatatagaaaagttttgatgtgatgaaaattaaaagtttgaagaaaaattttggaactgaactcggccctgatgtagtccttcaatgactcgttttttcgttgttgaatgagaacctgacctgacgagacgtaaatgccttggaagttggcaatgaaccgctcccgaacctcgcccccggaacgaaatggattcccgcggaagccccgaaagccagctccctgcagagtcggcgagtgccacaggaaggcagtttgcccaagttgagtacacgtgatttgcgaccgaggatgtggtttaacgaagagaatagggaggttaaatagacttacgttttttttggtttcagctggtccactagtcggccgatccaagaccaagctagagaaaaagcccatacttggcccatgactccttgcaccatagtcgcaatcacccacccctcggactcgactcccggagttggcccgccgccgccgccgccgccgcctcgcctgcgtcgatctccatcccgcgaccggagctccacctgtgccggcgtctgctgcttccaccgcatcctcgctagcctgccccgccggtgagcatccatccatccgttccgcacaaaaatcctccttctcatctctttctgctcgattttgagttagccctagcagcttgtcttccaggagtagatctggaagctgcttctctcgttgccttatgccttagctctagtactaatacccagtttagtttgttcccaagaaaatttggtctaggtccacccatgccaatttaggcttcactgcttgcagatacatatagtattgatcgttggttgcaaatcacatgctccagcgagaggaagcaacgatggcagttgcattagcttcatttcgcgcttttactctttgtcctatttttgaacggttttcctcctattttttcagtgaaactggacaagaatggagaacatgcagtatgctgaagaactagtcaaggaatttcttgtgttcagaggcttcacgagtactctgcaatcgtacgagtcggaattgtctaccgagatcgggaggaactttcaagtagacaagatcctagatttggttttctcggtgtatataccaaagtaccaattggataggttgcaaggtctgtttaccttttttaagcagtgcttcacttcacctgcggatgcggagcttttctcggctctcattaaattggagctgtcggtgttacggtattatgttgtcaatgcattgaaatctggaagacaagacaaagtagttgaattcttcggtgctaatggcaattatctgctgcagaagcgtgaagactggcaagcatggtttggtgcgtattcttagttccttttgctatattccatcaagtgtcaacctcattcttatcttcttgttcttaattgtgatacacagctatgccatatatcacgagcccaagcttggatccacaattccgtgtatatttctccaaagaatggtcggacactttgattctttcattccgaaattttttgagcgggatatttaatggtcttcatatccttgaacaacatgttatttgttttattcttctattcttcctcaagttggtagtaaacatgtttgctttctataatatgcaagaactccctaaatgggatacaacataagtgcataacacctttatccacattctagttgatcatcaagtaaattgtattgtatgtttgttaatgtgattgttacctatatttgggttaacaaacatattatgttttgctcaacaatgttttctccttaatttttccacgaattccagctcttctcaaaattagcactgaaaagaataccattaaatgcctaaagaacgacataaagcaactgaataacaaattatcagagctacaagcattgttagagatgaaggagactgaaatatctcagttgagaaggtaaatctatgctctttatacattacactgcagcataactaatctgtttgcacatgcatgcgtagcttttgtggagattggatgaaactaggaaaattatgttcactaattaatctaacagtaccttcatttcttattacgttcagtatccagttaatgtaaagcatgaagtaaaatatgatttctaacctccacccacatacatacacagcctcacactcggaaactagaaactgctgtgtttcatttgttttcatgccctcgcttgccttaccaagttagtttcgcagtggctgaacagttcaaactcgatattcaagcgtcaagcatttagattcagagcacttcaaactcatttcttggatttcacataaatgtcaacattacgctaccttctgcccaaaggaatttatgtctcaattgataaatacaggaatagtactggtgttgatttgggcaacatgaatgttcccaacactagtgcagctgactcttctcttgaaggacaagatatgccaggagttttcgaagaatcctcagcttcgagaagcgctgcacagggttttgattcacagtcttcgagctcagtgaaatcttctacaagagatgagaaattgcacaaatcttttcaaataagcaatgcaggttacgtcttagttctatattctttcaatggcacatataagtctctttaccattggttatgcaaaatgagcaatgttctgttgttatttcacttacaccaaaacttactcccattttcataatcctttctgatgcccttatggtttggattgttttttttgcattatccaaaaatattgccacactttaatattcttcagtactttggatgcctttattcatatttacaatactaaatttattcttacatgtggcaacactgaagcatcacatgtttctttgttgcagagaacgagcagattttggtgacagaggatgactttccagaagtgaaagtggattttcaggtaacaataatcaattcctagtagtatatcatcctttttaattccctatatgactaatcaaacctgctaacaggaaacatttttaggccataacagttcaattagctgctgtcgattttctgcatctggatcaaatgttgcaagttcttccgttgatggtacagtgaggtaattgtgccatctccattttcctttggttgcctaactgatgtttctagattttgatccattggttttacaattcttaaaaagaatctggacatatgattcctcaacaccatcatccaaaaatgccactatatactgtgggtctgaagtcagtgctctttcttgggaatgcagatctgaccgcttggtatgtgatgtctatattggattttttttgttatatcattttttacagcatttgacctttgaaaaaacatatttaagacatttcattttatcacccatttctcttgacaatagctgctcataggcacagctaatggtggcattaaagcttggaatgctgatgcaaagagagttgtttgcgacctcagtacatcaaaagactttcccaggttacaactgttactttcttgcttatcacttaagtttatgctaatggagcttcttgatctcttgcagtgtgttagatttgaagtgtagccctgtagaacctgtgtttgtctctgcagctgcatctagacggtactttttgaatccttattttcataagaaatccatttccagttatttcaaattgatagcttccttttcctacaatagcagggaccactgcatttctgttttgtgacaaaagctttggttatattttcattgtacatgccatttaactttataaaagcttttatcatgttgtatcttctagatttcctacaccactgtatgattaaaatctaggtggcatttgcttattttgagctttgaattactttcaggcctggatcaactatatttgacagaacaggatttgcttccttgactgtatggcatatgaaaacatggaaacctctggtacttctattgcttatccccttgtcttaaacctatgtgtggattcggctagtaagctcttcctccatgataatatctttttcttctattatgaagacagttctaccacttggggaggacccacctgctattacttcagtttgcttcaatcataatggaaaaatcttggcagcttctgcaacagatgggatgattcacatgtttggtatccttttttattttaattattttattaatagtcattcagcatcatacgtatatattaagttatttgcttttgatctggaatatggtatcactacctggtgcattgtttgtatgagatcccatatcaatagtttacttaactgcacaaagacatgtctgctggtcttcagatcactggatggcctgcccatgattcccctgtcagctctgttcttttcgggcctgctgaaactagtatatttagtttgggctcagatggaaaggtatgtagccccttttagtaatcacgttgattctaacattgtatagcactgtggtacgttcttatgaaggactggactctttggttataaaaacaattttcttattttttcaatacttaatcagtgtaagaaaattaactgctctagcgtttgttaaggttaatgttgacgtcacaagtccatgaattcattttttacttgtacaattatttcttttgttatttttcatagtcccattattttatctaatgttaactatatggttcttagatatttgagtggagcctgcacaatcaaggccagattctttggtcaagagattgcagtaggtaagaatatgtggcacttggtataaatcattgctgattctcaaatggcaactaatgctaataaggtttactcattaggggctattagaattggtacaaatatttttcaaacttgatatgattcagggagttgtgggggttgagattttataaattaaacgtgtttactgtagccactctagaatcctggcaagatctctatgctaatctattcattctctctgttctcttgagcaaccaattattgcattattgcttggcacatggacatcacaccatttctttaaatttgtgtggaggaaacccagtagtcccagaagtatttgtggacatattttggtttaattgcttgaaactctcatatactggtgatgaatttagatatagtttagatacagcgtgtggataattaagattgtcccttttttatagtaatcttgagatctccacttgaatacaaagattctaatatctgatatgatggtaaatttcttgatactggatgaaaatttggaagtttatcacattgtatgttttatcagttaagagagttgtatttgtctacgcaatatacattattatttggaaagaaacattgtttacacatcagattgagctgcattttatcaatcctgattggagatgctgtatttaacggactgcaaacacagtatattttgcaaagtgaacttatcagaccatttcctcatttttcctaattgcatttctatcaccaggttttgcagtccagagagctttagcaaacgcatgcatgagatatcattggattctgatggcaagaggctgttggttacatcgggtcttgtccgggctcctatatatcaggtctccacaatcacccaaacttccaggttcattttgcagaagtgataccaatgcaaatcatctataatttttcctcaggtacaaggccatgaaagtgggctgaggacacttgctcatagtgcatctattacaagtgtggattggcacccgacgctaccaatgtacattactgggtctgcagacaactctgtccgggtcacatccattgtatgaatcaatctgtgagtgtgacaggcagattgctctcgaggccttgttgatttctcgatgcaaccacatacgccattccatgaggtgaccagtggtgcgccaaatgattatccattttcctaaataggcctggcctctgggtttcaaatccccaatacgtgcttcttttcctaccatataccgactcagttgtcatgtccagattagtggcctttggttcaggatacatttttgcgttgaaggtgtcctgcgatggtgagcttctataacctttttgctgtagaactgcatgagttatgcaatctttacaacagggtttgggaattaaaatcgtagcagcaggtttcgtcctaaagcaaaacagttttgtaatccttgtaacggcagctggtgatgaacagtatcagtgtgtgtggtgtcagccatttgtttattgcaacaacattgtagcctagcatttgaaccaaacaagtacagggcccaagtattactacatttgttgcatcgacatgagcattgtttgtgtggttgggaccaaattgacctctaaaaaggtgtcctgttcttccctgctgcttttattgtgtgtaaaactatatatctcaacattgtgagtttatatacatgaatgcgtgtagtctccatgtgggccaatggttatctctaacatgcggagatatcctgtctgaataaatcagaaccacaggttgctgctctatcctttgttccttttggcctgttaagattgaaactgaggtggatagtcaaacattacgagaagcaatactactcataagacgttttgactccagtaaaagttaaactactctaagtttgactaattttatagaaaaaaatagtaatatttttaaccaaagacaaatatattatgaaaatttattcaattatagatttaatgaaattatgctggtgttgtaaatattactacttttttttctacagagttagtcaaatttagagtagtttgactttgactaaagttaaaacgtcttgtaacctgaaacggagggagtatttcggtggattgaaattctgcaattggacccataacctgcactattgaagttagctacccaaaattccttacattatggagggagtaatgtcgaggcccttttctgtattggctctacggtcctttcggtgttttcagcctatgcaacttatatactccatccatttgaccaagcttgtttaaaaaagtagtaacatttttaacccaagacaaatatattatgaaatatattcaattatagatttaataaacttacttggtgaagtcaaacgacttcaagtttgatcaagtttgtagataaatgtagtaatatttgcaacactaaataagttcattaaatctataattgaatatatttcataatatatttgtcttgagttaaaaatattactactttttttaacaagcttggtcaaattagagtagtttgactttgaccaaagtccaaaacaacttctaatctgaaacggagggagtagaatatcaaggcaccgtgttaatttcaattcggagtttcggggtgtggcaccatgttaaactagttgatgcccgcgctttactgcgggatatgtggatgaatgtatattatacattataaaaaatgatagacgtatatatgtttagataatgtgaagatggtgatttaacattgcttgcgtgataagttcaaacaaaattttttcgtcaaaaaaagttcaaactaaattacaaatgatatatcatgttggcatgaaatctagaatactctgtataataattgctagtgagtgatgatatggcacacttgcatgttaaactttaaaagttagtgggtatcagctatatataaagtatagttgtctttggtataagagcaggtacaataagatccttttgccggtgacaacggctccacgttggttttgattgtgcgctggaggagagagaacgcgtcagcgagcgactaattagtcaccgagctatatgcgtgttccgagaaattgtgggcccaagcatatgagagttgcgggagccgggaggataggatgatcgatgcagcatcacgatcatgcggaataaaataaatatatgatgcatcatgattatagcccatttattgtactatatttgcctcttaagtttgatgaagatgatgtggaagaaattggagtaagcaatgggctacactattaaacttcctctaagtatgattaaccatgttaaatgtgtttgcacacgagacacgactaaccatgtaacgagtaatcttttgacctgtgccacgtcatctcaatctttggcccccctgctctcgcaagctcatgccatggccgccgtcgctgccaccgcgccggcgacctccgtgaccgccgctaccttctcgccatccctcccattgctctctcgctaccaactcccccgcgcccaccgggccgcgtccaccgtggcgttcgccgcgcgccgcttccgcggcgtaaaccctagcagcgaccgcccccgcgggaggcgcgcctccgtcccggccgctcccaccacctccgccgcccgcgacgacggcggcggcggcggcggcatcgatgccctcgaggcggagctctggcgcctccatcgccgggcggagctgcgccttcaccgcctcgccgccgaggccgacgaggcctaccgcgacctccgctactccgcccgcgtcgtcggcggggaccgcgtcgtcctcaccttccgccgctcgtccctgcgcttcgccgccgccgcgctcctctggtcgctcgcgctctccgccgcggcgtgggcgctgctggggtgggccgtccgcgcctggcagcggcggggcctggggtggcgcggaggggaaggcgcggccgtagtgcggaggagggaccgcagcctgggtggcaaggaggtggtggtcgctgtgtcgtcgtccccggtggcggctccagtcagccgtgtgcctgagccggcaagagaggtcaagaggagggaaccaaaggcaaggcttccggaatggtggccggaattgagagaggaggtggtggtggatcaggggccagggatggaaaagtgggcgagattagcgaatagattggtccgaggtgaatgcctgttttatattagctagtctttcattggatgcaccttggttgaaaattaaatacgcgtaacatatgggaaactgagaacaaatccataattcatttgtggtggtaacatttgggatactgagggtggtgttaacatctttttatttgttatgatcatcactcatgctaagttactaatagatgataacaatgcaaaaactgcaaaaaggttttgttttggatcccattcaattcatcattattaggagcatagtctttgaattttcagaaatatgagaatggatcaggtcatgagagcttgttagtaataacttttccaattgctatgcttcagtaccgattcaagaccaaatcgtggtataatcttcaaaagtcaatctttattgttttatggcatcgagcctaaccaattctaagatttctatcaaaatggaaatgtgaattcttctgctattgtattgtcatatgtgaagtttggcaatagtttgtttttagctactagcttattttttggcattttatagaatataagaacactcatcgttagtatgatgatccaaatagaaaatattcatccttaagatttgttatgatcatttgaataatctcctacaatacctctttcccctgtcttttgaacaaatatggttttatgtggtaggttatacaaaatagtaaatacctaataatcttaccttttttgttggcaggtaatttataccatctttcaccatattcatgagaaacttgctgcttcatttctcagacctttcaatatttccttgtgccagcaatcattgataatagaatcacggggaaggattacaaatatgatgatgcaattcaagttagtattcattttacctgtagtccatagaggatatagtgttatgatatttcatttctgtataatttctatgcttgcaattgagaggcattggcatcctcttcatactatgttctatggattagaaccagactattttaggtcatccatcttatcctgactcttgcgtggatgttgtttgtcatggcagcatgtagttccacttaagcacctattcagccaacaaaatgaattatcttgcttggggcactaacagaaatttgtggacttacctcgtttctgagatcagtgacatatctgaaccatcggaatatgatggctattaatgcaatttattcttgttttgttccctactgttatagaactttcgagctttggagaaagcatcacaaccctgatctgttgtatgaatttatggaatgatacaaatgttaggcattaacatgtcaataaatgaaccctgaatattctagtaatatggtttataggcatgatcttaagatccttggctattctgttctaaatgttgttaaacggatgatttaagatatttttggcagaacactccaaagttatccaatcttaggtgcaccagagatgttatttgaatattgctacagtttatctaatgatagggctttccactcttgcctaattatatctttcttttgaatgtagctaaggcaattatgcaagatatcaggtgtaaaggtctcttttgacacagagaatgctcgtgattctttctatagggcggcaataaactttgttctggatgattgcagcaggtgtatttttgtttttgcttcaacctttgttgctattacctccttttgttttactattgattttattatcatctccattgatctgcactgtgctgataatttctgcttaataaagagcagcacaagacattggagcagcacaaatcagtggggagaatccaaggaattttcttgctggtcttgctagcaatattggattggataaattccgtgctgccacacttgtttgtgcatcagttgctgctcgcacacgttctttgttcttgcaatgctgggtacggatttacctcgattttcaaacctgattgtgtttttacccatctcatggtcatgctgatgttatgtgttcaccgcatgcaggcactagagatgcaaggaaaacggtcagaggctctagatgagctctcaaagatttgtagaattcataacatgttccctccagaggaaaattctgtatgtatttggtttttgttttcaacttggttttgagcattactatttttctgcttacattttcagacacgtataacccttagttgtataacttgtcttgatgcctttacaagttttctgttgtcccaatgcctttacatgatagggtcaaaattttatgttgtgaatttgtttacattctgacagcatattgatatatatccaaactccaatgtagccaagtattaacaccaaggccaactttcctttttggaagagtagacatagaaagccaagcgatttactacagttgttttctgagtctggtgtatgttttagcatgttccatccctgtgcataataccagtagttttttttagtgaatgctttagaaatttaattcaacctgggtactacacagttatctttgttcttactggttatttgtctctagcatgaagcttagccttttttttgtgctagtttcatgatcagttgtgtcataatgttatttccctcagtcatatctgtctacctgagcataactgagcttattttatagagtaaatttcacaaaaccacagggttctataatttttttttaataaaaccccagctgttgaggcatgagtataacaaaacccctatttctgtcagctgtaaacatgggccgtacctctcagcttcacctttttcttcctcatccctttctcacgttcctttctagcagatcggatctgagcaaacagcaggtggtggtcagcgcatcgctcctcttccttcctccccctccctctcttctgccacctgccactatgcacacttgcccttctccatcactgcaaacatcagcagcaagaaattagccccgacagcaactggtatacagagctagcagctcgtgcaatatgaactcccaaaaaggcaatttatggaatttctccaggaaaaccaacaagaagcgaatcattgagcaatcaaccattatatatgaattagctatcacatttttaggggaattaaatcaactgttgtcatttgcaaggaaaaaaaaatcagttacaaagacaccctcttcctaatcttcagagcagtgaggcaagcaatggagtcattccttgatgcacagcgacagcgaggaggacgagagcagtaaggaagtcatcggcggcgctggcagtagtgctttcttggaatggaggtagagctcacggggcaaattcaccagatagtagtccaacatgagaattgatgggagaggcttgagcttgggcaatctgcagatgccatgtcgttgatgaagctgtccagctcccaatttcctgccgtgcaaccaccctgtgttcgacctcacttcacatgacaccttagctctcaccatgctgccacaggtaggaatggggaagaaagtgggggctttggggctaatgaacagggaccaccaccacctgttagttgacgggaattggtggaagtgggttctgtgttacaatttgccccccagtctgttgtattgtgaaataaaatgtataacctgtggttttgtgatatgtgtgcctcaaaacctgtgatttgtgaaatttactttcagaaagatatatatgcttctgagattgtcattgctattatatgaacagattctaactgaatttttttgagtgaatgagaccattttttgtgctgtatgcatatgcatgcaaataaccttaatataacaaaaaaaacaggttttatatttttcgcaattttcaatgttatttctgcatattatcctcttaatggaaacatatttatgcaactttttgtttctttgtcccctacaggcggaaatggaaatggttgctggtggacttaagaagaatttacaagttgcggaaagggttcatctcttatctctatataggagcatctgtactgctggtaatatcagaactgctgcagaagctcttggcctggtaagtaatagccatgacccatgatttattttggagtagaacaatatatctgctatattatagctcaataaagtgaaaattctacacctgagtgtaaagtgtgctgttgtttgtctgtttagggcaaattaaagctccctgatacaactaattgttatgggtggggagtgggccttcaacgggatgatgaggtctagcctcgccaccctggagccgggttgaggaacagagaagggggaggctagcgatagggtttaatttctttcttgattgattccaattgactgccatgccactccttgtatagagctggctcctaacaaacctccgaacaaccttatctaataaagcctaacaaactaaccaaatgcgtgaggatacataagataagcgacatttatacattaataagcagatgacgtcaggatacataacgccaatacttcaaggaaaaagtttactttgggtcccttaactcttttgaaagtatacctatcaccctcaacttcaaaacttttcttccccgcaataacaaaaaataataataataaaaaaactgtttaagttttgtcctcaattcttaaaccagatcaaacaaacccaccttttaacacacctggttttcaactatgtggcatctgaatacaacaaacatgctcaatcagcaaccgaaagtgaaatggacaataaatgcctataatttccacaccccatttctcctttcccaagttccaacttccaaggcagcaatgcttatgcctgtggacacttccccggtctagggcaaggctccttccagtgggctttgtgggcttctgtgagggaaacggatcctcttgactttggtagcaaactcatagtgtgcagttgggcttcaaatatttgtccactgcatccaacatccatcctgaattgctgcatttttagcttacctaaatatacatccattgtagcaagcaagccaaaagactcattactaagatgacctttgctgttgcttgctacttaatgctatgtacgggaaccaactgcgatactttatactgcaagcagaagtgcagtattgaagtactactaaaatggtaatataacaccatccagtacaaaacaaaggttcatttccataaagtgaaacatccccaaaatgaatatgttttttttaagaaaatgaatatgccattttgagtagttgttttgtacattgctaaaaatataggtacatgctatgctcaagaatttgtgacctcgtttcatgattgatgaataagctacacaattattttgttttaaccggtgccaaaactgagcaatgatttctgttctctctgcaccattgctatgaactttgtcttttccctccatgctgtcatgtgctgtgctgttgggccgaactgggctacacttaggcaagccaagaaagcagcaactcaggacggatgttggatgcagtggacagtgtatttacataagctaaccgcatgccttgactttgctaccgaagtcacgatgttcttccgtttatggtcggttggctaggatgccatatggctaccaccatggcataattgacagaactggagcttattgaccttatgatgttatccaatctgactggatttttttttcttttcgggaagagagactgggtttgatatttggaggatgtagtaaatggtttccaaattggaggtgaaaattagaatatgggatgatctgggctgctaaaagtgaatttattcctattaaaatagtaattatttgaagagaaaattgttactttgccatataagagagtggcatgctcacattttccacagttcattgtcattgctaaaataacacaaaatgtccggtgaaaatttgctctttaacaccatggaatgaaaattttgcaccaatcatctcccctcactcatccattctggccatggctgtggcctagctagccactaccttgtgcgtcaactccagatgctgtcctgtgcaccctagcctccagagcataaactcattcgtcatattcctggtttagcatccaatgtggcaaaggagcaaattcacacttactttgtggcatattagttatatttaagtaactttgtggcaaatgcaagtatgctactcaactatttggctgaagagttcctagggtagttaaagggtatatgaagtatgtagatctgcacatatgttttccagatatatagggtgtgctcaacaatctttggatgaactaaaccagcatagattgatccaattacatatcaagaacaaatagtagcaagagagtgttaaggaatatagagtcctttacatgtatagtactatagtttatctctttacatatttgggcctctttttagttctatatgttgccttagggctattattacaagctatattcataacaaggtatcagagcatctgatccgtgctgcccccaggagattgatctcttgggggtggccccattttcgttttttcctctcgtcgtcgatggctcttcccattattggccgctcatccttgccgccaggtctctgacatcgccgctgtgcttctccaccgtgtatggctgtcgtgcgtcgctgctgtctctgcgtcactttctcatcaaaccagcgtcgctgcttcctccgctggttcctggttttgttgcttccattcctagtttgctgctttgagcagatcgattaggatgtgtagggctgttgtcttctctggttagggtgcacctttttgatctgctgctcctcgccttttggtttgcactgctttacatgtctgtcatctctgctagatcgatcaggataatgaaaaagaaaatccaccttccacgtattttgtcaggctctattcctcgttgcctgatgatttttgatggttccaatttcttttgtttctgctgtgtccacatactcaaatctttttatctttgaattttcttccgttgtgtcctcattctattttctgtttgagttcatatttgccctgtgcgtccacatactcctgtcatctgctgtcttcctccagtgttagccaattttattgtttggttaatctccttgtcgttttttatgcaacaagatcatctaggtctttttgtagctttagtggatcatttttctttgtcatcttgctgctcttcgccgcttttgcttgctgctcttgaccaaggatacttttcattgccattgtcacgactttatcttcggcttcattcgacaggtcttcaaggattcacgcttcgacgacattttacagagttggatgtattagctttatattgtctaagttttagtacttagtgtaatctctttcaattgcaatgctattgcatacgctttgcatttaagggaggatgttaagaaatagagtcctttacatgtatagtttatctctatacatattttggcctcttgtagccctatatatttgcctccttagggctattattcaatacacaagctattcataacagagagtttgcaggagtcaggaggaacagcatctccttatttttttttataggttaatgggcagtcaagctagagttatcaacaatcatgaacttacgctacatatgctctttaattggctcaccagagtcctacctttgctcacaagaatcctattcctgttgttttacttgaacacgtttctctattttctagaagggctatttatctggttgttttttcatgcagagcttaccagatcaatgagaatgcagatgctgctggaggactcattctgtccatatttttctagttccaacttctaattgcgacaactctattcggagtctcgaagccaccaaaaaagattggtagtgggagattttggcatcctcagccatcaggtctccagaagatgctgattcaggagcgaagcaaaccacaggaacagttccaggcggaacatgttgtccccaagaaagaatgataccgacacatcatttgttctccgtggcatccgattttgatacaacattagcttacacatttgacagtttcacaggatgtaagatgttgcattgagcagcttctttttgtaagattttgcagtgcagaagcacaaaggtgcttggtcgtggtacgagatgtttctttaaactcgcagatagtacttgccaagttgccattgtccttcaaggttgaaaattgcgatccattttacagtacggcctgaggggactttctgtccctgtcggtgtcctctctccaggcgataaaggaggtccctctccgtccggcccctttcctttatcaattccggtggttccggttgccggcaatggggaagggggtatagttcttcccgtaccctaattgttttctcttcttctttggtgcttttgtgtagttcatcagcatcgtgtttctcttgtcccagttcttttccatggattctggccaaatccatccatggagtggtctttgggttttgccatgaacgctccccgactggaagtaaagcaagtttgcttcacaaacggttgcgccgggcattttgttcatctccggcgaggcaaccttggatgcaagcctaggagagaagctgagagtttttattgttttacaatggaagcctcaaccttcaagtggaggtctcttttgggtatgcttccttgcactttcatctgtagctactcatagtttcttcatcaccgtcctcgtcatgatcaagcttgcaagttgcaacctagtggaaaagagaaggacttggttgttttttctagtttctttagaagtccatagcaattttcatgagcttatgtcaatttgacaatcttcaaggggcctttatgcaaaactgcttgtacttgcagttgactctccactagggataactcatgtgatatgtacttagttatctataatcaataaaatacatgagttttcaaaacaaaatttacactatggcctgccatgcccacttttgggcgaggtcggaatgtgacgtttgcatgggtgtacttaggggtgaatagcgagctggctcggttcggctcgtttgaaagctcgagctagctcgttaggctcacgagccaaaccatctaggcggccaggcctctcctcttctcagcgggtgcggcgcaggggtggatgcgggcggcgagcgagcggcagttcagcgccgccgcaacctcctccgtcaggcctcaggactctagcacggcggcgagctcggcgccgacgtgctgccgcgcgtcgccgacgggccacacgctccaccctacagccatctcggcggcgatgaggctgtgcaccttggtgagctccgcttcgagctgctcctcctcccagtagcgtgaggcagcggcggcggaggatgaggaggagcttgtcgacggcgccggcgccggcgccgttgccgatcagattcacgccgaaagcaacctcctgagtgcaagccattgcagcaagctacagagagcaaagtgatcgacgagctaagagttcaagaagagtgagctcgctcgatggcttgcttgctgtctagcttgcagtggtggtgagtgcactggatcactgagatggctgcgtatttataggggatatccggcatggttgcggcggccagcgccgtcaaatcttggacgggtagatatgtgctagattgtgggtgaagcgtacgtatccaaaggccagaaagtttgttctgtgcatcaacttgcctgaagcaaccgcagtgaatctagcttgagtagcagtaaagatttggcaatctttatatacgatttctgggtccaatcccggacctctcattgggccacgtggcacatgcgctgtgctccgttcgtattatcggctggagaagcatgccacgtattcgcacactcccgcaaccgtccgatgacaaatcaatggtgaaaaatatatccaacagacctaaatataaattgcacgagagtttatttttttaaaaaaatgcacgacctcatctagaacagtcgggagcagaggaaaaactcctagaaaaaaaaagcaaaaaaaaaaagagcgagaaaaatccagcgaaaacaacagattgtatattcccctcgcctgatctccatgccgggacgatgacctcgagctcgatgtaccaccggaagaaggccccgcccagccttaatccgctgcattgacccagagcttgccggcccgcatggtgccttgtcgtgcgtcggccccggagctcaccggccagcgccgcctcggagcgaggagtaggggcggcgggggtccacgccatcgccatatccatggggaacagctcggctcgacaccatccttctcgtcgccagcctcaaccgcctctgcgacagatagatcgctcacatcgcctcctcgacaacctcctcgccggctcgccgcttccgccaccaccgtgacctcacatgatcttacctagtcgcccagatcaaggcgtcgccgggagagggtagaagcggggcgccggggagatagaggggatagacggcgctgctggcagagacgacaaccgagttggtgatggcaggctggccggcggtgagcacgacgggattggcgagggtgtcgggccttcagctactcctactaacccgccgttgttgatcgccggttcgccgccacctctgctgcctccgacatgcatgcagagctggccatctccgctgcctccctcacgcagaaaagactgagtgttcgttaggtggagataggagagattgtctctcgttttccgcgcgcacgcttttcaaactactaaacggtgtgttttttgcaaaaaatttcaataggaaagttgctttaaaaaatcatattaatctatttttgaaatttaaaatagttaatactcaattaatcatgacctaatggcttacctcgttttgcgtatcttcccaatctcctcaatccccttctcttcaaacactccctaagtgaactgatagattgaaggggaaaggcagagatggataatgaaggatggagcagcaggtcaccgctcccaaaggccacctgcactgcacgtggcatcatactctaggaatttttcattttcacccctaacattatttttattctatacttcactaagtactaaatatttttaaggacgcccctatattagtactcacatattgatgtccaggaccttgaaagtttcaactttccaaaaccgatctcatgtacaaagagtaaagagtaaacttttatgtctctgtatattgagttgaccataggagtcatttacctaaaataatattcaatacataaatttcgaaattttctaataatttgacaaattttgtaaatcctactaattcaaaagacacatctttcaaagtacttggtaaaggcatacagagaagcttaaacaagtaaattgcccattcacaaatcatatcttgaaatattgaagtataattatattactctaattgttaacaatattgctctcacaattgtacctatgattagctaatcaaccgatgatcgttatattttaagatgacggaatatcatatataagaccagagatgtgagtaggtcacatgggtagattagcacaagaaatttctcatagagagacttgaaaaaaaaaacttagttttcagtcctctaaccgtatagtcataccaattgttaataggtgtcaattactctgtttaatggaagagaaaagggttgaattttttttttgaaaaaagcattctaaagtactacatttggaactctaaacatgaataacattaattatgttaaatatatgtcatagcggtaagttagtacgctaaccgacgcacctattttctagaaataggtaagcatggatttggaaaaggatagggaggggagattttaggatgctcagtataaaatattgactacgttttaaattagaaagaaaatgttaggattgaattaagaaacatgacagctgacatgaactttgtattgtgggataaacaattttcaaacatgttacctcatcatacaagacactttgaggctccttatagaagggttttgtactgcgaatgatctaagagatgatagagctatataattttctatcatctaaatgggctattacttaccataaaagattagcatcattttaactggatggaatggcttggcatacaaagagactcttgtgtagtgtgttcttcattgcacatcggtagttagaatagaaatcagtgaatcttaatcatcgattgttgatctaatggccatataatttgaggtgatgtgacacattgtgggatgagattaagttaatgggaatgaactatgtaagtatataaaatacatatggaggcgccccccccctcggcgccaacccacatgtggctcttagcatgtgcaccacgtggccctctcgcgatcatgacgatttttgctaagtaataagcagataagcatatattggaagagaaaacgagaaagtgatagatatacaaatgataacattttcaaccatcaaaataatggatttaatactctaaaagtaaaataaataaatagaatgaaaaggttatataggctgaaataaaaaaaatatgggaaggaggaaaggaacaaaataatttccattttcccataaagtatgaccaattaaaaaagcatgtcaattgttagggttattatataaatctctaatttatgaaagtcccaagcaatttgtttacttcatttttttagcttgattttattaataacaatcaaatcgaccatcagccaacataaattaatatcgccctttgttttgctttatctgctatgtaatttaaatgtttacaaacataatgtttttctcggacttgctgacataaaatttaaaaactgctaaaagatttttcttaagatataactcttttacaaataaacaatattaaattcactatacacgctatatggatagtgcgccaacggcgcaaacgctttctagttaattctgattggtagattgggctcctgtccttacgttcagaaaacagttatctctccatcctattttaagtgggtttctatgtttaacatttgactgcccgttttatttaaaatattttaatgattagtatttttattattattagatggtaaaacatgaatagtactctatgcgtaacttttttataaattttcgaaataagttggacggttaaacgttgtacatggaaactaataactgcatttaaaatggaatggagggagtactccttatccaaaaaaaaaataaattatgcataatagtttgtgctcatgtgagtgtcctaaaattaagggtcctcatgagtgttcgtctcatgagcctggtagttggaggaactgtatgttggtccggcgacggtcattgtgtggattgattttgtatgtaactcgagtagaatcaacggtgaaaaccttgccgagccaatggccaacttaaagatgaatgcccaaaggcggcgtttccctctttgcaggcgttttttatggcccctgtcctctcgaaccaaatcttttatgatgaaatcttgctacaatatacggacgaatgatgggggtgtttcacgttgcatcctccgtgggggctccgcttaagacaatcttcctcgtgcaatggtggccgttggtggtctcttgtgccggctgcaaagctctttaggcctatgacaaggttatctcctacttggttccacttgtttcacgatggatgactagacatcttcgtttgatattggtagctggagttggacctgctttactgttggggtgcaacgaagttgagcaacaatgacacatgtagtattttcttgatgtgttggtactggctatgtggaggaagtggcacttggctttgtctgatgtccgccagggaaaactggagttgcttgatcattttagtagttggtacctatgacgtgtttgatatgaggtaggggttgctgtgtcattaaggtgacaagctcaacaacgataacatatatatgtgtgtgtttgtgaagccaaaactgatgtgtcgtttttttgacaagctgtgcataacaataccctgtgtcgttgggctccgtatccttgtttagttgatgagagccactacagtgctctatactaataatattattacactaccagtagaaacgaccttaaacatcgatttataaggacatatcataactttacaacctctatgattaagggtaatttataaaattatttttttcctttcgttaatccgacgtggccggtgactcacagcataaccacgctaatgctgacgccctcggcacatggagccaccggagaccggaccattcgccagccaacacagttgatgaccaagaaacgtcacccggtgtcaatgccatcggcgcctaaagccagcggaccagcctgttgtcgtttcgctggccgtagctagcgaacttgcacaaagtacacgataatgacgacaagtttgggatgtcgacggtaaccatgggatcgacgaccatacacacgcatcgacacattgaaatgatttggaaattgtatccatgttcttttgcattgaacgatttcaatcataccatggttaatgaacacacatatatggcctactagaaatgccactactacgaaaatcatctttcgtgacggtcattttaggttttcactgacgaaatttgaagccgccataaagtaaaggccagtgaagatataagattttcgctggcggttagatttttgcaagcggacacacgatattcgctagcggtttcggtccgcttgcgaaaatcgatttttgtaagcggacaaatgatttttttctagcggttgacgtctgcttgcgaaaactcattttccctggcggttgcttaaagataagcgttagtgaaaatcaacccagcccgccaaaaaccccctaccccaaattcaaaattaatacataatattggcatcaatccaaatacagagaatcaacattggcatcatcaacaacacataaacagattaacaacacataatctgatttacacccacaaagtcatcagcagataatcacatctagttaagctcttcactgaaaccatccatgcatgcagcagcagtgttctctctctctaggattcatgcctcaggatgcctcggcggcggcgaccgccctggcctgcacaagcccgtctccgccgcggacaggagcaggagcaccgcggagggccggtcgaaccgcacggcggaggcgggcacgcgacggcgggtggtggtggtgcggcccagaagacgaggttggaggcggcggtggaggcgccctccctgcggcggcggcagatccgccctccccgcggcccaacggtgatggatccgccctccccatggcacggcggcggcggatccgccctcctcacccgcgtccgagctcgtggccacccgtggcggattcggcggctgagggagaggccgagagggaggaaggaggaggagacggacgtaccggtggtggtggatggcgcggcccgaaagacgaggttggaggcgcccttcccgcggcccggcagcggcggatctgccctccccgcggctcgacggtggcagatccgccctccccgcccacgcccgagctcctccgcccgcgctcgtgctcgtggtcacctgtggcggattcggtgactgagggagagggaggaaggaggagacggggcgcgccggcgactgagagggaggaggaagatgaagaggacttagctgcgcaaaaaaaaaaaaaagaagacagagggagagggaggaagaaaaggagaggactagctaggttgcgagtttggacggttttaatatggggaatttagttttcctggcggtcctcttatcggccgcctttgaaaataaccgccaacgaaaatcctattttcgcaagcggttgtttaagtgagccgctagcgaaaataggtatatttttgctagcggtcctcttaatctggccgccagtaaaaatctattttcgctggcggttcgtagcctcccacccctcgtaatatttatgctagcggtttccacgtataaccactagagaaaaaaaaatagggtgatgtcatgaaaaatcaattttctagaagtgtgctagcatgttgatatctaggattttcaagaactcatcgcaatacatacaggacaaaccggaattttcagtgttcattagtcattaatgcatgcttcattgtcaaggcgccatggttgttggcaaggttctgccggagtttgcattcatagttgtttctacggtacgaggcctcgaaggatcatctgcgtcgacgacggatgggtaggtggcagtgcggcaccacaagcgaagatgctgcgagatgcatcgcttgtgtcaatggcgcgaaatggcagcgaactatcgcgtttgtcgactgcggaagtacgaacgacgacatcctagaacagtggatgagaacatcataactaggggatacgtgtatcacggaaatacaaagccaatacgctgatctgcaaaattacgagtgtgaccgtccacgcttatatttctatggacgattatgctctctcatatttatactactattattgattaaggtggtggtataattaaatccggtcccttaaataaaaacagatcaacggtttggatttatttatcctactaatagagagcaccttaccagggcttttagttgatagttaactggtgttgtaggatgtggtgtgtgatgcgttgtcacaccctgaaaattcaaaatatataaattgttgtttaaatggaatttttagaaataattttaaaagtcttgaaaagaaaatctaagtttaattaataaattccaatataaaattgggccagataaaatttcattaaatactttgcttaattctttaattcctagatttttctgggatttatttgagataaggaagtatttttaataaatggaattgcatttaaggaataatttaaattgaaaaaggtcttaaaaagtctcttttggctttgggccgaaagtcggcccaaaacctctcttctctctcctcggcccagccggcccagtccgccgcgcgcgagcgcgcgtccgcccgctgacaggtggggcccacctgtcagtcgtcgtctaccttcggccgccgccgcccgaaaccctagtttcgcgccgccgccgtttcctttccaaatccggccgttcctttccttctccggccgatttgttagaggggaaatgatctccgggatctcctctaccttttctcctttggaatcttcggttaaatcgttttggaaagctttggaatcgagttcgactcggatcggtttccctctctccaagccgaaggtttccttcgccgttgccgtcgccgtgggccttcgccgccgcctccgagcccctttaaaaggacccccggtgtctcctctacccgtcgccaccctcgccttcgcctctcgtcgccggaagagctctagcgccgtgtgccctagcttttgccgtcgccgccgccgctccagccgtgtgccgccgtcgtttcagccgtcgccgtcgctcgggaagaccgccgtcgtgctcgccaagtcgccgccgtcctcgtccgccccttcgctgccgtcggagaccgccggagcatcgtcgccgtcgtcgagccgaagagcgccgccgtttcaacctcgtcgctgtcaccgtccgttggtcctccgccgtcgctttggtcgccggtgagttcgccgtgccgtccgctacccgttggtgccttccgtccgcgtcgctgtgccgtcgttcgccggcgagcatgcaagcccgagccgccgagccgccgccgccggtgatgacgtcatcgctgacgtcatcggggccgttcgctgtgagccggtcgtagaccgatcgatctcggccgtccatcttggatcggttaaatctcggccgtccgttcgcgtgaaccgccgcccatgcgccggtccacccaaaccctagccgctgacgcaataaatccccttttccttttcaaaaataattcattattgcgtcataattcaatttaaaccgatttaagtgttttaatccgatttaatctttaaaaattcataactaattcatcttagctccgatttagttggttcaagtccctaaatttttctaaaattgagatctacacattaaaaatatccacatgtactgttcatgcttgtttatgtgctgttttggtgattttgcttctttttgcttagattccgtcgtttccggagagtccgttttcgcggaagaagagtttgaagagttccaaggccagcaaggcaagtcacacagatcccaaacaaccctttgagcatgttgatcctatttaaagctattgtttctattcaactattgcatctattttcgaatgtcattgggtggaattgacctattctttgttatggcccttttgtacttgattaccttattccttgataccttgggttattacaatttgactggttgaactttatttatattggttcaactagatattagatataattgcttagccctgcttagaaacattagcacatttatgggataactaatgatttactattatttcatgatggcttaatgatagttcacgatggtcgatcgtgattagttaattaattaatgtgccaactaaaacctgataatggtgggttgtgggcacatggttttgatggtcgtgctcatgacaattaaggaccggttcacgagtttcggttgtgaaacatttatcgtgccaaccacaagccagcatgggcaacggctttatcttttgtatagcatggttcattgcggggcaccagactgagaagtggcggagataagcccacgggggtcgctggggagtccatgccttgttttataagggggtgattatgatccaggatggtgcgctgcagtggattgtgttatgcgaggggtattgtcacaactcctttccgagataccgtggtggtattgaggcacatggtaacatgatgtgggttgtgtcttgtgggtacagtggtacacctctggccagagtaaaactattcgaatagccgtgcccgcggttatgggcgggtctaacaatgtctttcgtgattagtctcacacctctcatcatagtaaaagatgctataactggtaataatttgattagctcctggtttggaatggtacattcctggtttggagatagaactgtgcagccggggtggttgttcagaaatggttgggcctatacaacagggtatgttgtatagcgttggattaatattgtttaattattacttaactgttttgttaaattctcaaatgtttgctaaatgctgcttttgcaaatggaaccctattatgccatcctttgttatcctgtgcacttgcatatttgctgcgtggcttgctgagtatgtcatatactcaccttgcaatcattcatcagaggaagagttctacaatgaggctgatggtgtggaggattaggtgtagccttggtcaagctgcctgtggagtggagccgtctgcgccgtttatttattttccgctgcttagaactttactgattgagaggaactatctacctctgtaatgacattttattcgcttattaattagagtaatatttgtactctattatcaatttgttattgtgtgcctcggctgattcctggacgagggttcacacacatgtaagcgtttggaattttggatagaaattccaggcgtgacatgcgtgctatcaagctgaccatgtttttttatctgagatgtttggcgagattcttcaggtcgagaggttattttctttttcttttttccttatagcccgtatgggtatttacttatgtttattgaaataaaattgacatttcttttagtacactaagatatttgttacttactccctctgtaaaaaaaactcaacctatcccctcttagttaataaatatggataaccttatgtccagattcgttgtaataggagagattacatcccctcctagattaagtttctatttttagagacggagggaatatatgctaaaaccccaatttttctctaaattttgaaccatggtacttgtggtactatggaatttactcaaagtcaaaaaatacaaagccttcaaagttatggaataaaaaaggatatgtatgttccctagatatttccaaaaaaaaaatatctcccatatttctagacgtaattacatatttttaataaatattaattgattaaatctttacgtggtcaattcaaaaatagttgaaggaaactatatgcccatgcatcgagacatgtggcctactagctagctagcccagtgggtggactctcttgaagtctctccgtgtcagtacttccccagaaagatgttcttgaggtgatacttttctctttgccagatcccctctcctctccattggttgccggggcaaggaagtgggcttgtcgagcttgtttcgtagtcgggtaaatctcgttgtgggtctttccttttccttctcttgctcaaataaaaagagatagtggcatctaccttctttgtcctggagttcttcggccatgaatggacctactgaagcttactttagcatatgccacatggctggtgaccatcgggtgagttacgtatgccttactactcttctgcatacgcaactcgaagttctccagtttctattgcaaagatgttgtgccagccgttcaactttcttccagcaaccactcacacaagagcgccgatctgcaaggggcaactttgatttattggtttgaccatggtagcttcaacctccatagcggagaggccccaactgggattgctcctgctctatgttttgaagcttgccatactatcatcttcaccatcgccgtcaacacaagcaggatcgctggtccggtggaagaagcagacagagaatccgattgatttttcccattctttttaagtcattttctgcaaaattcccaatgtatgctcaataatttgaccgtttctgaggagcctttctgcaaactggatgttctttccgttgctgtgctttctcatgtaccatgcatctaaactttatattaaataaagtgcatgagtcttaaaaaaaaggaaaagcagaagctaagcccagtgctgggcttgtccgcgaaggatgacggcgcggggcgtgcccaactgggcaacttgcagccgccgcgcgcatgatgccattgcactgcacgcagcacactacacacacatgagcgagcacgcgcgtagtgcacgaacatgtacaggaacacagagttagttgaggcgtagtacgtttgcaaatacatggcttcaagacatgaacaacggctgaaaagcagaacaggtaaataaatgtactctatagtaatgcactaagtatccccgaaaaaaaaagaataataatgcactaagtaaatgtaatgacaatgataattatctctggaagatgatggatcagttaattataaataatgcccccgcaaaaaaaatataaataatgcatgcagatcgttcgagctagacaggtagagtgtgtaagagcaggtttaataatatcgtcaacttgcttgctataaaacatcatctatatatagtctgttagtataggctatttatataagaatggtcgttattatcatttatggtaacagcaaatatactttttaattgatatgggtcccactaattactgcattctttactattgttttaagcatgaaccaatcttcatcaggcttatttctctttcttcattgtattgcgtgctgcagccggcgataattctatcgtcgactcgtgttctctctcaaccattccctccgctagcacagcactgagggtgacgtggtcacgctatcgccggtcaggttgacctattagacatatatatatatatatatatgtgtatatatatatatgtgtananggacaccccgaccggcgatagcgtgaccacgtcaccctcagagctgtgctcgcgcagggagagatagagagagagctcgagacgacgatagatatatagccg

SEQ ID NO: 9328 - DNA, 60245 bp, Oryza sativa
  unsure (1)..(60245): unsure at all n locations
aaccttcatttaatggccagcgacttccttgtcatactgcgctgaagcctggaatggatctgaccgggactgacataccaactccaggagttagcacgccggctccggctagggacaagagccagaaagctcttatcattccgacgggacggggcgaggcgtgtgacaggccgcctgttgccacctaacccgcgatctgaccgatctgtgaccggtcacacaccgcgactggtcacggaccggataagcgtgcgctgcgccgcattgaatgcagcgtggtgcgctcgtccaacctgctataaatgcggttaggtgagccccgctgtgctcacctaacccacacatgtggcgccaaaaccgcagggggtcggggcgccccagccctcggggccgaaacgggggcgccccagccctcggggccgaaacgggagcggtccgacccctcggggagacagagggaggggtggccacgtcatcctcgggcccgacccccccgagggggtcaggccacgtgggtgaccgcggctatccaagcctctagtcacgatacccccagccccatgtcaccgacaagtactattctagagtataatattgtagtgtttaacatgtaaatatgtcaaatcatctttctcacatcattttcacaatatttcaatattcattatttatataatatttaacatatattcatctatgcgtttcgcagcaaagcacttggtatcacctagtttaaatataagaaggcctataagattttcttttaaaaactacgattatgcacgactgttttttttatgacgaacttatatcatgtgttgtgtgtgacgtacatacatatgtaatttcaggtatgactactgcttcatgcggtacaagaacgccaacttcattggacaggtggacacgagggtggacgccagcgtaagaattaggaaagaagaaaacatggacaaccctaagacgttccaaaaggtggtggcgaagacgatggacaaataccccaggcggtggcgaccgcggggagtgccgcattgggaagggtgaaggaaaaatacatgacgtttgtgaacatctacgggctgtcgcagtgcacgcgggatctagcaccgctggcatgtgcccaatgcctgtcgacggcagtgtccgacttcggcgacatctgcaacgccgcggagggatgtcagatcgaatacagcacctgttgggtgcgctacgagatttaccccttctattttccgctcaagactgacgggcgagccaccactgacatgacgaagtacaccaaggtcgttgtgcactgataattaagtttacaactagttatgtaaaggattatgttgtaacgcgtagcaatatacatataattaatttgtgggtgagatcttatatgacctctttgccacgatttgaaatggttctagagttaagtaaaaaaaagttctagaggacgaggtctcttataattctttgatttttcttgcacattgtctacctcccgtgtttgagtgtctcctctcctaagaccccaaccactactacacatcgatgtcttgctaacttcatgggtttttgttcaacaaaaaacaaaaacctcatgggttttaactgtgactctgaggccgtggatattcgacctgcccgttagtaaaaccgtgctctgggcccaaacatacaggcttcacacctgtgagccagcttgtcatcccgaatcgccgtgagacggtgagagtgagagggggaataagatcactttgactcccttaactgaccatcgaatctaaatcgtatccctcaactgcaatatcagaaatcttgacccccgaacttgcaaaaccggtgcaatttgactctcctggtagtttagggcggtttcactgccgtggcgcacacgtggtagtgttgacctggtttttgttccacgtggcattgacatgacgcttatatggcattaaaataaaaaaatatatgcgggacccatttgtcattcacacaaaaataaaattgtgggacccacagacatgtgggaccgacatgtcatcttctctctcactacccttcttcctcatctctcccttatctctctctctctctccccttgacatgagtcggcgacggcggcgagcgggtgccggagtggtggcagcggtgggcggtggacctcgggcgacgagcgtgggagcagctcctccctgaaatgggcggtggacctcaggcgacgtgcgacggaatgcgtcgggggagatgggagaacgctcctcgtcccagctctgtgtcgtgggcagtgagttgggtggcggccgcagcgtcgacggcgaggtgggcggtggccgcggtggaaagagagcgatagctcgctgttaacagtgaaatttggtaatcggcaaagacgtcatcggcttagaatcattatcggctgcagcatctcggaatcagccgatgggagttatcaagtcgccaatagtcggattcctgctatattcggttaaggaaatcaatctactaaaggaagcttatccctaagtgaccgagtttaaagaggatgcggtatgtcagtttatctattaattaggaatagtttgttagtttccttttatctttaggaaagtgtgtttagtgtccgataaggactttatcttttcctttttagtttctttcttgtccgacaaggacttgtatcaacccatgggtataaatatgtacacccggggtctatgtaatctatctctatgaccaatacaattcggcgcatcgccaccttttaccttttctactttattttatcgcccagtgggacttggcacccgacgtggggctgcatcgtcttcgatctccggcgaagggataagtccaatgttccgtcggtccaggcaattgtatcgtctacgttggtgtcgttcaaggctgcatcagtacattcgacctcttggattactctgctttggataatatatttgcctacctatttatcatatgtctctgttaatctagtcttagcatatcaatttagctctatcggctgcttcccgttttagggtttctgccggtatcggctaaatcgcgttgctagattagattagcttagacatctaccaccctgaaaactcagtcaacggcttgattgtctagatattatgtttctttttatacttagtgctgcatcagttaagtttgatctactaagtcgtgcttagaaccataatctctagcctgcttcttgattgccaataagggtttcatcggggtttcagtcggtgagttatctagacgttgcatcagctcataaggattgcatatacatataagttggatttagccgatgacaacaaaggcttcactgtttaatctagtcttgtggatttcatgacatcggacctccagccgatgtgtgctttgaccttcggatcgatgtttatttatcatatcattatttgctgattggtttatactggactatattattgttatattttattatcggtagccgattgcctttataccattatctacattggacgtatagccgattgcttaaaccctatcgctatcagctggtatcggcatcggctattatcggcatcggcttgtcagctgatcggctgttttgatctactatttgcatatcttgtcagttgcaggatcaaactgactggcacgcccgcatctcaacaacctttggacctgcactggagctaagcagatctcccaggctagtgtgttcgattttttcgtcaacactcgcgccccccaatgcgcggtggcgaactggcctcgagcgctccggcgtcgacctgaccatgatgcgtagcgacggctggagctcctcctcctcctccgacacgggccccctccccaaccacgtccgtcgcgagaccacccccttcttcctcttggacttgccgccggccgcgcccgtggcgacctcgcgaaggctgaggaagttggcggcaggagcagggggctcggtggccactagggcggcggggttctcgcgctcctcctcctcctcctcatcctcggtgcactcggtgtcctccgccgtgcacattccttcgtgccaccgctccctgctcgctccctccccgccgcggccgccccgcgccatcatcgctggaatcatcccgctcgtcgctgttgtgccctcaccgccacacccttgctgagcgctgccaccgccgaacctgaatccctgctactgcagcagcggaggcggcagaggcgacgcgaagactgtcggctgccgctccgtccatcgcccaccgtcgccgccgccgatccggacgccactccccacgcacgaagagaaagagggagagatagagaagggaggaggaagaagggataagagagggtggcatgtgggacccacatgtcagtgggttccacaatttttttttggtgtgaatgacaaatgggtcccgcatatatattttttattttaatgccacataagcaccacgtcaatgccacgtggaacaaagaccaggtcaacactgccacgtgtgagtcatgtcagcgaaaccgccctccaaaaccaccaaaggagtcaaattgcaccggttttgcaagttcgggggtcaagattactgatattgcggttgagggatacgatttagattcggtggtcagttgagggagttaaagtgatcttgttccagtgagagggaaatcacatgggctgctcaccgtgtgatgatctcatcaggataaggcccaggataagttactcggaatgctcgtcttgaatgcaatatattgggaggccatggaagtgaatttttgtcccttgaagggacatcttctcgttttatacatgtcgttaaaaaagttatcaaaaaaataaaaaaaattattaagatagatcaatatatgatatatcttgccgcaaacatgcgagttaaaattcgacttatacaattcgaaacaaaaataacaaatttgaccgtgaattacgcgttcaattcatagtcaaatttgttatttttttgtatttgtataagttgaatttgaattttcatgtttatgaagtgacatatcatatattgatatatcgtactaatttttttaaaactttttatgactttttaagtgacacgaggggatatcccgatttgagttttccaggaggccatgcagaatcgcagatacacatataaaaagaaggaaacaatgaaaacgcacagacatggttaaaaatgcataataaatgaatcaaacaacaacaataacaataataaataataaataaataacacaatttttcatactaggaaatctggtatacggatgaattggatatatatatatatatatatatatatatatatatatatatgtatgtataggatcaggatgtgttcctgccgaccggccggttgatcgacccatgcatggacagaactgatcaccacacgcatatactctgtcctgcgtgtaaaccagctagcatgaatgtcatatgcacatgcgcgcgcgcgcgacgccgcgacgcccgatcactcctcggagagcttctcgagcagcatccgcatgagcttcacctgcacctgcaggtcctcgatgtggctcgccgcgtcctggaacagctcgccgagcccgcacggctcgcggcggcagggcaccagcctcctcagctcccgaacctgcttcaccagcctagggtcctccaccacgccgcccctctcgctcccaccggccatggaccgtgccgccgccgccgccgccttgccgctatgccgccctttcatcctccgatcctcctcctcctcctgatcggctctgctcacagcttcttcagttcttctcttctctctcgcccagcagcgagctaacgaagcaggagcgcagcagccagcgaggacgggagaggccggccgcatcactcttgcgcagtagcaatgagtgcgcgcatatatagccgcaatctttgtttggatatatgcacggattgatacgatagaacgtgcaggcgttagctgatcgatcgatcgatcgatgatgatgatgatcaatcatggcgttgccggtgcgcctccatatgcgcatgtccgtggccgtcaccgcgaaccacctacaaaaggatacgagcgcggcttattctaatggcgccgttgctgcggttggccagacacccgccgattctaatagtgatcctagctaggcaagcaacgttctactactagtatattgcttcgcgccgcacacactcgatctctccatcgatcgatccgtcggccgcgcccggcgccttcgcagaaactaagcagctcagctggccggacggacgacggacggctggcttgcacttgcatgtcagtatgctgcatgcatatgcatgcatccgcttggtgtagctaggcttgtagcgtagtgtatagctaggtagccaccagttttaattcattcgctcggcgttgcaacgagaggggaggtctctgcacatgcacccacatgattcgggctatgcgcgccacgccgggccaacaaaccgaacacacaccaactcaggcatatgaatgcaggcattcattcatgcatggtgcgtcaatcgctcgcctttgtgcctaactagcgaagcgagcgatccgtacgtggcgcccgttcgtcgctgggaacaccctggattattcgcccgcctactgcacctttctgttccttgcaccgatcgcgagtatattttagcacgttaggaaggaaggcttgggatgggctccttgggatgggctcctaatcaggtagccctcatgacaccgtcattccagctcagtctgcgtgtactgatcatgtagtgcagttttagagcgagctagctaggtctcttcttgttgcaacgagagaaagagaaagggaggtggtttatattagctggccaattaactttgctgtgcattattggacgacgtctgtgctcaccttccggcaaactctaaacatactgctaatataagtgaagtttcgaagtcatcatgttatgttcggaaaaggcaaccggttgttgagttgatcataataatttgggccctgatttttagctgattctcaactgaccaaaggccatccagaagcatcggcagggcagacattagtatttcgcattccgaatgcaagaggataaagaaaacactacttcatttggtgccggttgagaaacctccatatatagatgtcagatatcccaacaggcgccatggaggtagtattgatgaggatgacttaaaggtgggtgctggtttaagaaccgatacctttgagttatatggtttgcaaataaaaaaaagccagctcggctcaattcgagccgaaccgatgcttcaaagcaaaaaaaaaaataaatcaaaaaatctaacaaaaaaaatacaagacacataaaagaatcaacatttcatagatcacataatcaaatattcacatcagagaatcaacaagtttgtggaggaagataacaaaatcaaatattcacatcaaagaatcaacaaatttgcggcggaggagccccagcggtccgccgtggcaacgtcacggggtagcaggagcgccttgaggagcagtggcgacgagcgaggcgaggacggcgacggccccgtatggccggtcctggggttttggggccctaggacaaaaacttatatagaggcccctatatatatatatataaacataactaatatatgtatatttatatagtcttataaacacacaacattcgatgtgataaaattatctatatataacattttaaaaaaagaaataaatagcagtaccgagctgagaagacgaccggcgaacgatcgacacgagcgtggctactggtgaaccgtgattctccgacttgctgtttccgtttgtgagacaccgagaagtcgagaagtcaccgagagcgcaggagcaacgagcggcgtgatgtgatcaaggcgacatggcgagtggcgtgatgtgatcgaggcgaagcgactggagtcagatgaagagatcgaggcgaagcgactggagtcagatgaagatcgcttcggctttgctaaaataggcctgacgatggactaaaatttattttctgtattggactattcagttgtctagcttaatatagacctatgacccatggactagaattatccaatacgtagtatatatactatatgtgtataggggccccctagattttgggggccttgggcggccgcacggcctgagccccctccccccaagggccggccctgtggccccgtgacgcaagaggcatggttgacggtgacgggcgccggcactcctcctgctccctcacacgacaaggacgacggcaccgcgttggctcggccacatcggcattgtgctttcccttgtgagggcgctgcagcgtcagcgtgcagcgaggggggcgaggatggcaacggcgccgtggcgcaggaggtgtggttgacggtgacgggcgccggcactctcccactcccccacccaatgaggacaacatcgccgtggggtgcccctacgtcggctcaaccccgtcggcaccacgcttccccttgcggctccgttggccctggaggcagaagggaggaggcggcatggtgaattacgactagtgatttagggaggagaagagacgagaagggaggagaggtgagggaggtggtggcttgggaaagaggaaggaaagggagaggagcacgggctggacgagaaaggaaaagaaggaagaaaagagaataagaagaaagcgaagagactgaagagacaaggacaggaggacgggagataggtatctgttgtattaaaaaccagcacttttaccttgtataaaggtgtcgttttttaatagaaattgacacctttctttgacagaaaagataggtgccggtaccatttaaaaaccgacacctatttataaaaaaggtgtcgatttttgccattggcacccttgcgagtgtgcgtgcgtgtggaaaaaacattataaatgtcggtttagctattccaaccctatagtgccgtctcctttatggctttcttagtcgtcaaatgacatatgaacattatatatacataactgttaaccttaaatgaagaacacattaaggtggatttatgtcgtatcctctaccattttaatccatgttatgatttatattacccttcttcttcgatccagctccaacgagatgacgatgtctccgacgagatggcgacggtctgatcagtttgagtttgtggttagggttaggatgagagggattgcgaaagaggaaagaatattgttggccttaattagagggatgtcaatcagagatggtggcgtggtagtgggagaggcgcgcgataccaaagccatgggagatggatgccaacgatgggctaggtaggcaacgggatgagggatgtcgttcggtgcggataccaatcttcaaaggaacaaattattcattgatgtcactcgaattacaaaacttctagttatgtacctaatacagaagaacattcagtttaattggtatttaccgggtatttttgcttaagccgaatttgagttcacagctgagcgtggtgttgcgccacgcattctcttctagtgtgctctatgcctctagttaacatataagcttataagtttcaccgcgttagctagtactaggcttttgtttgtcaagcttgtattagagagacatactcatggtgtatgtaataatgtgtgacaacgaaacgggcatatgtagacaaaggctttgcccaatgaaattattggtaaggagctttaaatcactagagaagtatggttcaattttcagtagcatcggaaaaaaaatccaaaaaggaactcccatcatacagcacatcggctttgcaagaaagccaatggacgaaacaaattaaagtctgacaattaacatctccgattgaaagatatattgcaaattctttgctggataatactccatataagaatgttttctaagggtcagcgttatacgggtattcccaaattacgcttctgttcaatgtatcatattttttttctagctatagtatacattatccttgtactacgagagatggctctttgtgcttccctacaagaaaccagtgatcaagtagcttatgattatgctccaatgatgcccccttgcatgtacatacgcgtgcgaacttgacaatgtctacgtaaacaaacagctgcagagttatataatacctagattctcattgctaggataaggatgtgggtgggtgatcatctcgttgcaacgaaaatatagtttagttagtataagagctcaaagaggcagcatctgtagaacaagctaggtgtgccgcctttgcatcatgatcccacgtgcatccaatagcagcaaaaccgtaataaacggcactggagtgacccgcacgtatcttcttccagcgcaagccgtttaagcgaggagacagggggcattaggccggcctaaccatcatgaacactccatcatattattgaagagatcaattagagacactcttagcacaagcctaacttgtgtactagtttctgtttactctgttttgcagatcttgcttttcttctctaaagtctggagggaaactattgtaaactctcgagaagatgatatctcgttatttatatgtcacttaaatagttctaaaataattttaaaaaataagatagatagattaatatgtggtatgtcactccacaaacatttaaatatatgtcaactagctataatttaatttgttttctacagctcgtaaagttgaattttaggttgtacgtttgttaagggatatatcacatgttaatacatcttattattattatttttatttttttcataattatatttttataacatgtaaacaataagaaaatattttctcgagagtttaaaaaccactctcgaaatctaaagtacgtaatctcggaagttctgtaacgttttttttccctattcatgcgactactctgagctcacgagagtacgaagctgaggccattggatgcggtaggaagctatctttaatagggttaactgaatccatgtcattcaaaattaccatataagaaaaatattaatactatttgtgattagttacatgtcacggaattttttgaaattaaaaccgcatcatcgctgtcacattttatgtcattatatagaccaaaatgcttctgtatgtgggacctacatgtcagttttatcttcttcctccacccttccctcttatctctttccagttatccctcggtggtcaaagaatgtggcggtgggtgggccatgggtgtgtggcacgggtggctagagagcgaggcaatggtgaccttgttggcgagggaagtagaggtcgtcgaaatttgctctatggatggagccgtcgtgcgagctccccgagggcaagtaggaactttgagatgtcgatggtgttgcacatggaagtagccggacgagcgacacgcaattgacgctaatctcccctctcttttctcactcaggaggagatgcatgagctactcatccttactgtcaggaggtcgccagtagaggtgatgggcggcgtgagcatatccaatgataaagaagggggtggaggggatgggcgatggctgcaggtggtcggcgcctgaaagagcatagatgtaacctagagggggggtatgctttcctgaaaaatacacaaaataatcgtagcagtcaaattaaatagggcccggaacctcctggtaaagaacacatgaacttacgggtagttatatactgcccggaacttctggtgttcttggcttaggaattttcgggtacaccgaaacttagaaaaacgacttgaagattaaattattttctaatcatattcaatcacagggatgcatagaggaataaaagaagagaaaaacacaggcacaaacacagatcaagcacaggagagacaagaccgactttttcccaaagtccggatctcaccgatcctactctccgttgaggaactccgaagagctgggtctcgattaaccccttgcctcacttatgcaaagatcccagaagaagtctacagccttcaaaccaacacccctaggtcattctctagaattgagtgacaaccaagatccatcttaaactccttctagagaagaccacaagtgaggcttgctctactaggacaacctctaatctcagcacaatttccttaatcacttacctcttttacttgcagaggtgtggaataaattcacaaactttcctaggacatccacaattgcaaaggaaggtcgcgggtgacacctaaccgcctaggagaggatctccaagagtaataaggccaaagtgacagcccacgaggtacccaaagtgctcacaccttcctaaccttcaatccttctccaaatcactccaacaccctcatcaacgctctcaatctcactataatggctcaagatttgggtggaggaagcaaaaggatcttgggagaggctagaaacagctaggaggtgaaagaacaaaagtgaaatggccaaagagtgagcgggagatgaaatccatatatatataacgggtaggtgacgccatctagccgttactcacatttttgaactggaatactacctggaagttccagactggggtgccaggaacatccggccaacacttaggaaaaatctcaatttcacctagtggcccagaagttccggacaagagtgccaaaacttccgggtgggactctctgtcctgggaggggctattttcaaaaataactcccaaaaatagttcaatgagttgaagagcctaagagcacttagggaacctcagagcatcacttgaaacccctcttaatagtacagtttttttcctaaactcgaagcgaaaaataaaactagcctaaaccggctccggttcttctcaccacattgaatctgaagaactggtggggggggtctccaagcgtcctagccacctcgtaagcaacctgggactaatctcttgtacttaagctcaataaaatgcattagttcatttaaccatttagtcattaatcaccaaaacccactagggggttagatgcactttcaacgtcggcatcggagtcagagaagccagggaggttgatgcagcgcgggctacaggagaggatgcagatctaacaacgatgacgaaaaacgtgacgacgatggtatggttctatttcacaaaattccaatggcacgtaggagatatcacgaatagtaatagcatttttataatatagtaattttgcaatggcatgatccaattaaccccttttaataaggattcttttattaataagatgtttatgagtcttaaaaaaagtccgaggctgagccacacgtgtttctatagagagcatatgattgatgaggcattaaaaaggttttttttttgttatgcttcgaacggtatataacctacttaagggattcctttaagaaaggatgtagccagaagtagaaatagaattggaaattcacctttgtatccgctcttgagtttttcgttagtctttgagaggtgcataccattactactaggaggtatatatctattgattagaactacaaagtatatattcctttttacactacaaaaggtgttttgcagagggcttccacggcgaggttgtgtggtggcgtgttgggacgaagtcgaagctgcttgtcggaagtggcaaaatcagcaatgataacccttttctgctttgtctcggcaccgttatggacttgtggcggctttagtgtagttgaaaaagagggggaactggctgaaagccgcacatgtttttttactagtgccaatgacgctgtgacacccataggcgtcatcctccttcttgaaggtgtatttatttgctctcttccttctccttgccccgccgatagttcacactctaagtctagtgggagtgcactcgtcgatagctgcctgatcaccttagaagaggattcggcttcctgatccttctcattacctggaatctctggttagagaggaccgctcgcgtttttgatggggtcctctcccaagtggatacggttattgatcacgtcgtgcaggaggggaggctctgggtgaaagcgaagctgagtccttctggagttcttcttggcatatatagtcatttagttttttcttttcttttccatgcgattttgcttgttcagggtttggttctatctagcttagctagctgttgatctccttttctccccgtgtaaaccttccatacccgttacagtagattatagttgtacaaaagaattttctcgtaatattaacatgtaaggttcttgcgtgttcgaaaaaacaacgaatcagtcagcgagatatcccagcagcatttcttcgtaatcatgcatatcaaaaggtactgaagtagcctcgttgcggttaaccaccatatataaattcacgtgcttcctgattagttcagtttggggaacgatccatatctcacccaaaatagatctcagcataatccaacgttctgtgaaagaacatatagccgactggttacagtggcctgagtaacactctaagatcagtcatgagttcaaatctgtctaagctaagatcccaatttcaaaggctgcatacatagcctcatgtgtacagggtcccttcctgatatactcccgtatcagcgtatctcaaaaccgcagaaaatatgaactcctaccgtatattaatttaacaaacgaggtctttatacttgacaccagcaaacaagctagttagccagtactaatgatactactaacaaatagcctgaaacaaagccctgacttgggaaaatctgacaataatagcccgaaagaactcgtcgatgtgtatagtttcttttttcaaattgtccatgtttacactataccccgcctgaaatttacaaaggatctggcgagaaaaagggcttccgtgtccagtggatcaatagtaagaagtagtactcccgagtacagaaacccctataggtgccggttgggaactggctataggtgccggtttctaagccggaacctattggtcggcacctttatctcaatcttattggtgccggttataaaaccgacacctatactatcaaaaaaattaaaaaaacgatggcacctacactgccggccttctccaccgccgccaccaccacctcgcccggcctccacgccgtgccaaccttcgcgccggcctccacgacgtcaccgccacgaggagaggaagccgagaggggtgagtctccacctagccatgcccgcctccgcgccgccacccaacgtcgcgctggaggatgatgaggacatcctccactattacccgctggcaaagatgcaaaattcgggcggcgaccgtgtgagcctctgaataatcccaccttgcttagcttgggaggaggaagccaccttaaaagggagagccacccttcccctaccggactagtcttttagggagattgggcctttccccgagtgggtgtgcctatgaactggagattgggcctttccccgagtgggtgtgcctatgaactgttggggtccgggcaaccttaagttattgggcctcggccaacctcacctgggacggattgttatcaaggggggaggtcccctgggagagaggccgccaccttgccggggccggattgttatcaaggggggaggtcccctaggagagaggccgccacctcgccggggccggattgttatcaaggggggaggtcccctgggagaaaggccgccacctcgccgcggcggccgccaccccacgccatgctagaggagaagaagggaagggaggcgaggtcccccgggagagaggatgctggcgagatccaggcctactccaccaccactgccgtcgccgccacctcgccgcgccagccttcgcgctatcgccaccgcgaggagaggcagccgagaggggtgagcctcctccagctgtcagccgccacgccggccaaccttctccaccaccgcaccgtctcttcgcccgcgtcggtcggccttctccactgtcgagccaccctggaggaggagagaacgggggagggcccccaggccgagagaggaccgccgcgccattcttctccgtcggccgccgccactactctgtcaccgtcgctgcgcaatgggagaggaggggcgagcgagcgagagagagggagggaggtcagaggtggatggatggattaagatgaggctggcactgtgggtggtcaagaagagccggctcggtttttttaaatataggtgccggtttttaaatagaaccgacacctatatttatattataggtgtcggttctaaacaaaaaaccgacacctacagtgtaggtgccggtttttttaataaaaccgacacctataatgtttaaaggtgccaattttaacttttttttatcgtgcggaggtgggaaaatgctcataggtgtcggtttatttaaaacctacattatttatctataaatctataaggtcggtccctatgagggcttttgtagtagtgttactccttgaaggagtttaataatataacgattaactactagctccaaaaattgaaatattatttatagataatctaatagtccactcatacaataagagcaagtacaataagatgccataagcatattgtataagttgccacatcacatttgtatttatgtggataggtaaggaaatgagagagaaacaaagcggactatagatttatagccagcttcagcgtgagttccaataaactatgtgagagagatgggtgaatgatatattaatgatgcagtatatatctccaactaacgattatatgagtgtactattatgttggctatatatgatatttagatttttgaagccagtagttaactatattattgattttgctctaattagttgtagatatatatattgtatcactaatatctaatccatctatctctctcacatagtcagtgtttggctaataggatagggaaataatttcccaccaaccaaaagacatacttaaatcataaccattcattctccctcttccatttaattctaacccttcattcattttccaatcccaatcccactccctatttcctattatccaaacacacccatagtttattggagcttgtgctgcaattggctaaaatttgtagcccactttttctctctccttcacataagtaaaaatatgatgtgacaacttgtacctccacctacatcaggcctatcttactcgcagtaacactcctaatacaaagaacatgaaataatttaatcactttctcggttggatcacctcaataatgcgaacaatgtgattgagggttttgatggtataggatttaaaacaaattaattttacaagatcagagctgttagttaagtatgtatgcatacacgtcttatatattataaaacatgagaaaaaagtggttgtgttttatattataggataatagaagtactacatagtaataagtttcatccggcagaaattcgtgccgagaacatgcaaaacaaaactgggccagagaaatgcacacatatctgtagaagcccagcgcgcagcctgagctgagccggccggccttttcaccttttctcgtgcatgtttcctgtattttcaatcaaaatcatctagtaatgctctctagctatgctgtcgtttcttccctccgggaaatcctcctctgcatgtgcgagcgactgcgtcgacaggatccaggcaggcgcatgcgtgtatgtctccatccatcgggtgccctgtcaaccaaactagtactactactcgtattcctagtgcaatctctttcgtaaaaaaaacaatagtattaaatatgacataacttaatactattataaatttaaatatatctctgtctaaaattatattactcagatatatcatgtttaaagctagattgattttttaatgtaagggagagagtactgcactgcagtgtgcgtgttttgcccattcaagcgcacctacgttagtgtacgtgtggccgctttatctgcccactgccgagctatctatcaatcgcgtcgactacagcggaagccgtcaatccaccggcgatcggtgtcgcgtatgcgcaagcgcaatgcatggatgagtgacttcaactattgctctccggccagttctctcgtgtatatatacgtggaatcaccaactcccaaatcttctcccgttgtcggggcgataatctcttcttgtttctttattttgcgattgcgattagccgcgggttggccagatgtctggtgatcgaggaaattactccctccatctcttaatatagcaacctaatattgaatgggacagctaggttactatgttatggaacgggggagtattattctccgtggctcctaaccatccatccatcgtagtagtacgttttatcgatcaacggtcatcggtcgacggatcgacttgacgagggtgtgtgatcagtgtgttcccttgttgatgtcatgttgtcattctaagttgaacatttgtcgcttactttgagatttttgagattcatgtatatatgtcataaatcacattattgtactttcttttcttttcagtacaggacgaatcttaacaaaagcattcaatggttcagcatgttgcacatgaacttggatcgtgaaaacaatctttccgtttcgattttactgtactgtccgtggataacgtcttacctggagtgtttagctcatgttatgccgttcacaatttctatttgggcttaggcccaaaactctaacagtaaccacattccccgctgtcccgtgacagttgctccaaatgtacactcgaatatgattcgacgatctttttccctgctcaaatcagcggctgagagcgctgagagcacagagagcacggtttgttatcattacttttatctctttcaataaatcagagacagatattagaacggtgaaagctaaaactatcaaaagcatacaagtcaattgcaagcccgccccgcgagacctgccatgtgcatgtgacatgcacgagggcaaagtgaaaaaaatgcggcattgcgtttggagatatgtcccttccgcacgggggaatccacgagcgctgcagcaggctgcatccgtacgctctgggggccagaggcgggggctggctggctggcttgctggcttgcttgctccaacaaagctgcaagctgctcccggtgtccggctggatcgtagggccctgccgtgccggagagcgagcacgcgcatgtgccgacgccgtgcaaagtccccccctgcgcgcgcgcaaccgatcgactcatggcacgcaggcagcagcagtaccagcgacgcgcgcgcttattattggtggtccacgctacttgctgtggctccgctcaacagccagagccagcggtagcgaagccgatcgatcgcgcgcgcgctcgctctctcgctcgctccaccgcgttgtttgtgtcgcattggttggccctctctggtctttagctaagctaccgtaacggctggccggacaggccacatgcatgcgcgctgccacacagcagagacagagcttatcttagggtgtgtttagttctaaagttttttttcaaacttctaactttccatcacatcaaatctttcatacacacaactttttagtcacatcgtctccaatttcaatcaaattctaaactttggttagaactaaatacagccttagctctaagctccgcgccgcgacgcgatcgatcataccaccacggtccacgaccaccacgaggcaaagcaaagcagctgcggccctagctcccgtacgcgtcgcatgcgggacatgctgagataaaactcgtaagtgcacagataaactagtagtgcgtggtgtatcgtacgtacggcccggccgtccggtcggcagtcaggccactttgcaggtcggcccgcccccggccgggctggatggctcagcgtgcatgtgagcgatgtaaaacgaaccgagaaagcttgcgatcgatcgaggggactccatgtcacaccacgtaaagtacatcatcccggcttcttccctgctaagctagctagtagtagctcgcggcttttgcgacccaattcgctttgccattttggtgcgccggggtggtgtggtagtgtacaggtgtgcgtgcattgccgcgctcgacgagccgtgtactccgtatgtgtgtgtcccgggcatcgtgtcgtgtccccccatccccatgtgcaactccggtctactccctctctcctctcgtcaggctcaggccagcctgccgtataaatgaaggcgtcgacgcgtcgacgtgacagtgtgcggcttactgaagtactcttcatactctctcgtctctacgtgtacgtacgagtcagagttatgcactccaattatttctcaatcatgcatgactggtgaggatgtgagtgtgttgaatgtgcgtgcatgcatgcatgacacacgtttgatggagtgatggctgtcatttctcgagtgatctcggaaccaccgcggcgtgcagccggccagtgcatgcatatcagcatatccattggacggtgacgcatttcttgtgggctgttcgtgtcccccgcaagaagatttttttaaaaaaaatacttactcctgatcaaaagagcacatgcatacgctgaaatgcatatgctagtaactctcagcatctgccagaagtggctttgacccctgaatatgaatatatgatcgtgatgatcgcgctcgtggccagccggccggccggtcagtccaaaccctgcatgcgccggcaaggttgcatggcgactctgccccattttgcgagtcttgtcggtacaggcagccacatgtacacgcatgctttcagggtcaggttatacagcagccctccctttctcttggagccgtcgtggccggagcccctccaatcgcttgctcgtgcatttttcaattgcgtgccccctgcgcatgtgttaaagacattctttccacccaatttggccttttcaatccgatcgtgcctttctggctgccatatattttagctcccaaccacatttacggtatgacgaaaaaaatgatcgatgtgacacacccaattattggacgcggtaccagcacaaaaatcttgcgtaactttatatatatggatcgagacatttggatgtgtgatggtcacatacaaaagttcagtaagaaactagtaagaatatttaatttccctgttggatccccgcaaaaaaaaaaattccctgttggaacattcatgcaatcaacttaattagcacccaaacagtcaaattttgtgacacaaaattctttatttgaacttgcgtttgtgaaaaattatttgtactccctccatttcaaatcacttgttttattctagttttgtcgtaaaataaaacatttctatctttaatattaatttataaaaagttcgtaaagtttatcaacatgtgagtatatatatgtcatggaagtattaatactaaggataaatcatgataaatcaaaaatctgaatcttataatataaaacagtatcaatttacttaggatatacataccaggatatataatcgaaaatgcatttagtcggtatcccgttccaagagattggcacgggatcctctccctccctcacgcgactacagcaataaaaaaaatgcagatgcggctggattttgctggggctattgtagcacagaggcatatggattttgcggaaaggttgtggcgtggcgttggccattcagtgctttagtgcggcgtcgcttcttcgcatatgggggtcggaacgggtgcatgcaaggctaggtcgagttaatggcggtgatgacggagccgccgagagatgggggcaactcgcctcctagccacatggtgcaaagaagggaggagtcgggtatctcttggtctagaagaacttgaacagaaagaagattggaaggaggaaggaaaaatgaaaagagaaaggaaggggaaatggtaaagggattgatagagctatcaaaattttgttttaaccattgcacaggagtgaagcggctgcaacggctgcttcaccgggtcaccatggccacacacagaggagagggatgaggaggtctaggtcttgaggagtggccgaagaaggatggaaaacaccgccaccatcacgtcaagggaggatgggaaacactaccaccgttgtgccggtaaccatctccatcccttcctctctcccctctccgcttagatttgataccagataggtacaggatttgtatcggcaagtacatgtgtgataccaatgaggtttaagttggtacctgacaaggtatcggttggtatatggcagatattggccagtaccgacgaggtatcagttggtaagtaacgggtatcggtcggtaccgatgagggccagtacctaccagaaatgataccgataggaatcaggatatgataccttctcggtatcatctccttgagacgggttctcgtatagccgtctcctatataacactagaatgacaagtaatttaaaagaagactaaccatcactattaaaaaaacatatattttgtaaacatgcaaaatagatttttccagacggccatccaccccgcctgcacataaaggcctgtgaaaatgcacgatttttgtaggcgcctcttcatttttgcaggcggtacaaccacccgcctgcgaaaatatactctatgaaaaaaacccccgccaccacccctacccgccatcgtcgcctgctgtggcccacgccctccgctggatctaggtgggagagggaagggagggaagccggatctgggagggtgggaggaagctaggggatgggagcgccgccaccgtcgctccctctacgccgccgccgccgccctccccctccaaccgaatctgagaggtcggggaggggagaggagtgccgccgaccggatatgagagggagggagggaactaggggaggggagtgcttccactgacgctcccgtctccgccacactgcatgtggtggccaccatatctccttccacaccgccccctccaccgcttgcggtggtcgctcccctggcctcttcctatcggatccatgagcgaggagggagagaggggagtagagcaccgccaccattgttccctccatgcgtgttgcctccgctgttgcatgcagtggccgtcactccacctcctccaggcagatctaggagtggggaaggagggagaggaggggagtatcgcctccacaccaccgccctcccctcctccggtcggatctaggagggccacacagcctgctgagaggggtggagggtgaggtgagggagatgggatgagcgatgggaggggagaggacttggtgaaaattaggctaggtagctaggtgatgatttttatgaggtatgaccttttcacaggcagacatattaagacctcgcctgtgaaaatcgattttcacaagtgggactaggtttatggtatctttaggtatttttatgaacattgattttatggtcgcttggaaaaataaatcgtaatgtttggaaaaatcgtttttctattagtgcatgatgcgttagctcatctcaattttaatgcacaataattattttatttaagtacctagctaaatggcagctactaattaacattcatatatacctaccggcttggtggactacgtgagaatgctattctagttttttctggcatttgtcgtaatggaaaatgtctaatatatgatcatcggattgagcagtcgcctaattgcgaaaagcgcgtgacttctccatcaatagcatgcagcctgcctactgtcatgattgatgaatatttgttcctcttcttgctcatcattattgtgtcgtttgcgtatttagaaacaacaattgttgcagtaaaatacaaatgtattggtgctgtgtggattgggaactggcagatctagtgatgcaagcaactaattagagacggaaaggtagagggaggacgagagaaacacatacctctacggctttacatcatgtcattgcgagaaaatatataaaccatgcttggtatggtcagttggagatctatccaacggctaacgcaatccacaactaagtaaccagtaacagagctctgctacggttactctagctagctaaggttgtattctttgtcctgggttcccaaccactctccctctttttcacgcacgcacttttcaaactgataaacgatacgttttttaaaaaaaaaaattctatacgaaaattacttaaaaaactcaaattaatctattttttttaaaaaaatctaatacttaattaatcacgcgctaatagactaatctgttttccgtgcggagaagatgggttcccaaccccattagcgaacacagacttagaggatccattttcccttatgctgatcaatgactatttttatttaccaatatattgattttttttcacattgcatttttttctttttttttctttcttatcgttagtccataaagaaacgcaatattcggaagaacgtgcaaaaatctttcttgtttgtattacaaactaactatggtagcccggcatgcaacgtgttatagctagctattgggagaagcgaccttgcgaccatctaattccaacagtacgtaggagaattgcttcaaaacatttgcatgtcttcatgtgccgacaaaacaaaaccagaccaactgagccagagaaaacacaaaaaggttccactaagaatagcgattggtaaattaacccaagcacatactgattgacagaatctaacacggcaacaacgacgtttgtctttttctttctcccctttattcctggtagacaataatcgcaaagaggaaattttaactgctcggccatgaatattcatacccggccataccctacgcgaagtggcggcatgcgcccctccgctccggcccatacacggttacgtaggaccagccaaattaatcgatccgcctttgtaaccgacccaaccgtagcagccatcccacatggctcgtcgtcactcctcactgccactggagctctttttcggcaagttggcgccaccacaacttgacgcacttggcatctgtttgccctcgtctctcggatcggacccacaatcacagtcggagttccatgtcccttcgctctcaaactagacgagctctctacagcatcgacgaccgaaaaagaaacagctataccgcacagcaccggccttaattcgacgtcgaagcttagtactactagtacgttgtgtcgttaggctagccaacccggcgagtacagatgccgtcgccgatcgcacgcgggcacaatgattaccggctacgatccgtacgcgtcacgtcgtttccccgggcctcgctctgtcgcgaattcacggggcatgaagaaggtagcgcaaggaagagagctggaggatgtagtaaaaccgatcgacctgcgcgacgtacgcccggccgtgtccatgtgtggtcgctctcgccggcgaacaccaatgattgcgcctgtacccgctttcatgcgcgtgcctgcctgccccggccggcccccttgcggcgggtcgccaacatccaacgtgcgtgcgaaagcaacacgcgccgtggcttcgcaacagctcagttaattaggaatcatcaaggatgcacgcgacgcgcaacagaaattaactacgtctcagagatcggcggacggacacgggtggggcacagggcacgtacatgcatacacataccaaaactatatgaccgacagcttacatacgcatggccgacgcatctggctttgcgactgaggtatggaccgtctcgactgtacgtacgtacgtatagtacttattatggtcttatgggcgagcacctgcaaccgcatttgatgaatgcgagagacatataaatccgaacacagattgcgtggctgaatctggtctggacaaagcccgagacgacaacagaggaagggattaggcgaagaccataattccaccccaattaataccaccacgccctgaacaacctgctccaggtcaccggcgacgagccggtgagattccagtacggccgcgcgcctgatctgcccgttcgtttcagcgcccagagatcaggagaggagatctcggcgcccgatcccagtgacgccaacgagaggagatcaggtgaggcggccacgtcactcgcaaaagctgccagagcaccggacgttttatagctggcccatcggtgggcccggcaaaaaattatacacccacgtgctgggctgcttcacggtttccgtttcctgttccgtttaggaagagaaaaaagaaaaacacagagagaaacagctaatagggggatggcgaccccacctgcagcgacggagaaagcggacgaaagtaaaagcggcgcgatgccacgccaccacacgtccacacccatgccatgccacacatcgccactccgacccgacgaaaaaagggcgggaacgtagaactggacgggaccccacgttttttatgggcatcccacatggcacgttgcgtcgtggactcatgcgtcgggggcccaaccgtcactcggaagaaaacaatccaggggccccggttaccgctgcccctggccgttgcagattatgtgagaatcacggctgccctgactcaggatcagcccctaattaggagctcctagcttctgtcgttgggtaagttcagttttttagataaagtacgagttgatcttgagctcattttcctttttgagatagagatatcgaggttaggtttaggtacaattggacgtttactcaaaaaggttttatccaaaaccctatttaaaagacgacatgcattttgtgatggaagggtatatctcagttaatcagctaaacaaaacagtgggcaaagcaaaaaaaaattaaaaaaggagaaattgccaagttcaatatagcactaccctcactgtcgggctgaaaactgctcggtggttggatgacgccgcatgcaggtatagtagtaacaatttgcagcgataggcggtacccaacgtagaggtcaggatatgattcaggtcaggaaacaggtaaacggatggcacgacacggcagggaccggagcatctcgcagatcgccgggtcgcttcatacaggagacgagaaggacagagaggcgcacaggggcgcgcgcccatgatacaaaatacaaatcgcgcatactaccactgtacaccatcagtacatacatacatacggtttgtcacgtagcccgggcaggcacggcacagcctagcattgcagcggcacaccgcacacacaaccccccacacctgaatgcggatggcgacggggccagccagccaatcatgcccgccacatcaccaccgtccatccatccccctgcccaaccccgtacggaccacgtggacgcctccccccgtcggcccggaggaggagccctggcttacaggtgggccctgcccttcattatgagacagctaggcattagcctatggcgtccgaccgaccgaaccaccaccggtggcctcgcccgcccgcacgcctgccgcgctcgcgcgacggagcaccagcgctgctcccggccagtgtcgcgtagcgcgggggcagcgccgtactttcccctacccacgctgccccgatgataaattacaacgacggtgaagaaaaagaaaaggcacggccgtgccctcatccgcaccgtgcagatgagagacgagggatgttttttttaaaaaaaaaaaatttaccgcgtgcgaaggacggccgcgtccggctggccggagccggacccacggttcgtggctgcaccgtggggcccgcgggtttttaacccggcgcgccgttcagatcagatcggccacgtgccactgaatccatcgccacatttcccgttccatgttactcctgcctcagctcgagatgaagcaaactgcaaacacgagaggcctacttccttgcgttggcatttcgtaaagttagcagtagtagtatactccactaatttagtaccgttaattgtagtttgagagagactactacaggcttgggatccacatttgggatactccgttcccttttaccgagatgtagcagagaattcattgctttatcgtcctttctccatgcgaccatgcctctgtccttcacgagagcagtaagtatgattaggagatgatggcatataacttgaaccacactgaagacagtattagatacagtaacaagatggttaattaggcctttcgtcgacaggaggaggaaagacattcatccccacgcactgggcgcacgagagaaaacacagtggtagagaagtgatgtgaaccattcatggtgcatttatcagagatggaagaagaacaaacgaggcatcctacaaaagaatcctgaggagaaagaagagaacaaaacaaatgtggcctactgcattacagcgcgggttaatcaccgcaatgccatcaccaccaccgccataaccgctcacccagctcatggaaaagaagaggacaaactagagagcagacagctcgaggctaactaatcccaaggaaaaaatgaaagaaagaaaaaacaaatttacaacgaatgcacgaatcttgaggcttgggggtcacgccggcgaagaggagccgccggaggaggaggctgagcctgagccggagacggtggaaaggacctcggcgagcgcggtcatggcgcgcacctgcatctccagcgcggcgatgtagtcggaggcctcggcgaggagagccgggaatgggagcttgcggcagccgggcaccagccgcccgagcaccttcgccttcctcgccagagctggggccttcggccctttaccggacgacgaggatgggtggcgcgacggcggggagatggcctcgcggaggcgcgcgcggcgcgcggcctggatgcggcggcggtgggacgcgaggatggcgcggctccagcgcgtccgcccgcgcgccgagacggcgagcgcgcggtcggccgcctcgcgcacggcccggctgcgcggcggggccgccgccgaggaggagggcgacccggaacgcacgaggcggatggcgtcgaggagcttcgacgagtagatctcgtgcgcccgccgcgtccgccacttggaaggctgcgcctcggacccctccgactcccccgtcgcgccacgcttcctcttccgctcactattccccctctcctccaccgccgccgccgagcccgaggtggacgccattgcctcgcgcagcaaagaattcttgccacaaacccaacttacagcacagagaccaccaaaaaacagcaggatcaggatatctgtgacctctcaagattccctcctcctcatggagcatacacctggttgctgtgcagaggaggagaggggtggtgagatggatggaaggaatgggggaggaggggagttgggaggttggggaatataaagggggtggtggcatgtgcaaatgccaacactgatggtgctcccattagtcctgtgatccttttggattttccgagtttttttctcttctctgtgctgctgctgtgtgtgttagttaaataagtgtaattttgctcgtcccatttcttgtaattttttttatatccctatggtctatccattttgcatgtgtgacactgggagtaaccagctaattatgaggtccaccaggtttggactttttcagatcggtgtccaccggttggttcagggtggcaagagggtgcgagtgtgtaaagagagcggacaatatctgtttgttcaatcgaccgaaagcttgaacaaccgaaatcttagtatgaagcaaacaaggaagatgtacatgtatttttaggcgtgatctgttctaattacgaatccaacggaatgaatgtggaatatcaaatgctttctctattggccttgcatatatgcaaattttataattaggtactaagaacaaaaataatttaatctcatcaacaatttcaaaaatcaatataattagtacttttaaaaaagaaagttaccgaaaaaagcgttaagagtggattttaaaaagatcataattaggtactcggctttggagtcaactttttcccccaattcaataatttataaatttaaaatgaataaataaatgggatttaactcttaattaaaaagcataattataaagttgtgactgtgctcattttcgatttagttaattaacctgttatgattcaggtgtgtcctcatttgctccaatattatgcactatcgagcgaggtttgaatacaattggtcccatcttttcgcttatgtttatgcttatcaaccaaaatttaaattttcaacattaaatttgaagctgattttgaggtttttcatcgaagtttatttttcaacctttgcttttaggtcactaagaacacgtaaataaaagttttattcacaattatttatcgtttgcaaatatgacgtttagcttattcctggggcggaacatgtttatcatgaagatctgaaaattaccatattaatcgaattagaaaaagaaagaagatgcacacttaggccaacttgagctattcggtagcttgagctgcggttggggtgtagcccaacgccaacggtgtcgcaagcatcatataaacgttgggttgtgcagccgtaaccttctgaacacccccttatatcgtgatggtccatattatgacatctagtgattttttatgcaaattttttgcaaagctatataaaagtaaaattgaatttgatatacaactcttagcttctattttaataaatacaagtatattttttataatgtattttgaaaaaaaaacataattggatatcatatacaattgttagcttttgttttcatatatacagtgtggtttgtatacaatgaaaaacactcagggatcttccggctagcttcaaaagatggtgggctagtcgacttgggttcaaagccctactctttttaattatttgatattatgtcattccctaatattcatatttttagtttgtatacaatagttttgaaagtagagttcgattagatatgcaattatgatttttttatatatatatacaagtattttgtgtacaacttatgatttacgtacgaaacaatctacacatcatctgaacccatcatgatctaacggcacaaatatttaattaatgtgaaattttgtatgtctctagaacgaatatggtagctccttttagatctatattgacaatatatatagatagatagataggtatatatttatttatttgtatacgaagtataattttacatagaaaaaaagggaaagataagtactgtatatcaaatcaagttgcactttcaaatatattacatatataacacaattctatagggataaaagttgagtaaatttctaaaactataaatactttcgtcaaagtatcacaaaactacagatttaagagcgtatatcacgaattcataggttcggtgtaaaatttatgtaaaactacatatttaaatcatcatatcacaaaactacagaacttgtgatgaaattatcaaagaactacatgttttaaagtttttatccatagcactgttgaggttacaaaagttgtaggtttatgataaaattaatattaaacttataattttctagtacaatcaaaatctatagtttttttgaaaaagggtaaaatgatgctaaatatgtattttgttatatacattctcaaacatatatgtagttttatagttttatgatagattgatcaaattatctgcagttcttatgaacttactcataacagttatatataatatctgattcaatattcaaattatagctccgtgcaaaactgcacaagaagataagttaattagtcacctctaatattgtatgccataggtgcttttgtatgaagaagttgcatgtttttttttatcagttgtataatcaatgtcggggccattgaaaattttaatgttgttgaagggattgaaaactgaatttttacgtaacaaatatgtaatgtacttagatatgctcgcgggcactttgaaattcgatccgggctcagccacttataatataaaaaatatcatgtgtaaattgcgaatagaaagagtcactaaattttgttctgagtacggtctggtttagttcccaactttttttataactttcaatttttctatcacatcaaaattttcatacacacaaacttccaacttttccgtcacatcgttacgatttcaatcaaacttctaatttttgcgtgaactaaggcctggtttagtttccaactttttcttcaaacttccaacttttccattacatcaaaactttcctagacacataaacttccaacttttccatcacatcgtttcaatttcaatcaaacttccaattttagcgtgaactaaacacaccctacatccatcacatgaataaaatcacttatattttagactgaagtagtactattaaattatgagatgaaccgcagaagtaacaatctttcactgtgagatgtggccggcggatccacaacttcagttgtagcgccagtacagcctaggcatcgcatttccggggtgtaggtgaggtatactaaaaacgggggagctccaaacaaggagtactttgctcatgcagcgagcgagtgatccgatgctagtggccatcattagggcagtactacatgcaggccataaccacggtggtactaccaatctagcatactcctatgcattgagctatagcacaggcaagcaagcatgcacgttcctcaggggcatccagtgatgagccactaacactaacatggagccagggagagggtcacatgcaaggacgttgctcggcacaagcaacctgcgctcaactgggctaaatcattcgtgccctttgctcctcaaataatgccggtattcctcccctcgaagacgtacgtgcttatcctgtcgatcgatcacatgtcgttttctttgagtgaaacaaacatgttttttacgtacgttagtacgtaccccggttcggtccaaataaaactatggatttaccccggttcggtctaaataaaattcctacgagattctgtggatttagattattaccgctcaacacgtccttatctctgtctgtccaaattaaacacgtgcagtgccatgcagtaaaaacttgttaaacaggttggaattaacgggagtatatggtcattaatttgattgtccgtgtaaaaatgatgcgtgcatgcatggctgtgtccttgcagatgctcgcccccgttttatgaggcggctgcccaaccttttaatggccgccaaaagtcaaatgctcgtctcggtaagcgtaaactaagctgaaagcaagccgcgttgtaggtagccgtcgcgattcgactgttttttaagccgtcagctagcgtgctctgccaggccgggccttgttttaaatttgaaagcctatctacttaggctgcatgcttgcttgtttgcttccgtgttagcacgtactaagccgctgctaacctctaattagagtcttagactgtgtatttactagtggcactgctagtacaaaagtactaccagtgctgtgcacttgcgttgcaaacagggggacagcttgatccacagcttagctgaggcagaggcgatggtaaatgcatggtgctccttcaatttgttttgctccatcgtcacacactcgcagtgaatcagggataggctgttgtaatcaattatggtatctccttgcagtgtcgtctgatgttgtaaccaaccgacggcacagatcaaagcaccaatagaaaaccctgcgccttttccctatggcctgcggctctgcatgtgctcccaccgggtgtatcggttgactgcagcagatatatatcaatccacgggcctgtgccgatcgaacgcagagacgagacgagacgagacgcagggtacgtgcctaatcaggcacggggctgacgcacgcatcactcgctcaccgccagttcaacagttgacaaattgcgtgcgtatcgtgcgtccaagccaacgcagatgtgtgcatgcaatgagggatcaaacgtacactcgattggttggtaggatcagagagacgcaggcaggcaggcaggtgaagagagatcgatggccagattccctcctggacgatgcccccacatacgccatgataacgcccgcacagtaactagatagtagtagtagtacccagtaataattcagcatgcatgctgcaggaacacatgagccaagtaaaggcaaggcaaacgcactgtcatttcgtccccagccgagcttaatgtaagacagtgaagagaaagagatggggtcagatgcttgcagctatatgtgctttggttggttcgctgtacgtacgagcgagagcgatcaatcgcacacgacgaggacggaccggcgcttgtgttcagtgctcgtctcgtgtagtcgtgtgtgggggcgcgcgcgcgcgcgcgcagcgcgggtttacagctgcatcgatcgaccgagtgcatgcgcctgcagcgatcgagcgcaaacgcggaaacgcgcatgtgagcacgcgcgaggacggagggtgcatggcagcgagcgagcggacgctagctgcgccgcgccactgcacggcgcgcgggccgggtcaggtcgtgcagccgcggccgtacgtgcagcgggacagggggggggggggggggtgggacgagccgtgctgaatgaaaggctggcgcgtgtcgcgctccaattttgcgaacgcgcgagtacgtgctccctgctgtaaatggttccaaagcaatcgacccggacctgatcaagtctacaatgcgttaccattgcccactttttggagatgtgaaagtcgtgcttttgtgcatgtcactgtctagctaggattcatgagaattgagaactgatgcactgtttattactacttcgtatgtataagagaaagctcaagcttggtggaatatttgtgttttctgtagtgaaaaaaaacagatggatatattttacacgaacacatctagagaccgtgaaaatcagaagaaacaagaacttgaggacgcggacgcccgagtcgcctccgctcaggcgactcgggcggcgacccaagccaccgccaccgccgttcttcccccctctcctctacctcgccgccgcctgagcaaacggccagcaaagccagcagcttgctaggatggcagcggcggggctcgtggcggcggccaccctagatccggcgtgggcggatctgagggtggaggccggtcggagtggcgccgtcgtcgaggccggaggcgtgcagggcgtgcaggcgacggcagcaggtggacgtggtggtgacacgcggcgcaggggcacggggttggcggcggcaggcggaggcgaagactggtggcagggtgtgggccgcggtggtgaaggcggcggcggcggagtctgcgacctcgggcatcaccggatccgcgtcggccatcgccggatctggagccaggtgcgggagaggaggcggggtggcggcggggatgcagtggcggcggcaggcgacggggatgcaggcggcagcgggagcagaggaggcgtggctccggtgatggtggcgcgtggaggagcgtggaggcgaggccggcgcggcccgtggagatgcggccggcggcatggaggccagttcggtggcgtggcggaggcgggggtctggtgctgcgacaggaggcggttgcgggaggccctttgtcggcgcggtggcagcctccaactcccaccggcgtcttggcggcgatgcagtgaggctgtgggcatttgtggcgacggtggctagccgagtttcgatgaccggtcccttggccgccttggccggttctggtcggtgcagcagatgagtgtgggtgacggtaggttgcctcgagggttgactgcttgtgagacgtcgtggactatcgtgtggccgtcgatgtgagggtgcttgtgggtaatgtgcagacgctggctaaagccttgccgtgcctttggccggttcgatgacgacgacgccgttggcaccgtttcccttcttgaaggcgttgtcatgacgctctcccatttgccccacaaatctccgggtgtaaaccttgctccagcttcggacgagcggcggtggcgttacacgtcgtgttctccggacgagcggcggtggcgttacacgtcgtgttctccttgggggcgtcgcttcggagaagttcctttacatcgatgatattgatagtctcttcggttcaaaagctttctttccttggtgttcggcgaggcctaagcctcttgggtccacttcgttctgtggtgggcgacacactcttcggttgcttatgcggataaagttggagctgctcgctgttggggtgctgcgacgcttggcaacgatgacgtgttgtagtctctttcaaagagttggtgctggctatgtgaaggaagtggctctttggtggcttggctgatgtccattgtggatgtcggagctgctttcgctttggcggctttcgtggcttcagtgtcgctgcggtggtgaagtcggcgctgctgggtcgcttgggcggctagctcggtaacgataacacctcttctgtgatgtcggagctgttgtgccccttttgtgcttagcatggcaacgatgtcctgcatttgggctccactgttgttgttagttgtgtagttaggtcccatgctttcttctgtctgttgggtttcagccggttctccataattaaccgtgtagctgtatggttttctggcctgatttctcttataaactgggtcattgtctcttgtttatacagtttctccctctcttaatataaaacaagcaatgttggcttaggttttttttttaaaaaaaacatctagagaccgtacgcgcaatgcatgcatgggaactggaagtggaccagcatgcagctggtctaccataaaaccgaaagtacatgctcgtgcatatgcatgctactcgagggcttgcaagttgaagcttgcaaaagcagatatcttttccccatctgaaataaaaggaggacaggcacacatgcatccgctctcgatcgatctgttgcatttcaccaccccctgacgttttaatgccttagccttcctcctgcacgtaacgttcgtacgtaccccgcgctgcgcgaacgtacgtacgtacggcgcaccaaaatcctcgcgatcctgggacatccgggacgctcgcggcctgcgttgttgacgaggccgccgggtgggcgagacgtccgcggggaaagcgggtgtctcccgcggaggggcagctcgagcggtaccgcgcgccgagcaggttggcgggttaggcaggcacgggcacgagccgtggccatgatgcgcgcggaggcaggggcgggggcgtggcgtgcgcacggcagcgcagtgcggtgccgggggggggggggggggggggttgtttttnnaaaagacgtgccaaatgcccgggcgggtggctgtgggaacagcacgcgctgccgcggcccggcgggcagcccatgttccgtcagattctgccccgatctgggtgtagtttagcctggttctttcgtggtctctggcttctccagccgttcagtgcggtggcggtgggtggtgcgcctgtaacgacctgtttaccagtgcagatttttgggggtctgcatcatgcacgtatactggtatcgtcgttgttgtgcaggatatattgggatttgggaacaacttactattgctctcatcggatggcctaaacagtcagagagtaagctaaattttaaatttttaaacttaattttaaaattgattttgagatatttttaatatagttttttttcagcattgacttttaagtcatcaagaacatatatatgaaagttttacctataaatttatttttattccctaataaaccgttttggcttattagggaaaaaaccaaacgattggggcttatactttttttagccatgtgaatgaggcaatctagcgagccgtctgcacggttaaacaagcaaagggtgttttcccatgacaaatctcgttataagaaaaacgctaatctcgtttgagttagctacgatttttgtaggcgaatatattgattgtattgaggttcggggaaacagaaggaaagattcccagtcagagtcagtttaagtaatcctatatctgcatggtatatacggtcatctttggagtttcttgacctgactcgaattgggactctcgcaactcctttttcttcaaggaaacaaacaatgcgacactcccattaacctaacccaatgcaaatgaaccatacaacacctggctgcagcctacttgcaatgcttcaacctaatctacccctgccctataaacaagccagtcaggcgcccaagcgaaatatacgcatgctgctggccctccatgaggccaatctggccaacaaatactggagtttcatcagtgcccatttacagggcagcctctggtccgcgtctgcacacgagataaaggggaggcggagtggagcacgagctcagtatctacagggcgcggcaacaccgcctgcctgcctccctccaaggcttccgaccccaggagccaggcagagggggaccgggccaccgccggcagatgccatgaaaccatgtggatcaacaggtcgttcgaacagagctcactgtgcttgacaaacgtttgcaggacggctcactcgatcaccagccgtccgtccgcttctggggctctcaatggacggccccgatttcggttgagcatggggaggcgcgcactcaagatcccgtctcaactagctggtcaggctagaaaaaagacatcctctcttcgaaagagcggcaacacgaaaaaatgcaaaggttttgtccgggtgatacagcccgtgactaatgggtgatcaggttctcacgttatctaatgataccaccaatcccaacagcaaacagcactgtactgtactgctgatggagcagcgcgcatgatggccagaagcagtattcgctggctttgcaaatggcagccatggtgctgttcaaacacatggcagcgctaggacctaaaccatggatactgaaggggacgtaacattaacaatctgtcaactggtcatctctcatctctgtgtgtcccactaagattaataggccttgatctcagtcttctcggctggattccaatcagacctaaatctgtcatcttaatcatttggcagatgcatttgcagattatgaaaaggtagtatgagccaatactggtagtagaagacgcaaaggcaaacaagatgtgtcgtctagtgcctcgtatcatctgaatccagaatcgcagaagctccggcgataacttttggccagcgcagaatcgcccctcaatgtgcatcatatgaagacttaaatgggataccatgctctccaactggcccatgagttatcacattccaacgatgcaatctgatccccattctccattgacatctttacaggcgaacaacggtttgcgtcaaaaaaacaggggaacaacggtaagataaactgatagagatattataccaataaaaatcatagccgaaggggcccaacacactggtttagatgttgtaaagagaagggtcatggcacccaaattactgaagatttaaatattctctcattacattcactaatgagaggtacccaaaagttggattcctaggactaggtggaaaatttgagtttcctggtgacacgtccactcttgttaatcatagaaccgatcaaatgattgatcttatttagcaaattagtccagtcccatgtgccagatttaatcagtacgatgattggggaaatcaacacgcgtgattttctgcaaaagaaaaggttaagcacaaatatactcttttggaacacatgcaggccactacatcgcaatactgcaatcagtttgttcagttcaaccataatggtcgtccatgatttagatacataaacggaatgctataggatgacagtgaaacaaaactccatacgggcattccaatcaatcactgaacttgcaacatacgaaactatctgttgtgttgtcacaccacgggacgatatcattttttctaggcaaacagggcgatgtcaatatatataaaaatgaattggtctaggattctatagggtggaggtagcatgtcaagcatacagcattatattacaacatatacatcatccaaaggcagttggaactttagacaccctccaaaaaagagcttacctttctggcactaaagccaaattcacaatcagcacaggaattaacagtaaaacaatcaccctagatctaactataccttgccgttctttccagcggctattaattgtgcgctacttgaagtatctcttggtaccacagaataggaaagagtaatctgcgctggactggggactgcctcttcccggaatttgacatcgaaggcaacagattggtaaagacaaacttcgtcttctttgcagtagtaaacctacatacaacagcacactatactcaatggaaatagtacaaaactgaaaacgataattcacttagctaggttaccaacttaaaccaaaacaagtcaagatgcataatggtttgttgtgtgtcctaatccagggagctacccaaaaggggcaattgcgttggatgatcttgcattagctattggcaaatccagttttcgttaatatgcatgcaggttggcaggaagtgcagacaagcaacagataagcaatctggtgaactagtctcaatccagtttaactgaaccgtttttgttcacccattaccctctactgggtattattccaatctgaatcctactaccaacaagttaaacaaaagtgttgcttgactaaaatgcattactaccttgcaattgatccttcccgttgatgacgatgaagatttccttctgtacttgagtgatgcctgtcctgagtttagaaaaccattaactggctctatctcaattgcatcagctggttctatgtccacatcaaatttacttcgagcttcctgcaaatgagaacgtatatcatcacaagtaaatcatgctgacagccataaaaaacgttttgcactaagctgacattgaacccagaagactccatgacactatgaaagtaagcaccatccacttcggtggtgtgaccagatcattcaggcctttaacaagttaactgttctctttttttctcagaaaaagagtgtccaaaaggaaggaagaattgatatgcatgaagtatgattgcatggatgttatgccatatatttcatagtaggtaaaagcaaccagaaagaccttatagcataaaaacaaaacaaaaatagtatagtcctgtgaagagtgctgacaaaccatcgaatgaaatgatatttctatttaaaaagtgtaccatacaataacattcacaatataacgggaaaatgctcgtcagtaactatataaggctaccatatatgatgcaaaaacattatagctaaaattctgtgatgattttggaccttggagaaatggtaaccatcagggacagagattgctagagacaaatatccttcaattgaagaaccaccatcaatgttaataacatccgtgtctgctgatagacgtcttcttaggcgtttcaatgtctttggttttggtgatggtggctgaactccaatcaaatctagcgtgcgcacctcagcgcctttctcattcaaaactatatacctgattgtgctattgtttgtatctgctacaagaagccttcctacgatatatcagaaaagcaatagtttgcaccatattattcatcttgcagcacaacaactactgtttgcctattctgtcactgaccaggaaaaatgtaagcagcttacacataacatagggttgttcataaaacaagtgcaaatggtgaaatacataaaataggcaaggttagacgattacaggcaaggtgatccagtgaattgctaggtccatcacctaatcggtgtattcaggaaattaactctagaacaccattagatagcgtgattgttctaattactatctcatgtgtcagttaaactagacaagcaacacagcacatggaaaaagattaccatctcccacttcaacaagtcctgctggctcagacagctgcataaaaaataagtcaaaacaattacggtatgtcttagagctgttcctaggaaaaaaacatatatttcttttcacaaataatacaaaatagaacacactctaatactctattgacctatggactgcgttagcactagtatataatattgattatatataatcacgttttaaaatgatgaggatgatatagctattgtaagttaatttacttatataccaacaaaagaaattgccaaagttgtagctttacttgagctgacaaggctggaccatccttgtatcctgcacgtcccgtaccagcaatcgtcgtaactttccgtgtgacaggatctaacctttttatctgcaattgcataacaatgcattagaaatattagaacaacttgcagtaaaagcaagcagtaaaagcaagtttagtcaagagaaatagtttaggacatggcatggatcacttatgctgttatgcacaattcagaccaacgaactatttgataatggaaattgcatgattcagaccaaccttgtgcgctgctggtaatggaaagttgattcactgcctgattaccccatccattaatttgataaaattttcactggttaccttttttgtgagtgtgaggtacatacacaccagcacaaggcataattttgtgataacttgtttattaaccggaaaaaaaaatctaattcttggtaaagaagacaccttcatgaaattttacatactggatgggttacacatattagagatggtggttaccttgtgattgtaagagtccgcaacatatatttgattatcactagcatagacaacacccaatggatgctggagtagcacatccgagccagtcccatcatgatctccaaactgcaaacaaataaacaaatttaactttatacttcgataaaatttagagcagaacaaaaaaaatcttaaaatgttcagtcacattaatgctgaaaaaaagagaggcagaatcctttagtatcaggatatataaataccctaaacaaattctctggaatcattgggtctcccccagctagcgatcttgaacccccagatttcaaattaacaactcgaatggagctgctttcactatcagcaacaatcaactcctgcaattctgtgccgatagttcatgtgaatctgtgctctctggcatcagagcacaaaggagagaaaaaaggaatcaaccagaaataccaggagctaatgaaatcccagatggctgtgcaaacgatgttctggtcgaactgcgacatgaaattatttctcagaaaaaggatccaacaacatgcacgcacaaggtactgcaggaaccaagtgggcccaaggtagcacaacaaagggtaaagcgaacagttccagcattcacaatagaaatgagattctaatgcaatcccatgagagtagaatgaaacataaacaacatgttcattaatacacaatggataactgcaaaaatattttagtagcaatcatgtatctgacccaatacggccatgtcatttgtaagcaattaaaaagttactttctgatggaccaaacggatgaatgtagaagttgataaacataattacctcgatccattcaaatttctctcgtagccatcaccactgagaacttctgttacaccgtccaatgtgttgtgtttccagatctgatgttgtccagccattgcgatgtatagggtctcctttgagggatcatagcagacatcccatggtgaatttagaacctagataaacactttcaagtcagactgttttctatcaacactagtttgtacattagtatttgcattgataatcgtaattaactcagaattttttgtacagattggacttgtcagatcaattatataatatataaacatcagtcatcaaatttacatcaatacaatttatgcaaggggctgtatcatgtgtaaatggcacaagtgtcacaaatccctttttactaagcctagatgttcttaagggccattttggtttgaagtcctatcaaaactttgtttggtttagtgccaatttcagctaataagaaacaagtaggtaatgccaagatttcactaaaagctaatttggtttgcaacctaccaaaattttggtagggtagcaaaccaaaatgggcaaaaaaaaaatccaaattcaagatggatttgtgtgttggcatgttggtttcctttactcaactggcctatgtaggtagactgcaggactatgagctcattcacagtcaaaatgggataatgatactgcaagattatgtttcaatcaaactatctattcttctaactaatttcttaatttcatcttatgtgagaattaagagttagaactgagtagcatgattttataacgatcgtggaactcgaccaacattctgattttcccaaacaaaacagcacttgcatgtgaacaaaacagaggattatagcacagcaatatggcctatagacataaatgagccttgatttcatgactacattagtagagtatgtatacataaaagaaccatgaagaagcatgcctgattagttccctgacctcctcctctgtaatcagagcctttcgttccatttcccgccagtgttttgacagtctcgctcacaaaattaatctctctggataacaagaaataaatatccaattcaggaaataggaatagtttgttgcatatgacaatgatatgaggacatagttaaccatgctaatcaactacgaaatcaattttatatattacaacaaagaatgactagcagaactagttcatcgttcatagcaaaaggcattatttgtttaaagaattacacatttattccttttcaatgaaaagatgcattcaagataagtgaggcaagaataaaaggtgcatataccagtggcacttttcaccatcaaaacacaatatgagatgaaaggaagaacccttacagaatcaagaaaacaaagaattttctgttgttcagataatacaatcaatttgtgcttgaatagtttatttatttattttttgttttttaagaggatagctatctcgcaaatatcggttagctacaaaaagtttcacaactcttctctccataggccatccacattttctcatttttccctatttacccacattcgggttacaggatggtgtattcagcatagaatatacattagaagaaggatgaacgattatcagaccaacatgcatcatatcagaggaagccacctgctactagatttctaaatgattatggttacaaatttcagttttaccttcagttttccaatattgatattttgagacgtggagactgtgtaataagcaatagtaaacatatgacaatctgaaatcagtatcacatggaggcttagaactatgaaccaggtcagggttctgtaaaaaaaaggcaagccagttttgagccagcaggtaggttcctggaggtattcagagccataaaactactgaatgcgagaattacactgcatgttgacacacgccatttccatcaaataccgacattattttattttacataaggcataagaagatcaataacaaatgttgtgtatgccaccataaactgaatgaattagccttgtaaaaaaaatgaaataagcgaagtgaagtcagtgatagaactaaccgcagtgcatggttctcagtatctgcaacatacaggatattctttttggagttgtaagcaagaccctgaaattaatagcaagtattatgaggtcatataacacatgaaaacacaatgaatggaagttcaattcaaggaggtagctagacagggcccaggaattggttacaagtatatgaggtcacagaataaaaatatcacaaaaaggacagttcgattctaaaaggtatgagttcttttcaaataaattcacttaaataaacagagcatttgatatcttagcctctgcccgaggagatatcagtttggttcatgctgtacacaggaactatccaaatatcataccctagctctctactgtagccatggtccatactaccaacaaagttcaaaaggaactcctaacatggtgctacaaaagcataaatttattgtaagaacaaacaataattatttccttacttgagggcgattaaatgaagcagtatcaaatgtgccatcaagtagtccttcttcagaacttccaatttgacatataaattccccttccaggttggtaactaccttaattacagaaatgaggatagaacaaacagctaaatcagataagaaatagatcatacatgtgaagtaaattagcctagtcaatgcaatgctatatcgttgtgcaaaacaaagaatactcacaattcgattatgattactgtctgatataaacaaccgattgttcagtacatctattgcaagtttcccaggaaatttaagcggtgaagctagtaaacgactatccttgtccttctccaatgccaagggaagagaactgttttgtaataatttattttcttcataaaattcaagagctgcaccaaccacatcatcaaggtcctggaaataatgaataagtgtgattgactaggcattgacaccataactaccatgaaaaatgtatgaacaactatgccagtggaaaaaaaaaacaggggatggcttgtttgcagaaatcgttgtacaggttagacaggataaatttgtcctcatatcacaggatagaggtcaggcaggcaggcatatgcagcaacttctgttatcttgtaataacgagatttagattttagaatagttaggtagtccagaacagatgctaaaagaacttgacaagcaagatcaagattaccatggactattaggttctacttagccaacacaattcgtaatcgtttgcagcttaaagcaatcaaaataatcaaataaaaattttgtgttaaatatcatgtatgatggccaagacacctggcaacaggaggctgattccaacaaaggtaacatcattgatctggaaaaggttcagtggtgcactaggagagttgctaggagtctgaccatgttcagagttgacagaatatagtacagtatgaaccagattgaacttttatcagggggctcatctcagcctcctaagatgcatatacctcatttttaatcaagcaaagcaagaaaaaaaatccccttctggatggcctttgtagttattgtgatgtgaacctaggttctcatcatgaaccaaattcatgttttgtgctcatctgttggtattaacctgatgcaaaataaaagcaaccaactactaaacatgtaccatatttatgaactatatgggtaacaccctacaaatatatgctttgcaatgtaacaagagtcgcaggaaacgcttctcttgataataccatcactaggtttcagcctgagcacagccatgacatggaggcaatgtagtttaaacatcaataatgaataaaccatttagttcgtgtggtttaatgaatggcagtacaatcaatttatgtcaaacagtccagtgtcgccactaaaattagcacagacgtcacctagtatatcatgttcatttgagggttggggcaggtacaacataatcatatttgtggtatatcagcatgggtcagttgccaatagcagttaggacaacacagagcataagaaattagcaaatgttgatttgcttggttactcttaaataaaactagctacaaaccccaggtaactgtttggtatatggctcatgatggcatactcgatttgccagccatataactctaataagtactacaaccttatatggagttgtattcaaaacgcttccctcagatattcttctatctgattattttgctgttatagtttagacctaccaaaatattgttggatttttcctcctctcctgatcaatttatgaattataacctttcagtaaatattgtcgctccccttagcattattttaattatgtaatagatatggttttggaacttaactcctaaattcttaatcaatgcctaaactcttaagcaaggatttaaatctccggctatagctgccgctatagccggagatagctgctaggagaagcaaccactaagatatatctaatttacagctacacgttctaaggcgctattagctgcctttagctggagatagccgctaaatgggctctcaaatagcggcagctaactcgttggtgggctgaaatcctgaaattggcgaacggcccatatcacctaacgaaaccctaactctctccattttccactcagtcactcttcgtcctctcctgtcgacggcggcttgcaggcttgcagcggctgctcaaggaggcagcagcagccgcgacggcggttgatcccgaagccggtggctatgacctgcagtggcggcggctgctcccgaaggtggtggctgcgacctgctgcggcaacggtggcggcagcggcggcgactcccgaagacaacagatccaccaatcccggccccaagcgatgactgtgacaggcggcaggcggcggtgcttgttctgtcagtattctttttcttgtgctcgagccaaccttgtgttgtttcttggttcagagatggattggtggcttggctgctcatgaattgtttcttcttggtttgttggtggcttggctgctcatgaattgtttcttcttggtttgttggtggcttggctgctcatgaattgtttcttcttggtttgttggtggcttggctgctcatgaattgtttcttcttggtttgttggtggcttggctgctcatgaattatttcttcttggtttggttggttgcagtggcctcagggtgaggagtatggaggttcttgaattgttttttttgggttcaagttcaggaattcatgggggaggaattcatgggcatgttcctcctgtaatttagcaagatggttgaggaagtggtgaggatttgatcctactgattatcaagcaattcctctctccctagtcttctctgctttccccaagttaaatagctttctcttccatataactgattatcaagttatttatgtctaatttttgcaaaaaccgctaaatagcttagctgcagctatagccagctatagctgatcatagatgatggagaacctagcagctaaatgtcttagccggagatttaaatccttgctcttaaggtgcatctagtagaatctgttgcaggattaaatgatgcaaactggcaaacacagatagtactacacaagttaggacttaatgcttgtcttttgaatagaatgttctagtgctaatacctttctgtgaccttcacctgatatttgtgctaaaaccttcccgttgggcccaatcacaacaaatgtaggccaagagttcacccccagttctctccacaagtacatgtccccatcatttacaaccttaagaaagaccatagctttaaaaagttaagaacaccacaaaaaagcaatagacatgaaagtctatgccagggaggagcacaggaatgatgtttctcatttcaacatttcacaagttatcacagctgtattaccggatgagtaatgttgtagcgcagaacagcatttctgatggcttcaagatctttttcattatcaaatttggcagagtgcacaccgacaacagtgaactgcacaggaacaagcaacattatgtaaatatcaagatatcttcaaatcataccagtttcatcaatgagagacagtgttgcagcaaaatttcacattatggctcgatcatgtattatatacttatattcaaattgcaggtgccatgagcagatccatctaattcctaaacataatatccatgatttataacttacagatgtaagaactaagaatattggatgagtgtaaacatgtgagcttataaggacggaactatactaccaactttttttttttagaacacgcaggagatctgcgtatcatttcattaagatagagaagaaaagatgaacggtgttagagaaagactccgacacccgtccaccaaggatacaacagaacaccacacacccaaaggaacaccacacaaaacacactagtgcattagcagcccaatcctagtactaccaacttcacaagttgatttttttgtgatggtgaattataataaattacaagtttttacagctcagttcagaggatctacagtacaatattttgaggaaaactcagtttcaggactaacgaatcaccatatgatcagtagagagtagttaggagaaaaggaacatgaaaaaaaaaacatcattagaaataaaattaagattagcatcgtcaaaatttacggcgcagaaatactgcagttataatatatcagaacaaatgttaagtagcaaagttataaatcatttattgattccaacctaaagctcttgaaagaaaactaaacatacagtccagcatgcgaggagacagaagctcacaggtttatccttgtacttcttctctataaattccaggtcgggcaagacatgcatgcaattgatgcagcaataggtccaaaaatccaacaggaccactcttccttttaaatcctgcaccaaaaattatgtaattgctttaagtgataatgctatatttccacggacctaaattatgaagcagaaaataaacgaaaacaaattgtcattcgccaatcatcatatctgtatacagctgaaaatcaacccaactgaaaatggtgccttgtcttgaacaggaataaagaaaagggaaacaatcggtactgtagcaaagttgcagctactgagaataacctaaaatgagtttaaattactcttccaaactgaagtggcgctgtattcaaccaatcaagctttcttgggaactcaggtacacaagtagcagaacctctgaggaaacagtttggaagtaaattagtgcttcagtaaaaataaaaatcaacctcagcatgaagcattagaccttgaaaattgatgaacatgtacttagttacctacccagtttcaaaatcagctaaatacttctttatttgttgaacccttgatgtgagttgttctcctatagaaacaaggcagagtgtgcagtatgtaagagaaaagattgtgaatcgaatcaaaagaccaaggccaatctttaattagttttggatccgatttcttccaagctagtttcactgtagtactcaccaaagttgactagcaaatctagtctaacggactaaaatgaagctgccatataatgccagatggaacaaaaaaaatatgtagcatcaaatctcacataacaccccatggtcttttttcagcacaaatcaaatcaagttactgacccggatgattagccaggattgattgattattcaaattattcattaaaaatgaacatacagaacctatatagaaattcttaccttcattactagcaaatatcgaactatttccacccgtgaaataattaagcagccctttgggagatacaaactgcatggcctgaacaaaataaaaataaaaacttcgcaatctgatctcagcacaattataggtgcccaaaaaacataggtacccaaaagaatttgcccactacaagagtggaaattatggagaatggaacgaaaactgcaagctatattaaaataaattatagaaagtgataacatgtgagatggtgccattaggtttctttaacatgtcatcacccaccatgcgatacattcctcttacgtaagttgttccgacagagagctctgagtaattgatgcagccaggctcataccatggacagtatagaagtgataattatatgtgttgaggaaaatgactaactgcaacatcgaagacaggaatggtgtgaagtgaggcattactaaattgaggctaaatagctaaggatgttaggtaacagctaacagtctaatgcccaggttgtgaaagttagtttagaaccctcatcttgtatgtggcagtgctattatttgaaatcattcctagcagaagcacatttgcagtaatttgtttggtagtacttaacaaaaagaatttaaccattgaagaaaaaactaaatgaagtcatgaatatttgcgctttcggctccttcgctttggctacatcgactacggcacaaagggctatcatcgtgttgagtactcttgccggttttttctccagtccaagtgtccgcgctgctcacgcttggactgcggggggatgttaaagtatatggtagttagagtcatattaggataggattaatttgtgtggactccttccatatctgtaatccttccttatctcctccccatgtactcctatatataccagccctgagactcaataaaatcgtcccacgttacgcagtattcctctctccctatactattcaacaaaatagaaggtgtgtagcccggatatgtaaaaatcaaagtcatacaacaaataagtattgtctcacacatgcatcaagggatcaaaagcaaagctgaaaaccgtgaaacaactttgtagtataacaatggtaccttccaattcctggttgtatagataagacaagaaacagctattccaagacttccatatcttaatatgttccgacgagaacctaccagcctgcagaatttcttttctggatgtcaatcaactgtgtcataccgaactacataataatccacatattagaccaacagcattgcattcttttgggcattatatgtgaataactcttgtagctttttttttaacaatgaaggtttagtgtaagctgcgagttcttggaatctgatttggaataagctggcagtttagtacatacaagatagaagtgaagctaagattctatgatatagttttaagcttctttccagaaaccaaccttacccttcacgggaatcatcaattgagcttgcagaatttgtgctcggagcagattcagcattagttgctccattcagaatctctgttgagggttttaaggaactaatattctcagtattttctgtccgttcatctgcaccaactttcttttaatcagcaccaagtactctagtagaaccaacagcaaatgtttctaactccattaacaatgagacaaaagaatgctaaatgctgtaatttctgcattccaatttaactacttagaaaagtgaagtccaaccccaattcaaggaaatgggataggggtcttattcaaaccaatgaaacaaagcaaatataatgagttttgcacaacaagatatgcagattttttttttctttccagtttcaaatacaagagatgcattattttattgaaataaactttgcttgaactacatactgtggtaagcattagaaccaccatacaaaatatctctaattgaaatatctccaatattcttccgtatgagtgagggactggcttgctgtaacgcatcttcctccagagtagtcatcacagcaatgcatctgcaaaatttgtaaatagcataactatttatgctaaatgctccttcgtgtacaatttttttctcaattaaatgaaacctgaagggggttccttatgttcctcaatcaaaaacattaaagataataaaaaagatacattgcaccacttatttgaattgcatggatttgaacagtcagactaaataattaaaagatggtcgttactcagggcatccctcctaataaggacatcataaatgatttggactgaagagcatatatctaatatgtgctatttttgccacagctcaaggaagtacataaaactagtggcttaggatatcaaccaaaataatgccattccattattgcctcccaagaaaatatcaaaatacgtcttctgagaacttaaatactgttatcattgttgaattggtcatatgataacatatggtactaatctttttctaagaaaatccatattaaaatatatgattgcaatcaataaaggttgtgcagtaatcaaaataagaagacataaacatgacgataggtaccacggacctcatttcggcagcttttgcagcttgaactccagcaagtgcgtcttctatcacaatgcactggtacaataccgcaaattcatcacaccccattcaaaatgtttagaaaataaacatctggaaagtattactgacatctggaaacaataaaataaggcaactagccaagtggtaacatactcaacatttcatttcactactaccatctttgggcttgtaatgacaaagtactgcagccaccacccagaattagccacaaatgctctacatataggtcatgaaggtgcatatttattattgccaacaatgatgcattgtctaatgatgcttcaaacagcgatacaggggaaagggcatctattttacatgtatgatgggtcttccataacatggaataggacttaactcctctgcagtactgcttctgcagtaggagtcgctgacattggaatagcattgctagtcataaccataaatcattcagaagctataaaaatagctagacaagccttcttccgctgtctgtttgatctaggatgtatttctccgtgtaccaagaggctatttatgaactatgtcttacatataaagtgtttgtaggattgaggttcacatcagaatgatggagatttaccaaattcacttccacacagcataaaaccagaaagtagatattttccatagccagtaaattctaagttgctgatcttatcataaaagattgtctccataataatttgctagacaattacctcatctgtgtcaacacctagggttttagatgctgccaaaaaaatgtccggagcaggcttcaaattttcaaatgcatcagcagaaacaatggcatcgaatctgaaatttgaaataggtttatcaaaactaaatagcaaacaattaagagattaaattattgcaataatacatcttcagaattatcagtgactcccaatggttttagaatatttggaaatacctaacacgacactctctctgaaacagaattatgatttaatttctatcaattaaataaagctcttcgctggtaaaagagagaatgtcgtggagattctcaaacataagatttcgaagaacatcgaaggaaattgaaatttcagtagcctggcaagtgcagagaaaagggtcaacctatgggttttgctttaacttagaactttattctggttcatgggaggtatgaagaggtatagccaactcatagcattaatagtttaatactcggtacctcttgatacaaaaaaaaaatcatgacttaaataataagacagtagcatgatagcaacaagatatccagtttatattcctactttccttgatggtttttttttctctgaccaataaatagctactctcttatgttgagtacctactggaaccaccatcagagaaagtttgattcagactgaaaaaaattgtgaagacaaacaaaaaggcaactaacatatatgatcttaggcaaaatatgacaagattctctcaaaaaaatgacataaaccatgtaatatattggaataacaatgatacttaaaatgctagtagtagcaaagaaatcttggaacgtgagcacaacgatggcattagcaagtaagtgcttggaatgcaaaggaataagcaaacacctacagcgacagaggcaaaccagcagctgccaaatttgcatccaccttaatcctatcagcactggatgcaacagcaaccttcaaacctgcatttttgcactgaaatattgacaggaatgagctgatgatcacttattaccaaagtacaacaagttttaactcaggcactgcaaatacagaaatacctctgttacgagatctagagccccagggaatccaatgccagcatttggctttgcatactacagaatggaacataatttaagaatgacgccatcaaactacaatgagaataaacaggagagatggtatgaacaaattaaccttgtcaagatatatctcaaaaaaacgtttcttggcactttcagcgttgaaatctttcactcccttcaacttcgctacacctccaaggaaattagcctcacctagaatatatattacaacatttcaaacaaactacacccaacaaaatctgaaggtagctaaattcatttgtgtagagggcgatcctgtcaaaaacggcagcagttataggttgtcatcccccaaagtaaaataggtaagacattttctgtctagagatagcctcaatacttctcccaacttctatattgaaaaaaaaagtaatattttcttagtcctcacatacttgtcatacaaagtaggcaattaacatctctcgcaagcactctgatgcaacaatatactctataggcattaagagcatgctaaggggtttacggttactatctaattagcattcagcttagcaatcactacaattgccaagggatcacagaagatcagcaatggtaggccatatgacatactgattgccgtatccactttaagaaacataaagccacagaacttcagaggatacaagcagcggcggagcttccgatatggcaagatatggcactcgccatacctcaattctattagccaccggtggagtctatgcttgcatgattaacattcactgattcctccttgtaattagctgacttggatgttagttagttacgtgaagcaactaacctagtatcttgttttcactccttgtgattagctgcttgtataagcataagttgttagctagttacatgatgtaacctagatcaaggtttaatctatatgtttggcaatatctatctttccgaaataatttgaaatttgaacaaattttgatcaaatttgaatagattttgctatattcaaaagttttctttgaaaatttccaaattttcgaaaatttcattcgggaattttgaatcctaacatagatcaatatgatttgttgcatcaaaacaacttttgcaagaacttttagcgatgcatgggaacacattgcaaaactatgccgtattacctacaaagtattatgttgtttttgctgccacaccttattgttttctcttcctccgccactggatacaagcaccctgtcaaaaactattctgatggaaatgtataactatggatgtgaccacagaccactgttacaggcatcctaatgaaataggagtatagtactataatacatatagagtttggcaggtagcggagatacgaaaccaacgacgtcaagggagatcccgggaaatattatgtctaatataggaagctactaattgctacaattaccgaatcacacgcaacttaaacagcctacgaccaagtttatgtcacacaagcatagctacgcttaccaatcacgaatcatgagtaatcgagaaaagtaaaataaaaatgcgcgaactacattgtcaattcccagtaccagtaggttgttgaacgtcgagacaatttacctgtgcccatgtaaggaacaaagtcgtccccggtgacgtcgacgcccatctcggcaaataagtcgacgcccgcgaggcgcgagagctcctcgctgttgcagagcacgccgtccatgtcgaagagcacggcggagaccttcccccaggcccccggcgctacctcggtctccggcgaggaggatgccggggcggaggcggcggcgacgtcgcgccgcccgcggcgagggaattccattgcggcggcggccggcggtattagggttttggggaggagaaggagagggcgcggcggcggtgccggggaggaaggcgggtagtgccgggaggcgaggaggcggtggaagcttcctggtggcgcgaggtgccgcgccatggcgaggtgggcgtgtggtttgtcaggttttgggctcgccgctcgcgagctcgagtagtgtcgagtgtgtgtggcggttggttggggacggtttatgcgcggcgatggctgcgacgcacgagtggatggacgaggtgtgtttctgcggctctgttggcctgtggtggatacgtctgccgtgtggtgtggccttatcttggcgtgatcgactccagtcacacaaaaaaaataggaatgggaaattgaacttttattttgctccaaaagcaccgcgtgaggaatactcacaaaattcaacacaagtattcgctgccaaaaatttaaatttttaaaattaattttaaaattaattttgaactatttttcatcgaggtttattttttacattgacacttaaatcactaagtatatatgtatataaatattttccctataaattattattattttgctaatacatcattcggcatattatcctcaattggccaacattatgtctatgaaattcctttatcgctctgaaagcatgaaattcaacatgactatatgaaatcctcgtatgtgcaatactttatgaaattttgctttgaaaagactagggtgaacattcaattagttatatatgcaacaggtaaagacgtattttatataatatactccctccatctacttttgatattaatatttcaccttggtacacagactaaggataagtaactctacttatcatccatttaaacatgctactagttattcctcgtaaacaagcgattcattaatatttgcatttctcaatgcccatgtagccaatcttgtgtagaagaatggagagtcacgcattaaatccgagaaagtcattaaaatgataggttgttggattgaaatatgcctattaaaaataaattttttagatttgaaaatatggctatcaacagtagatgtagggagtattaagagaataagagctgagtaataaattgaaatattgggatcactttacattataattgaaaaggttaatgaaaatataaacattaggatcaaagtatatatatatatatatatatatatatatatatatatatatatattaaaattgaaaaaaataatgaaaatcttttctagcttttgggccaaaagcctttcttccttctcagtacctaggccagtccactgcctccttccgtttggcttgcttcccttcgaccaagggacaaccagagacaagtggagccgtaagcccagctcgcagtgtccactaccatcttcaacctcccgaagatagtctcgtccgtgtccatatggctgcctgtcacccaaaattggttgaggatttttgatccactcgatctattaaagccgaatcgaaagggaaaatcatggagaaaatgataagtgaggagtggaatgatttttgcaattaaattggaggagaaaacacactatcgatatggtggcggtgggcggcgggaggcgtgcggggaatggatcggattaaaaagcgcacgggagaaaaaaatagcaacaaaaaattgacaaaaaaaccaaaagcgccaggcgcgctgtgaacagataggaattaaaaaaaccggacgaaaaaaaaccaaagcattagcgcgtgcgaaaaaaactctttcgcgtgaaaaaaaaggtcgggaaaaaaccggtgcaaaaaatcaaacggacttttttgtttttttacaggcgaaagtcttttttgggagtcggacaatttttttttgtacgactacaattttgagtaagtcgaacctttttttacaaaacggaatttgttgtctcggtagtagagatagaaattagaaccgaaacataaaattaaaaccgattcaaacatggatggcgtaccaaaataccgataaaaacatcttcaatttttataacagtaaagatatgtagtacaactaattcatttgttgcttattcttttacgttattttctactccctatcatcatcaatatttggcatttaggataagattcaatcaaactttttaaacgcagacacatatgcatagacatgctgccaaccgccttaatgttgtggccccttagctatgaaagtccacctcgtatgtctcataggtcaccaaaccactatcaccaagtgcgcgggtgttgcacacctatcgttgttcctgcgtcggctcgtatccagagccaactcattgccgaaccacatggcgtgtccacgcaccctacctcattgccaaggacctagatccactaatcgcagccagcgctggtcctgagtttttagggaccggtgcaaattataatatagaggcccaattttttatggtaatgtgtatcatgtttttcataaaaaaaattgtgtctaaacacaatcttaagtatttatt

SEQ ID NO: 9329 - DNA, 24589 bp, Oryza sativa
  unsure (1)..(24589): unsure at all n locations
attcctgcagccccttggttcaaatgagcattaattagcaaggtatgatcatatgtacctgtcaagaagatctgaacatagctcctcaaatttagccctggtaagagttgtctcgatatgcttgggcccatcagcagtagctgtaatgaagggtaaactgaaagaagcataaccaatggttagaatcaaccaagggaatcaaaggattgctacccaaaaggaaacagtccaatagcacaatgctgcagcaaatcaaggcggtcaagcaagctaacctgatatttgtttgggtcaaggatgatagctccatctttgccttctcagctgcttctgtaagacgttgcaaggcctgcttgtcttttagtaggtcaataccttcatcattcttgaagttccccgccagccaatcaacaaccctctgccaatgacaatgatttgtgagcatatacatcttgtagaacagtaagaaatgatgctaaaagatctagcagctacagaaaattataacaaatatacatgacgtaagacccttcaaattaagcaaaagatatgattaccaaatgatgaattagaatattacgattactgagtcggtccatccatttgtttcatcatatcgtacatgtttaatgaagattcaaataattcaggcatccaaaattccaccatagagaaatttattatttattcactgtccccagtttgactagagattaagaacttcaagaaaaaccatagggcatatatatgtagtactgaatttactgccaacttatcatcccctaatcacccagaattaaaggctcataaataatcaaagatttggatggaatatacttcactacgaaactaattgagtccctaaatcaattcttaacggttccgatatgtatagttcaaaacttgagtccatatcaacacattaatactactaaaaacttaattttatatattgaaaaagactgttccttgaaatctcggaaagcaaaactaaccttgtcaaagtcatcaccaccaaggtgagtgtcaccagatgtagacagcacctcaaaaacaccatcaccaacttcaagaactgaaatcatcacccaaaatatagttaggagctgaattctcatttaagagatgaaaagtgttaatttaattaacatttgacagacgaaccaaaatgaagtacacccagaaggatgaatggataaacaaagttcaatagaacagatttgatcttatcaacacaacacaatgtgaccataacggcataatgttactataataattccttcagtctggaaatgccccttttctgaggaacctaatcattctcctgtcacaaattatcacaacgtatttggaaaattgctactattgccataagatcgtagtatttgaacatacagagtcctcatagcactgagcaaaaagttgtttagaccagcattagcctttgaaaattcattacaactgtcagaactacaactgaatgtaattaaataactgaaaaaataattgtccataacagcaagaaaaaatgtttttatttttagttttttgacaaatacttcacttggttatgttatgtcaataaaaaatacactacaacagagtacgtgaaaagatgcaaatagtggttaaaacaacaataactggttaaaacttgtagttgcaaatagtgttcagaaaggcaccgtaattgtaggatagatacctgaaacatcaaatgtgcctcctcccaggtcaaaaacaagaatggtctcattgttcttcttttcaaacccatatgccaaagatgctgcagtaggctcgtttatgatgcggagaacttccaacccagcaatccggccagcatcttttgttgctgtcctttgtgagtcattgaaatatgctgggactgtgatcactgcctttgtgactttatcgttcaagaactttgatgcatcatccaccagctttctaagcacctggagaacataaaatgatcaacactcggattaaaaacaatttgaaccataaaacttattttgcaggcatacataaaacatttgcatgcacatgctatttcagtttttgccaacagatccccaaaagaaaatggcacattcgactccaccaaaattacccatctaggcctagtaattgatgaaagaacaccagtaggaaatattgtactgatgaaaacaaagcaaacatgaagggaacccacaggatttgcactataagctgtcaagctcaaagcatataagatgtctaactcagtccatatatatatatagactgcatcaaaaatccacgtgcacatatttagatatatacaaagagcaagggctgttcagtacaaatatcctactacctgcattcccttttgtgaagtgccgttttaaaaaaaaaaaaaagaattctatagttttgtgaagaatatgctaaacaaagcatacaggatgggattctatttgtgagacaccaaaaacactgttatggaagctgtgctattgttggcatcaagagaagtcaaggcgagattaagcaattaaccattaacccattattccatagagcttcatgaacagtcacgatcctataagctagaaatcaaaactggccacatctaagcaacgcaacaggattccatcttccaaagcattctttctagattctagccgtcagaacccctcaattgatgatcaattccaacacatggtaaacaatcacaaagcgtaagccacccctatacctgggcggagatctcctcggcggcgaactgcttgccaatggcgggacagtcgagcttgacgttgccgttgtcgtccctgatgacgcggtaggagacctgcttggactcctcgtcgacttcgttcatcttgcggccgatgaagcgcttgacggagaagaaggtgttctccgggttgacgaccgcctgtcgcttggcgatctgccccaccagccggtcaccggacttggtgtaggcgacgaccgacggcgtggtgcgggcgccctcggcgttggtgacgatcgtcggcttgccgccctccatggccgccaccgcggagttggtggtcccgaggtcgatcccgaccaccttctcgcacgccacccgcagcggccgccacctccggcccccgccgcgcccgtacaccgcggcggcggtgcggacggagacggacggggacggccgccgcctgccatggtgggcgaagaagggggtcgaggtggggaaggtcgtggtcgccatggccaccgagagagaccgctggtgctagctaggtcacgaaaccctaggggagggagggaggaaggagaaggtcgtggtggattcgagtggtgggttttttgagagattgggggagaaatggcgagaggttgggggaaggataaggaaggggagggagggttttatagacttcgcgtgtggccaccacactttggaggccagcctgtggcctcttctttcttcccttggatttttactatggttgtggtggtaaatcacttcagttcatatcactccagtaataatacttagattagagtaatgctacacatgttacaaataatatcaccctagttagtctatgtgaaaatgaaatgaagattcaatcacaacgtaccacatcaatttttatctgatatacttgtacatgagattttttttcttttacaagtatcatttttttttaccaataccatgttgtgacatatatttataatcagataatttaaatttagcttcaatttttatttattatgatataagataagaaaagatatttgctccggtcaataaaagtagtactccctccgtttcaaaatatttgacacagttgattttttagcacatgtttgaccgttcgtcttattaaaaaaatatgtggtcaaacacgtactgaaaagtcaacggtgtcaaacattttgaaacggagggagtatttgatgttaggacgttgtcgattagagttgaagggagtatattagaaaatgtatccacttatttattgtaagtcataaattttaatcatttggtgataaggacttttcaaacactttagtctcaaaatattacatctaagaatcatcctagtagcaacattttgagacaacatagtatctagaacttttgtaaaatttggttagtgataattagtaaatgcataccattattccatatcaatccctgccaactagtgttctcttagaggaagtttaatagtatagccaactactagctccaaatcaactatagccaacgtaatagtcaattcatacaatagttgtttactatactattaatacttggtcccacatctcatacacacatgacgtcttggagtccgtgctgtagctgactataaatctgtagcccgctgcttttctttctctttcttaagcctgctattgtacctgctctgaaccggtaaaaacctcgcagtaggctgatcctatgtttctggcccagaaattctgggtgtggccacacggttgggcagggagctgtggctggagcagtgcatccgggaggtggtggaacgttctggaatcaacgggacggggtagtagctagggagcacacgcagtaagctcgcggaggcgttgagaagaatgtgacacctgctcgcccgcgtccgcaaagcgcacggaccgtatcgccgacaggtggggccgcctctaccggcagggccttggaccaccgttgcgtggggcgggtcgctggaatcctgcggttgatgaatggccacgacgacggggcgacgtggtactatgcaagcggacgaaccagatcgcgtggcttggatgaaggtacccatcggttggcaataagccgtactataaaatcagcgcgccgactgatttatggtctgtcaccatggtgagcttctctgtatgtccataatctttcctgtttattcagaattagttttatgccaatgaaatttgtaacaaaaaaattcacacattgtgatcccttaattagtgatttcaatccttccctcgtcacttacagtcttaatgaacacctaaaataggtaatattgtatagtggcttaaaaatttataactccaactgtgggatctgtctgataactaaaaaaatattgtcctagactccatgatgtaaaatttgctaggttaaattagaccagattttgtttttagaattgcatgtaacattttattttttaaaattattcttaccttaatttttcctatgaatttactttttgccatcttctcgagagtgctcaaatgccactctcccaaaatttcattcccaaatgccacccggacctacacgtcggcctcacacatcacctggtcccatgttacttttgtttgaatgagaaaagaggctgacatgtgggcccggataacattttagcaaaaagtaaattctccctctaatatttagtctgcattaattttgcttgtaaaatttccttgatggctaacattgatctcttttttttccttgttattttcctcctcttacatgcagcagcaggtgttgcccggccagtagggcacccaaggcccagcacgcgcgcctgacgacattcgtccgctcgtcgcgcgtcctttccttccagccggtagcgcacgtcctcgcacatgggccaatcggcccaacctcactgggagcaggcccaactcggacgcgcgtacgcgagaaatcgggaaggcacgagtagaaagaaaataatcagagcagaatcagagatcgcacgggggacacgtggctaattttcaggggagctaatcctcccagggagccacgtggccgaatcatatgcctgatttttatccctaaaatcggtttagataagattagcgaaaagataatttaaaatcagaacttttatatatgtgtccaactgtccataacaacttaaaagtaaatactaaaacgaaactacgttaaaaatactttaaaatctggcaacggcttattatttatagagaaatgatgaggcccgaaaacagtgtcggaaattcctgctaatcgagcatcatttttataaaaagtacctctctcactgtttcaatctaaaaagttcttttacaattgtatacacatacataaagtattaaatataggttaaataaataactaattgcatatattgcgactaatttgcgagacgaattttgtaagcctaattgctcaatgatttaacaatgtggtgctacaataaacatttgctaatgacgaattagttaggcttaataaattcatctcgcggtttactgatggattctgtaattagttttttattagtgcctgaacaccctatgcgacaccctatataatacccgatgtgacacgccgaaactttacgatccttgttgacaccctctaaatgcatcatgtgagtacttcgcttctgatgaaggggtgcaagatgagcaggagaatgattttagtgtagtatctacaacctttgttgttcatccctattcctaggttcatttgtttctttagaggatcattctatttgcaaaagaattgatgatattacataatgaaagtttcttgtaattcttttcatttgcgtatttctatgggtaagatcatgtattatggggcaaccatcacatgaatataaaacaaaggatggtatttcatgaaaaaaaaggtaggatgacgtgatcacggctactatgtataaaaccattgctcacatcatatatcatcaaggaaggtgtcgtttagcgcaacacaggggagtaacgcacgattaggagtcacacattgataagaaaaagcaaatgctgaaaaataaattataataaaaaaaagcaaattagatattaggctttttttttaccaaactttgaaagtggactagggctaacataagatttttgcaatttggcaaagttctacaatctgagcccctccacgcaggcacaccgttgatcttctcctctaagcggttactccctccggttctatattaattgatgttttggataaggttgaggtcaaacttttataacttagactattaataactttaaaaatatttagtttaaaggaactagaacaacatatatagatttgtcttttaaagtactataataaaaataaacatgcatttatttattatatatattataacagaaaaaaaagatcaaagatgtatcttgtagaccgtgtcattgtctaaaacgtcaattaaaatgaaaccggagggagtacacgcaatctggtcactgccaaggcaccactactgtcctcgaaggtatccataccagcccagggacgcatatcataggattatggtccaaactgcattgcatagtgcaatctgcgcttcttcttgttgtttccctcattatctagagcgccgagattagggccagtgttgccaacttgggagcggcatcttctattaattgttgtttctcttatcatccgcgatacccatgaggagaattagaaaattattaacggagtttaggttaactgacgattcacattaagcttgatcaacagcactccacaaaaatgcaaaggccatatgttagaggacaagtcacgtcatggcaataatcaggacaccataggaagagattagctctcaatgtgagccaccggtccaacttaaagacttttatagtacaaaacctgaaaacattgtctacggagtagtgcattgcaatgggaaaactaatgttatgataataatatatgttatgataataatctatctattaacttagtaaagtaatagaaaaatgagcattcttatggtttagaaattattatcatattaattggagtaaaataaaaaaataaggagaattcattgtagacaaggactctttcattttctttttttctaaaaaaaacaaatacgttatatatgtgtagtgtccaatcggacagctgcataaaacaaatcttttgcaaggaaaaaaaacctaagctggatagattaatctctctatacaaattaatacaaagtattgctattttttaatttttgttgaataaaatttagaaaaagaaatgaaatttggaattaagaaaagaaatattgaaatatgagtagttcatatagaaataaaatttataaaataacaaaaattataaaataaattatatttgatgaggattctagaatattctcccaaagaggttagagtgcatataggaatacaatttagaaaaagacttcaaattcaaataaaaaaataatattgaaatgagagtttagagtttgtatagaaatacaattagaagtaatgtaaataaatcgatatcatgaaaaacgtatagccaaatttcttattggttcaatttagctagaattaaattaataagcagtcataaacgattaaaataatactaatgctatttctgaaaatacaaaaatacttaaaatcactgagagagaaaaaatgattttagccttgcccaaatatatgtccctcttctgtgctacgtatgtgcggtccatgaggcggcccaatggcgacttggcctaggaatgacgcccgacccaacacggcagaagccagggtcgtccgatctgatgaacggtcccgattgatcctgacctaaatgaatatccaacagcttaaaccctaaccttaaaatcatttcccccatacccttgctctctctctcgaaaagcaacggcgacggctgtgatgattccagcgggcggcaacggtagcgcccttccccaccgagcagatccggctacgacggcggcgttagcgtcctcccgcggcttcccacaagcggatcaggaggcgatgggggcaccctccccattttcccacgggcagatctggcggcgacggtggcttcccgtgggtggatccggcggtgacgaagattgagataagattgtgcggtttttattattttttctagttttttttctctttctttggattgtctgattggatttcgatctgacttatggacaaaaaattgatgttacggacaaaaaattgatgtgacaaactgaaagttacaatttttttaagtaaccacacgtgcaatttagtttcaaaatactctaaaaatcattagggagtacctatgcatctttcgaaagatttttatgatcgtatcacacagatttttaatatttggattaaaatctgatagacacagtaaaaggtaaaaagcaactaagaaacaccataatggacactaaattatcctatcttcaagaaaaagtccaaatccaatacaaatttcgaaacttacatgtgaagattcaaaaattacacagtaacaaagttacaatgtaagtttcataaattacactgcaacttacaagaaaatgcactgtaaatttgagtgagaaaatcgagtgagagataagaaaaaaatcttttgagtgagatatagcaaaatcgaaatcacaatgatttaagctaggaaaaagtacaccgaaggtccctcaacttaacatcgggataaaaaacatcctcgaaccgcaaaaccagataccacggatcccttaaatatacaaaccggtcacaataggtccctcagtggttttgatctcggttttgtcctacgtggctgctgagtcagcgtgggacccacgtgggccccacatgtcatcgtgccacatcagcctactctctattttcccctcttctcatctctctcactctctcttctcagggcggcgggggaaggagcggaggccactggcgagggtggcgtagactagccgacgttagggggaggaggccagtggggcgcggtcccgcgccaccgcccgccacgtgctccgtgaggtgggccgcgacgacgtcgtcgtcgtcgacggccgcgccgtctctgcccagttcgccatggctggcgtagacccgggcactgcgacggtggcaggaaggcgagtgtatgtgaggaggccggtggggcgaggcgggaccggcgtcaacggggcgaagcggcgggtgtgccggagacccagtaggaccagattcgggcgctcaagcgcttcaatgtcggcgaggactagcccgtcttcgacggcctctacagcttctgccagacctacgccggcggctccatcgacggtgccatcaagctcaaccacggccacgacatcgccatcaacaccctcgagctcgcctgcgcggcgacaccctccccttctccaacggcgctgcccccgccgacgccgacgtcctcctctttctcccacctcctgggcctctctgaccctaagacggtggggcaggggagagggcgagaaccgcggcgacggcctcccgcgcccaccctcacccgccgccacccagctcctctcctggtaaccatgccgcccgcgccaagctccatgtcgccggctgcgcactactctgcccccgatggccgcaccctgctcctcccccgacggtcgcgctcagctcctcccccggcgacggtggcggcgtgggaggacggcagtgagaggccgtgcggcaccggcaatcggtgtccaacggtctcgccgagggcttctgcctcatcgccctcctcgagttcctctactaggaggcccccgacgccatgcgcagcctcacctccgcctacgccgccctcgccgatggcctcggctgcttcttcgccggtggcctacgccgcccttgctggtggcctccgctccttccccctccgtcctgagaagatagagtgagagagatgagaagaggggaaaagagagagtatgctgacgtggcacgatgacatgtggggcccacgtgggtcccacgctgactcagcagctacgtaggacaaaaccgggatcaaaaccgccaagagacctattctgaccggttttgtatagttaagggaccctcggtatctggttttacggttcgaggacgttcttgtatcccgatttcaagttgagggaccttcggtgtacgttttcctttaagctacgatgggaggccggaggcccagttaattaagcacaacttggcatgggccagggcccgtttagcccaacacagaacatggataaatacaccacccattcgccaaagagcaaggtaggcaaggcacgcgagccctagccgccagccgactcgaccagcgcccggaggcggagcacccgccgccgccgccctcgccatcgtcggcttcacccctcatcggcaacctagtgcaggtgagctccatctccacccctcctcatctcctctcctccccacaccatctttcctagtctccctctgttgcttcctcggatctgcttcgctctcgtgctctacgcctcacacgacgcgctcttcctcgtcgccaccaactttgttgctgcgcgcgcgtacgtcggtgcgctgtgcgcgttctacttagtttgccttgtgatgctgctcttagtcgggttagtgcttcgtgctgtgctcgctggtttggcgcttcagatctgtgtgctgtttgctctcggagacgctagatccatagtcgtcgacttgcaaatgctgcgagctaatatgattcttgttggatttcttcgctcctagcgtgagaaatccgaagaattgggagaacacggtctttttttttgtcccaataaattggttggattgttctagtatatattttttattatttttttctcccaaattgttggaatggcttctccctctttcccaactggttggattccaaattgttggaatggcttctccctctttcccaactggttggattgaggtgaagcgtgcttactgtattttttccacctggatttggtactatctttactctctgaactagttgggaacggatattccaatctcctgtctcttcgtgtgacttctttctgcttccacgtggggttctggaatcttcaattcactgtagtataagttcatatcttatttattctcatagactatgatttggtcgacttcgctcatatattgccgtgtagtagagggtttttacaattattcacgttcttggattgctgagatatcatggttagttgtgctgtttgaactggttatggccctcccgctgtgaattgccaaggtgtctgaatgttggtgattttgtggatagttcacgtgttggacaaagaatgcattataggagtgacaaatatgactggtttttgcaaaaccggtatatattgtggttatgttccttggagttacaaataacttgcagtaatgtttgaactgtgggatggttatgacatacatcttatattgggtcgtgtgtgaactgtttgttcatctggatgatgcataattcacacgagttggatgaaaggttctacctgaaatggaagaatatgtttggtttctgtaatttcgttgatttgttggttacatctctttgttgtatattttatctttttaggtgatgtagctatatctgtttccttttatatgacaagacgttgtgtgaaagagggttccagatttatttagattttacgttgtcattgtggtcttgtggtaattgatattcattgtttgttcagattattttaattgagtattatactccctccgtttcataatgtaagttattctagcattgtccacattcatatagatgttaataaatctagacatagcatctatgtgaatgtgggcaatgctagaataacttacattatgaaacggaggaagtagtaattaactacctttgtacttattttgaatattctacttgttcgttctaactatttgtcagtagagcattctaacgttttacagcttggcaaatttttgcatgtcattatcgtatccagttttccacctaactgaaatccatgtcctgaaattgctttttcataggttgttttctgaagatggctgacgatttgggccctcccactgtgctccagaagatacatgggcagtccatgatgttcagcaagatctcaccttattctttgatgaagaatcccgcactctacaatgccaacacttcttacagtgtgcctctgaagtcatacaatgggatggatgggaacaatgggttctcatctgtcacatctgtatccccagtctttgcttctgccccaaaggagaaaggtctttctgggtttatgattgacttcatgatgggtggagtttcagctgctgtctccaagactgctgctgctcccattgagcgaatcaagcttctcattcaaaaccaggatgaaatgatcaagagtggtaggctctctcacccatacaaaggtattgcggactgctttggccgcacaattaaggatgaaggtgtgattgcactgtggagagggaacactgctaatgtcatccgttactttcctacccaggtactgcatcctactgtctgttttttatttattctccccttggatgttgacttatattgtacatttgcttaggccttgaactttgccttcaaagaccatttcaagcgcatgttcaactttaagaaggacaaggatggttactggaagtggtttgctggaaacctggcttctggaggagctgctggtgcttgctctctcttctttgtgtattctctggattatgctcgtactcgtctggctaatgatgccaaggctgcaaagaagggtggtgggaggcaattcaatggacttgttgatgtttaccgcaagacccttgcgtctgatggtattgctggtctgtaccgtggattcaacatctcctgtgttggtatcattgtctatcgtgggctgtactttggaatgtatgattctctcaagccagtcgttcttgttggcaaccttcaggttagtgaagtgaatgcaatctttgttcatcttctggcaattttttatttattccataaggttgctccactaaaatacctcgcgctcaaatattttgcctttctcattgcttcatttgttttggtttagttgaatctactcaatgtctctatactcctgctggttgttatatttacttctgataatatgtgatatatgttattttcaggataacttccttgccagcttcttacttggttggggcattaccattggtgctggccttgcttcatacccaatcgacactgttcgtcgtcggatgatgatgacatctggtgaggctgtcaagtacaacagctccttggatgcgttcaagcagattgttgcgaaggagggtgcgaagtcactcttcaagggcgctggtgctaacattctgcgtgctgttgctggtgctggtgtgcttgctggatatgacaagctgcaggtggtcgtctttggtaagaagtacggttctggtggtggctaagactagatgatgatgataagcagtggggaactatggacatattaggtgctttcggatgctgttgcgtttaaataaatttaacgtatggacaccgtttacatgttattaggcgtcaggtgaggtttctgagtgtgtaaatcggtggcagatgcttatgccttttttgttgggggatcgagcaagacgagttttcctagttgaaaacatgccaaattattgtctgtgaaagcgtttcttgagattgttattgatgtggttcctagtcgattatatagattatcactccattgtagcatcttcgggattttgtcttatctaaccacatatgcaaaaaaaaaagaaaaaaaacccttgttatcttattatgtgagaggtaggacttagaagctgttcaggatattttttgtggtttgcaagctgactttctgaggacataacattccttgagaaaatttaatttgtgtagataacacaagcacgcaaacatccgcggggctgcgctgacatgccggagtagtaataaatgaaacagaaataaaactcctcaaggacttgtttggttaatccttgtgaggaagggattggaaagccttgtttagttaatccctatgaggtagggattggagcaaatttattccacatctattgtggtgtgaaattattaaatgaaagagaaataaaactcctctaggccttgtttggttaatccctgtgaggaaaggattggaaggccttgtttggttaatccctatgagggagggattggaggaaatttattccacatctattgtggtgtgaaattattctcccttaatcccctcccatcttcttcaatccactctaaaacgaacaaggctctctaaaccgaaccaggctttaagaattcatcctcgtgttgacatggcggagtagtaaatcaaactccttaattcgtctttgcgaagatgggaattttggggatctgtactccttaagaatgtcagagtgaatttgttttgtactcagtaatgtaggaattttaagcctcctttgacctttgggaagaggtcttgtacgatttgaataataatatgggaaaatttcttgttgagcgaacaaagtagaatttcttgttgagagcgaacaaaggagtgagactaagagaattctacaaaattcttttagaatgacaaaaacatgggtttttagaaacatgattcctacattttttatacaatttttcatacatagttttttgaaactaaaccgacaggagaactgtcaattatatttcaattaagcaggagtaaaaacacagacagggttacagaaaagaaaaaaaacaaccacttggcgagtaaactcgccaagtacctcaaccgtggccggtacaaatcacacagcacacggagcaccacacaacttctagccaaactaccacggcgaaatccaaagacaaacatcgacgctgagatgctgaagaagtggcacacgactttgacatcacaaggcgcatgtcatcgttgccgagcttgccgcccagcgaccaagcagcttcgacttcacggcgatcgcaacatcatacaaactttttctgtgtaaaactttttctgtgtatcgattttctagtttacgcatgtattcctattaaaatcatatccttcacgcgtttcaaatcaaagtagccctaagaatagtactccttgtgaaggaaattttacaaaatttgttgaactcttgcaagcaaatcactttgtagtttgtacgatccgattccaaccccaaaggcagattggtcagcatcaaatatggcaggctgataatggtaatggcacctacatcaccaacaaagaactgcgaactgcattgacggccacatcaatgggagaacatttctacgcgcatgatccgtcacaatcttacaacaaggcggccgaaaattccataattactactcccttccctctgttccaaaataccaaaatataagtatttttagctataaatttgaataactatatatctagatttatagccaaaagttattatattttaaaacggggataatatagtagtaatgaataatgatggctagtaagtttttgcactccttcactctgacaggctcttttttctctctcataaatatagtagagctaggcttcatttcgttaagaataagcataaaatcccatttccaaaggagggttcacattcatttcattaagaggaaacataaaaacccatttccaaacgagggttcacaacccttacgcgtactcctaccccaaaataaaacaacaaaacatcataagatgacggaggtagtgctcgtaagatgcatcacataaagatgacacacaaccaatttgataagcactaatccacaaaacatcatctttgccacacaaagagtggcagaacattgaagccaaaaacctgtccatgactacagcaaaatgttgcccacaattgctagtagtaagcaagaatagaatacaacaccaagcaggcataaaacagacaaaagtcccagcaacgggcattaacaccgactgtagcagcacatgcagctgtagtaaatatttttcaggtgatcgcagggaggaccggaggaatagtctggtaggtcaacttattctggaccaagatgtctggaatttatacagttgggcatcaatttggaatcttggttcacagggatggtttataccatcttgccacaaccagaacactgaatttgcatgctatccatcatgtacagaaaaactaagcaatcctagtgtttggattgaactgttattaagaaattcgccatctgcttaagcggctgtttgggaaacagggacttatcacatcggatgtttggacattaatttagagtattaaacatagactaattacaaaacccattccataactttggactaattcgcgagacgaatcttttgagcctaattacgccatgatttgacaatgtgatgctacagtaaacttttcataattatggattaatggcttaaaaaattcgtctagtgaattagctctcatttatgaaattagtttttttattagtctatgtttaatactctaaattagcgtttaaacatccgatgtgacagggactaaaaagtgaaaacatcaaatcatgaacaaattgtggcagacaacattaatactgaagggaaccatcactccaaagaaccatctattggtaatcatcaagtgaggtatatgtagcagtacagtattttttttttatctaaatgctaaagggaaccatcactccaaagaactcgccatcaaggagtgattagtgttcttagctgaatgatcaacaagtaaaatcccaatgcatgcgacagaatgcccattggactattccctactaagtactaattaattagacttgagatttctgacctgaatgaaagaattatgtcatatagagaattctccacaaatgccatccaaaatatccatcatcgtcatctgaatcatctgatcatcagtgcaatttcgatagattatgctacagcatggttgcttgatacacctacgtgcttttcttcgtcatgctctgcttccgttctctgaagagctccttccagaggttccaaatccacaggttgctgaccgtgatggcggtgccgacgacgacgatccaagaaatgcgcacccaccacgggatgacgtcgacggcctggccggacaggtagaagaggctcatcttgaggaagaagagcgggccggcgacgcccctgacgacggtgtagatgaagtagaagggcggcgacagcgccctgtacaccctcgccgcggcgggcttctcggcgcgccagatcccggcgagcgtccagacgttctggaggaggctggtgacctcggcgaggacgaggaggacgaggagcgcgtaggcgccgtgcggacgaggtagcggcaggtgacgaacacgaagagcgtggcgacgtggtgggcgatgaagagggtgtccccggggaggaaggcgaggtagtggagcaggtccatggtgaagtaggcgacgctgtagtcgaggacgtggtcctggaggcgggtgttgggcgcggcgaaccccctcgcctccggcggcagcgcgaggatggcgcccgccgcggcgagcgcggcgggcgtgccgtgcgcgagggagatgaggcagctggcgccgtcgaggcggagcggccacgcccaccgccggagcagggcgagttggccgacgcagtagatggcggcgtacatggccaggaaccccgggtacagccaccgctcctcggcggccaaagaatccagcacccccaccaccgccatggccggaccaagattcgcgccgacggagcgagggatcccgccgctcctggccggtctgcctccgattcgggcccaaccccccgcgtgcgcgcgaggcggaggcgaggggattcgatcgacgccggtagggtttcggcggcggcggcggcggcggcggcggcggcggcggagggatggatggctgtggagcagtgtgaagggatggacggccgcgtggatggtggggaacgaaaagggggagattttaaagcgattggttttggtttgtttttttttcttttcttttttcgatatttgtttacgtgggttttggtttggtttttccaaattaaattcaaattaattttgggttgagtgattaggtagaggattatagagggtttgcgtgttaaattggggttttggaaggaaggtcagtcttccgggtgttgtttgaattgaagattatattatggttgagacttgggtgccatgaaatttcttctcggttaactatcattacaatattttgctgagttggcacgagttttcatatcaaagttatatttttagcagttttatgaactgaaaataaaaaaaaatgtttggactttgtaatgagaggcacaatgccgacatggaaaaacaagtaaaattttgtcagtgaatcactcgaaacgaacgaacaaggtatataaatttatactcatcgatcagagtatcttatagtatatatactctttccgtgttttaacatatgtgccgttgattttatgagatatgtttaaccatttgttttattaaaaaaatatcatttattttattgtgactttatttattatcaaatgttctttaagtaagacttttcaatgtatacaagaaatttgaaataagataaatgatccaacatttattaaaagttaataatattatatattaaaaaacgaagatagtattgtaaatggctccttttgttttatactaatatggctgaatagctaaataaactatacttgtctaaaaagcgttaaataaactatatccccttcatcctcaaatataattattactaactatgtattttgataaaggtatgtctaaatgtgtagctaaaattgactatattttgagatagagacagtaaaaattattcgagagtagtataaacaaatgaattaaatattcgagggtaatattatttgggatggagtataaaataaaaaataaatctaacatagttttatcaaaaaatcatatataaaagttttccgtaaatcactctgtttataaacttgggaagcatggacatatatcaaatcatttcattaaacataatttctaaatatttagtcatttttcctccttacattaaagaaaggcatatacatccacgacacaagcttaacaaatgtatggatggatcatggaatatttggttacggagtaattaggtccggaagagcacacgctctatttcgaaacggctacttagatcacgtttcatgaaatgctaaatgcttgtttcatgcaaaagattttagttatatagaagttccattaaaaataaataaatctttttttaaaatataatacttaatactcgattaattatgcataaatggttgtctcattcagtgtgcccttaaaatttcaagctaaatagagctccaaatgaagccttaaaacacgagatttttttttctttacagcttgaaagtttgtcctcgcaaaaaggaaatagaaacattcagaataccgtctaaaggagaatcgcatactccatattgggttgattgggttggttccttaaacacggaagcaagctttgggctgtgtttaaatcaaaagtttggatcgaaacttccaattttttccatcacatcaacatgtcatacgcacacaatttttcagtcacatcatctttaatttcaaccaaaatctaaactttaggctaatctaaacataaccttggtcacgtagtatgcgtaaatgtgtcgatatctttttctggatcatgtgacagatcatggtattggcgaatattccacgcaatttggtatcatgataccttgtagtagtagatcgcgtgggggcgtgtgtgttgctaaagaatgtgattcttgtggcacactgctagctctacttgcgatttctatacactaacactaggctgctcctgtctttttcagccttcagaagcgaataaaattatcatcgctaaagtatataaaggtgataataaatgtatatatgttgtcataagagcaagtttaatagtatagccaactactggctccaattcatctatagctaatctaatagctcattcatacaatagttacatactacactattaatacctggtcccacctgtcatacacactgtgtcttggagtccgtgctacagctgtctataaatctgtagcccgctgctttcctctctcctcatttatcttcttaaaatatgtttgcagctggtttatagcctgttattgtacttgctttaatgctctaatgatgggcgatggcggcacggaatgtaagacggattaggacaagtttaacgaaattcgacggagactaatccgtggctaattgtttattgcacagacatgatttttcctccaacaactgcatttgatttttnnncccggctccaaactacacgtttgttccaatcttgtttacgaaactgcacctgtttgttgcaaagtttagttttctaaaacaatctgcaacaagtgtacttttgtgtttatataagggaagtgaaaagtgtacttttatgaaaccttagtacctgctcgctcttcacgatattcccgtacaggtgccgttaaatttacttgcataacgatattcccgtacaggtgccgttaaattcatttgcgtaatactagcaggcaaagtgttaattacaaactagcaatacaatactccctccatactgtaggacgccgttgactttttaacgttgataaaaaatcaacggcgtcatacattaaaatacacagggagcagtagttttcttagaccgatcactaggtgaaggtttcttcatctgaattgattataagtagggaggataatacaaggttcattgatttacaatggagcataaaggggagatgaaatttcttcacagggtgtaactacaatcctgcaatcgtatttcagatgctcagcttagagccgcatagcatcatctacacattttgttataaacctagcgagggaccgcaggtatgattccacaacctccaaaagcaaagaaggtagaaaaactggaagtgcttgaacggcagttggctgggaggctgcaagctggtttgatctctcatggaggagatgttcagttgcaacggtagttgattcagttaatgagaatacttacataatttgaagctatgatctacgaagaaggaatttgattcagtaatttgaagcgtagtagcaattggcagcagagttgaaaaaacatccagtcatcctatagaggttgactgctcctcaatgtcctccctcttattgtcatcgatgacggaaagctaacaagatgaacaaatatgctgaatctgcttcctgacgtgcatgctcggaaggtgtgaaatatgcctactattagtatcaactatcttcaaccacaacggactgaggtgcatgcttagaaatcatctcttattgtttggattgggtacccatgcgttgcaacggaaaaaaaatcaatttaagatcacatgttttaatcactcacgatcccatgtgactaaaatttgagccaatgccataaaagcgatcatctcttactgtttggattgggtgccaatgcgttgcaacgggaaaaaaaaatcaatttaagatcacatgttttaatcactcactatcccatgtgactaaaatttgagccaatgccatgaaagcgaagtaataagtagataatttgcttaataaaaaaaataccccctccgtattttaatgtacgacgctgttgactttttgactaacgtttgactcttcgtcttattaaaaaaattatgtaattatcatttattttattgacttgatttatcatcaaatgttctttaagcatgacataaatatttttatatttgcacaaaaattttaaataaaacgaatgatcaaatgttggtcaaaaatcaacgacggagggagtacttgaaaaaggaagtttaagcatgaaatatatgtatcttgttttatagctgaacaatattactaatgttttattttgaagtacacataacgttaacaatactattttttttttgcgaggaacgttaacaatagtatgaatacatgatcaacgagttcctaaatttttttgaagtacacataacgtaacgttagatcccactccgaacagtcaatgattatatgtatcaaatatacaacgtaacaatcatccggccatcataaaagctcatggtatattaaaaaaataaaaatcatctcaagagactgtatgctacatattaaatctaatgatagaagcttaatttggacaaaaaatcaacaaggcttaaagaacattaaaaaatcatgcttaaagaacatttgataataaataaagatccaaaaaatcaacaaggcttaaaaatttaaaaatacaaccagctactaatttgtacaatttaatattccaagatgacatcttatatgtccaactaatagaaaaaaccatgactacagacatcatgataacagcttacatcttataggtcaacatacaggaatgatggaatttattgacaatgaaatgccattaggaacatgttagttggacagtaacactggatatttcagcaacataaggacagctacacagactgaaatagattctacatgtgtgtacatatatgaccatataatattcatatttggtgaaatcactctgcaaatctaatcatgcacacatagtgtattaatcttatttttctcaactaatactaatcgaattagttataacaataattgaaaaaaaaagaatgtgataaatgcatgccggatctatcatgtttaactgcatgtgataaaccattgtgtacggtaaatgaaatatgaaataagtttgactgatattccagtaggtaatgatttcaacagttaatataaaaattgcaaagataattagttagtacacaatattctttgtgcacactagatatacctcgtctatgctatgaggacatccttgtacacaatattctttgtgcacgttgtagtatgtttggaccgtttgtttttcttcctctctttgtcctgcatgagagaatcttgatgtttgttcctgaagttgctctagacaacgtgacgtagagctgaccatgagagaacaccggctccgggaggtagacgcctgcatttggaattgtttgtccttatgccttattgatcgtcaattcgaaacatagtctaattggaaacaactttctcttaaagtgaaacgggaacatttcatcatctaaaaggcatagaggtatccgaggaaggaaaactcccttaccagcatgctgccctaccacaatctccacgttaatagcatttcttccgaacccatgaaccactagtggccttgtcccgtttcaaagtccgttggctgggtcaatgttcctcaatagcatgatgggtagtttaacttcagctttagcacatgcggaggtagcccgtttggagttagagagttcaagaattcgggcaggtaatagctatgagggtcatcctctgctcggtaaaaaactatgatatgtcatcatctctcctcgaaatcgctcgatcattttcatgtttattcgatccatgaactcattctgagtggacattatggccctagatgtgatgtagtttgggtccgtaaggttatcatttaggttggggaacacggtatccatgagcccatcgaggtccgagtcaatccctttgcatggcacacaaatatccgaagtcaggtgtatgtgtccttcctcattcacctcctcaatgccattcccaactcgaaggaggttgtccgcaaacaaaaggtcggtatgcgccctcttattgcgaacaagcttcaactgaactatagaatcccaaagatagg

SEQ ID NO: 9330 - DNA, 19682 bp, Oryza sativa
cgtgtgctaggtattagtttcaggattacgtgtgctagtaattttgtatatgttgattactttaaaaaagcaaggttttaatcgatcgatgcatttcatattattcagatccacttagtattattcggagttccttttgaagatggcggtcggatcttgatagtggatgttatcgtaaactctgcagcaaatagcacttttgatgaggtattacattaaatctatagtcgaagtatctttagatcggatggccatcgtcaagtgagattttctaaataccatgtgtgatgataaatcgaagtgattaatcaattttgcatacgaactcatgataaaactgtagaatgcacaacttgttattacatataaaactgaaaagatagaattttagtttttgaaagtactaatacaatcaattagtcgtacctcaatgcgaatgatgtattcaaaacaaattctctagccaagtaacttactatcatgatatgtgtgtgtgtgtgtatgtatatatatatatatatgtatatatatgtgtatatatgtatacatatatatatatatgtatatatatgtgtatatatgtatatatatgtgtatatatgtatatatgtatgtatatatatatatatatatatatatatatatatatatatatatatatatatatatatatatatatatatatgtatgtatatatatatatatatatgtatgtatgtatgtatgtatatatatgtatgtatgtatgtatatatatatatatatgtatatatatatatatatatatatatatatatatatatatatatatgtatgtatatatttcttataattgtgaaataaagcaggattaagaatttaagatctattctatttgtgcatattgattataagagaataattatcaacagttaatgataaccattagatgaaacatagctatatgatgcaaggagcagcacttgatggaatttactcaactagcaacgaaaaaataggaaataagttagagattgttattactcaaaaacgacagttaagttatttctatctctaaagcgccctttatgagatcaattttggatgctttgtaacttaagaagtacaaagcaccataaaagccctcattaaaaacatgtgtagcacatttatgtatttgctatcaaatccggtagtctatatacgaaacatttacaacgcggcatatattaggtttcatcaactaattaactacgacaaagttgtaatatccccatatccaacttacgaatcgttccctcctaattatggactacaaacaaagaaatcaccagcctttggataatacatagtaactgaactattgattgttcggtgaaaactttaagttgatttaattttgaagctgttaaccactacatattaagccgagctatttctaatctaacagtttcatattggcatggagtagcctatttgcctcttgcatatgtgttgttaccattctcatcccttgggagagatattgttcatccactttgaacactcaatcctgaatcctaaagtccaagaaatctacgagaaactaaagacaaacaagactagatattatccgtcagtcccatttgccatgcacttcactcttgaacattatgttcgcattctaagaataaagatgattcaagtaggtagcaactaggattgtgtttggcacaacattgtatgcatcaccaatatgaatacaacattgtaattgccaagaaccgaatatttttttatcaagcaacgccactggtttttttatattccatttttcctggcacaaccacatggggcccaacaatgtgcacacacactggtcaatgccatttgtatgatcaatatgtatttgtcagtggacgctagcaaaagctagtagttcttggtgcacacaaaatacaagtggaaactagaaaagaaaaactcgagtcccccttgacttggcttttaagaaagagggtgagggctcaaatgcaacacccatgataaaaggtatatagtttgaaatatttgggatgaataatatctggttttgaatcttatagatgaatgttagatttccgtgatatgttaaggatgcaaaatggacttaatgcataaaagcacattaatttcctaacttaaaacaagtaaactaacaagaaattacaacacttatgtaacggaaataaccatcaatattgaggaaaacgtcatagatgggcgatttcctactagtgaattcacaattgatcctaatagttcattatatacacacacatatttaattagtatatgtattaatgatgattgggattaagaaacaaccctttaattagcacatattaattaatggtaacatatgtacgtaagagttcatagcagaatgaactgtcgttgtacatgccgtaattataatacaatatagctgataagcatattaattaaatctaattacaagtgataagggtctcaaaattaaactatatttgaaacatgtgttaccccgcaagcacctaatgtgagcataataattagttctcacctggagacatttgtctttatagtttccctctattgtgcatgaattagttaacttgactacatacgacgctaatttttttatattttagcccttttggaagcttcttttacaaatagaaatctggaaaaacttattctagctaggaatagatttttttctcaactctagggttattggcgctaaggctcaatatgatactccttgccgccaccccaccccccccccccctcctccccggtggtaggcaagtcgctgacgttgaagggtcagcaccaacctctttagcactaaggacctattcggtgctctttggcactatggatctatttgtaagaaaaatatttatattttgacccttttcataaatttatgttaaaacataggccctcgatacaaggatcattggcgccgagggtccattccgagaataagtttgtccaaggatctatttgtaaaataaattttaaaaagaaccaaatgtaaaatctagacctacaacaaacaatagcgagcatatacttagcgcaacgtcatcaagaaaggcacttatgcaagaacagggataataccaaatgttgttaagtgtattctccatgttcttgagtaagtgtattctccctgtggttacttacagaagaatgagatcgacctaagtaacttttagttctagattattatgagtcaacttctgatggtatgtctctgatggtatgtcatatttattgggcctgttcggctgcactcatttagccgtggtgcagccagcctaaacagtgttttgtgtcatcagctgcgacaatgacgtcgcaacacagtggcttcaccttgcagccgaacaggcccattgaatatgacttgtgcatgactaggttgccagaggccaggatctaccaccatgtcagttgatcaagatgtttttgttggacctatagtatagaactagtgtgttgtgtatggaatatgaccaaccattactagtatatgttgtgtatggcatactagcagggacatactagagaagtctcaaataaaactagaattgaaatagagaacaaagatacaacactgatgtttctactttggtgcacagccgaaagaagaaaatctcatttaatgaacagaaaatgttttttcgcttcctcattgagccacgtatacttatatagcttgagacattgaatttggtcaggatggttggattgatggagattaggggaagagtcagaaaacttccatgggaaggatcaatgagtgacatggtggttataaatatcctagtcgtcggtagtaactttgggtagggaaaggaacaaacaatgcaatcaaaataaaagtttctaaatgacagtaaaaggagcaactataataactcaaaatgcataatcgtattctttgatcacctaaagctcttaaatatctttcacatactgtgataacatcttagttcccaacattatcatagctcttgttggtcgtttagtacaaaataccatgcaaacctcactcttttgaaaaacataaattatactcactccagattagaaataattatcgttttagacaaggacatggtctctaaaaaataattttaaccactattttctattacaatatatatagaaatatcaacaaatgtattattttattgaagagctcttaaagattaatccatacatatggtctctatgtttctaaggtaaatattttagaagttatatatagttcaagttttaaaattttgacatcagtattgtcctaaatgacaattatttttaacctgaagcctgaaggaataccaattatagctgtcattatacccaactaaattttaacatatataattattataaattacactttgcacataaatatgcaagtcatagccttgcaattgcatgacttaattggctagttataggtgattgccaaacaattgaatagtgctgctattatggggtagaaggctatggaatggacaaggccattcttgccatgattttttccattctttttcctttcacttatctttacagcttcattctgttggcagagaagtgtttctcaactaaatttcagctcaaagaatatggaaaggaaataaaagaatgaacaaaaaatatatcccaataaatgcttgcagcgtgctaaattttccaggttttgcaaaagtgtctcaatcttgctaggttccattcgttgaggtccttaaatttccctatgcatgctcaatagagtaattatttagtcaattgaaatgttggagaaccaaagaggatttaagtgtcgattaattaagaaaaatgggacagcacatctggagttgaaagctagcagggtgggtgcatgagagcttccccagaaaactattctaccacagctctctatttagtcacttaagcgataatattaaatccagttggagtgtatgaaactaaagtataagtcatttacgttagtaacatgaacaagaaaaatactatggtttagattgatgtagtgacacaaacaatatggggaagattttactcgagatgatacacttatatgggttttcttgcttacccttaccatgacctttttttatcacatcttatcttgacgatgggaactatatggtatgcatttttcatattccaattttaattacattgagtttatatttggatacataacaatagataagtatctcaatatgtgcatagttactagtggtctcaatagtacataaactcatttgtttagttttattgcattgaatgccacctaattaataccctccaaacatataaaaatctagagatgtttgcatcaatgtaaatccatgcttctagttatatcttttccacaacaccatattatacccatcatttaagaaaaatatgtcaaacaatcacaccttatccaataagaaaaatttacctcttgcatatgttttgttcccattctcattcctccggcgaaatattttttttgagggaataatgttcatctacttcaaacactcaatcctgaatcctaagctccaacaaatctgctcgaccaaagacaaacaagactagatattgtctagcaaatcttccatgcacttctcttttgaacattatatacatttggcaatagtgtggttgactgtttgcataatattttttactcccccgagtcaaaaaaaacaatattttgcactccctccattccacattaaaaaatgttttggcggtttggcctctccatccctcgtctagattcactaacatccatatgaatttagacacatatatgatatcatgtattaatctattcatactcaaacatcttataatgtgaaacaaaaggaagtactcaacaacagttgccaagaaccgaacaagtttactcaacaagccattaacgtatgcatactccccttctctcatgttggcatggatgccagggctcactcactttgcgagggtgctatccacattgttgatagcggattaatcacaccaattgtaccatgcataagcacctactgtgcccccaccccagcatgatgtgcacgttcccgatcttccgagaagttctgataaacaacgatttgggcggagtcgcgacacaaatcgatccggcttcttgaacgcgcacgctcttgagctccgcaatcacagcaccacgtctcctctggttatcacctgtgtcgaaacgcggatgacctcgccgagaaggctaatccctgtttgccaatcgaagaacactaacaagaacgagatagaatacaaccaaaattgcatatgaatgattaagctcacaagttggggtcttacaaaccgatctagcggcgaaactgttctcgacagaataatctaagcaaaacccaaaccctaaagatgacggcgactactgatatatagagtttagggtcgtgcaaccaacccttgacgcaaccctaataggttccaacacgatacacggcccaaaggcccaaatacgatgacacagcgccggaacagattatggacgtcaacttgttcggtcgattcccattgactcggaaagaatttggacgtgggaccaaaaccaatggaaatcttcttagctttccatccatataaagaacaccccaatacaagcacgtatgcgacctgggcgcccgttttagtgcagactagtcctggactccgagttgcactcgaggtcgacttggtttaggcctccaccttgacttggacgtattcgatgatattccatgactctaagtccttctccaagtgtctccttgtcccctccattgttcctaatcacaatataataattaggtagcaatctattctcaaattcatacaaagaagaacataggaacgagctcacctctgaattcaattgtcgcgcgcgagctcgtgttatcggtccttgaatgaccgttggaggattgttgtgtgtatccgaaggagtgatgtccgcaacacagcatacacgtgcactccggtcactcatttgtatgatcactatgtacggtgaaattattattgcaggtctgacccaagcaggctaggaaaaatcattctcggtgcacacaaaaatacaagtggaaactataaaaaaaacttgatcccccttgacttagctttaaataaggggccaccaaaaccttgcgctcgaatgtgggcacaaatgcaaaacccacaataaaaagtaaatgctacgaaaagtttagggacgaataatacctggttttatctccaagaaagtcattttattgcaaaagaggagtaagacaaggggaccctttatctcctcttccttttgttttgggagaagacttgttgcaatttcattaacaaggccaatcagaacaaccttatatccatgcctatcctaacactagagaatgaattcccaattgtacagtacgctaatgacacactgcttttcctgacagcatcttcaaaggaactcttttgtctaaaggctattctaaatacttcttcctcttcaacaggtttaaaaataaattttagtaagtcttgtatgattcctctgaatgtgcagccagacaaagttgagcatttatccaagatgtttggctgtttggtaggagacctacctttcacttattggggctgccaatgggtataagtagacctaaggtaattgatttcagccctcttgtggatagaattgaaacaagattgcctgctacttcttccctactctcttatggtgacagattgactatggttaattcagtgctttcttctttgccgatattttacacgtgcactctttccttgccaaaatctgtcatcctttctattaatagagcaaggaggcattgtttatggagaggttcagacataaattccagtaggaaatccttgatcctttgggatagagtttgccaacccaagtctaaagggggtttaggagtaattgatcttagacttcaaaacaatgccttgctaatgaaaaatcttcataaattttataataggcatcttgttccttgggttaaattgacatggtcctcttattatagtgataaagtcccacatgctttatctctaaaaggttctttttggtggaaagatgctctacagtttgttgatatctttagaggtcttttaaagtgcacaattggtgatggcagaacctgtttgttttggtctgatctatggaatgataagattaggcaaaggagttatcctagagctttctcttttgcaaggaaccaaaaagactcgagaaaatcccttgtatacccctgaattttaagctaatcccttctatgcctctgaattttgcttacttccttgtatacctccaaaatttaattttgatccctttcatacccctgccatcagttgaccgtctaatttctaaaaatgattattttaccctctggatgaacatagaaatttattaattatattactaaaaatgtaaaagtttgtcgcatgagactattatagttatgagtttgttgtgtgatgcattatttatcacaaaatttatttttagatatgaaataaaaaatatgtatttatttttgaaacaaagtcatcaaaaagaggagcattcctacaaacataggactaccaatgctcacaataatttttttatgaatgctcccgataaaaaaatccattatcctattaaaatttcaaatagaaattttaatttattacatttgtttttattttcaaaatttagtctcattagtttcataaaatgcacatattgtgcactcaaacaaaaatttcaatttttttcaagcttatattcaaacctaaagcatcaagggcaaaaaagacatttgcaatcaaacgtaatagtgaaatgaatgaaaatgtagcggtaggggcataaaagggatcaagttgaaatttcaggggtatataagggatcgggtaaatttcaggggcatgaaagggatagagtgagttttcagggggtacatagggaatttactcaaaagactcagttcatctgacttccttaatggacttgtcttagacttttaccctccctttgtctaaacaggcttttcaagagtatctttcaatgctttctacagataccttagatcagctgtcggatgaatttgataaatggtcttatgtttggggtaatgataagtattcatcccagaaagtttgtgctacaaatttcatgcatgtgcaggcacctgcctacttaaagtggagctggaagagtaactatactatgaaagtttaggtttttggttggctttttatgattgataggttaaacacttgggatatgcttgacaaaaagttttgtgcccttgttggaagtaatttaaattgtgtgttatgttcatctggagaaagggaaaccccttatcatcttttttcaagtgctctttcagtacagagtgttgggtgcagtttggtattgtatgggatctctctttgtcctttaaaaatatgttgaaccatgcaaatacatcttatcgatcttcacattttctggagaaggttttatatgcggcctagaacatttggaagcaacgaaatggatttatttgttataatgtttcgccctttgttccttcttggatgacattctttaggaacgatctatcccttctagtttttcgcttaaattagatgagagatcaactttactctcctggttgaaccagttgtaatctatttatttatttttaataaaactatataactgtgggggcttcccctacagtgctttccctcaaaaaaaaataatacctggttttgaaatttatagatgaattttacattttattttgtgataggttaagaatgtaaattaaatggacttttcgctttcatgaaacacgtctaatctagctagcatcacgtctagtcacggaaatgggtcattttggatattagtatcgtgtattatattagtgttcgcctagaacatggtatagatggtctagaccacatctagacattagaccatgggttaccatctagttagggcctaaaccgtgaattagactgtttgatcgtctactcggtcaaagattggtctagaccgtctagaccaggcaattagacaacacaaagacgagtagatcataaaattgttgtttagaccatggtctaggaaataaaccaatgcgctatcacatgtcaggagataaaacctggtggcctgcccaaggaccatatagcaaagggttttgatcccaactaaaacacttctctactattcttagacacgtcattgccatgaagtcacgtcacctctcctcagttagttgccaacatggaccttgctcccacctttctctggctcatgacgatgccggttgcttcccttattagcgtcgctagttcttcgatattttatggaacatgttaagtctatctacataagtatcaaaaaaaatgctgattgtatatagtacattatatcatctagacttggattttcttgttccctttcttgttttctttgtgttcctcagttttaaggatttacagtctacgaactcatgtaaccttttagctgtgtatatccacatgtggatatagtggtcgaattttcatccattattaaaagaatatatagtctgcaattttcttgtccgtgtgaaattatagtattgtcaaaagataaatcactaatagaaacccctggcattacattaacacatatgaaatactgcgaactaaatgaagaggtggatacaacaaatatgttaagggaaaacatagtattattgtttgactactactacggtagaggatagataacatgggtttagacacctacaatgtgagccatataaactaaaaaaacacatgctacaatggtttgacattcgcaaggttggtgtgcttcagagcgaagcctaacatgtcttaggcagttcaccaggttgtgcattattagatcctacctgagtacaacatgtataattccccttgcaaatagcttatggtccaagtgtccaacatgcttagcacgtacggcatgtctgcccccacggtcacgcttcctgtctttatcagcgtcatgaatccccgtggcctgacattccttgtcctctttcatctggattgttgttcctctagaaacatttctcctcctgctcttcctcgtagttgttcatacccacctcgtttataatgtattattggccctcgtttgattgctcaatcacgagaagaaatcgatcacacgaatgtgggagactgttccagtaattttaaggctatgatagtttaaaacctatgtgagcacaaataagatcttaagctactatactgacgtgttgtagcaaattaaattgtgagtgtttgacttcctagaacgcacttggcccgcatcttggatgctaccctttttttttttttggagaagggtacaacataggacgcacactaacacacaccacattcacaccacaacacacgcacacacacgcgtgcgcgtccctaacacacgctagaaatgagattggaggcactaggcctcagtgcacgggaaacgtgcagtcccactgaacgcgcacgcgtatgtgtaccctattacctagacgggaccaaccgaagtcagtcccgggtaaagaggggaaaaatccccccggacgagggacgagcgtcaagtttgggactcgaacgctggtcggcacggagcgagccactggctcctgccacccgcgctacgcacggtcctcgcatcttggatgctaccaacaacccttttggtcgcctggacgtgtctccgagccaggcccatggaatgcaaaacagcccacggaaacaagacgaatcgagctttgatgcttgtcctggctcgatgcacgccacgacgatgcatccgggtgtgcaaacaccacacccccgagtgcaaaagcggggatgacgggtcaacaccctcccccctcctcttctcgtcattcctcctctcctccatcttccgttggtcatcctccctctcttcgctagtcgtgctcgctctatgtgtcagacccctctattctactggctctcaccatcaccctgcactattacaaaaactctaaagggtgccggttgggaaacccccttcggtgccggtttttccaactggcaaccaggaggcggcactgatcacccaatgtcaaaggtgctggttccaaaaccggcacctttgaggtgcccatgagctaaaaaaaatcggctcaatgcatcgagccgatgcattgagccgtcaagccgatccaatatagtacccaaatcccaaaatttcctcaaattcatgaacacaaacatagtctataatcctttaaaaaacaacatatcaacatcacattcatcaagaacacacattatcaagaatcaaacacattcatcaaaaacagacattcatcaagactaaatcggatcgaggaggaggcttgccttcatcaccaccccgccaccgccggatggagaggacgagggcgccgccaccaccgttgccgctgccaaggaagctgtcgttgccacctcccgccgccgacccgccaccgccacttccccttccgccagatctggcggaggggagggcgcagccgccgggccgtcggaccaccgccgcctcccctcctgccaccgatccgccgccgtcgggccgccgaagccacctcccctcccgccagatctggcggaggagggtgtcgcccgccgccgccgcctcttctcccgccgccgcctgttgctgccgccgcgtccctcccgccacctccttggggtgccgagagagagagagaagtcatggctgagagagaggataatgtttcccctcacctcccacgcgagtggataaggccgtctctcggctcggctcgttgtcggttttctaagaaaaccgacacctttaatatattataggtgtcggttaatttgacacctataatatattataggttccggttttttttaaaaaaagatacaaaatataatagatgccagtttttatttagaaccaatacctataattatttaaagatgccatttttttatgatttcagcccgcggaggtgggaaaaagcctataggtgccggtttactaccggcacctatagtggcgactcctatttgatgttttgcagtagtgccgtctcttccacttacaatctctattgagcaaggtaaaggggccggctaatgggcgggtgatcgcccgatcaccccccatcccccctatacagtatacactactctcttccttcctcctcttcttctcaccctactacaccataaatttttaaaaaataaaaaacacaaagttgaaaaaatttatgtatagaaatactatataaaaaaattgaattcaaattcaaatttaaaacgggtatgtaaacttttgacttataaactttgggtctataaagtaatatttaaattcaaaatcaaatttgaatcgagtatgtaaacttttgacttataagctttgggtctataaactttagatgtatagaaatactataaataaaaaatatttgaattcaaattcaaatttgaatcggatatataaacttttgatttataaactttgggtctctaaattttagatgtgtaaacttaaggtgtacaaactttaggtgcataaatttactaaaataggaaagtaatacggtgccaaaaaaggaaaccacgtggaagagagggagggcgctaggggcgatcgatcgccccttagcaatctcgttaggtaaatgcatggatggttgtctgccgcccattggaaggttgggcatccaaacgtgcccatagtttgttaaatatgtgatccgaattttgggcccacaatatattcggattagtttcatagtaggagtttctattaggtgtctttcttttatccaatatatatactcttgtaagccgtacgggaaggggtgacattcccattgttattctcctacgtttgtaataaactcctctatagtgattatagtgattattgccggtcggcgcccatggttttttcccgcaagggttttccacgtaaaatttgtgtctccgttgtgcatctattttcataacatagttattatagaggagctacgtcctcctgtaggttaatctgcaggcttgactaacctacaaagatcacaacataacacatgtggattttcacccccttcggtcagagtacacaatcatgttctttgacctagaggaagacatagttgcttcatatagggaaaaaaaactgcaaaactatggtacgattgaagatgatcgatagggaaattatcttctcgttgagcatcccctttgtcgctaaacttaaatagaaaaattgggccggtgcatgggtcaggttcactaacctagttgtcttaggacttaggagtgcatccccagggggtgtgctgggtatgcaccggcatacccagaaattctgaaaaaagtttaacatgtagtttgcaaaaacttatctaaatgatggataagtgcttacatcaaagctcgagaggcctaggtggctagcaaggccccagcaaacagcaagtcaccacccagctcgtgtgcgtgtgcgtcgatacagtattacttgcctccttctcactggtggagaaaccatctttgatcggtccgctagatttcacaatagtctcggttgtattaaaaatcgggactaaaaatatctttagtcccggtttgaaagctcagaggaattttttgatcttcttttttttttgagaatctatgattcagatctgagacgatttgtgtgtgatgtgaatatgtgatgtatttgatttgtgtatgatgtgaatatgtgatgtatttgtgatgaattttgtagaagttatgatgtaatttttttaagattttgtgatgtatttagagatattgatttgagaatttggagactattctgggacgattgatttgggattttgggatgagatagagtgaatcaatatattaaaaacaatgaagaaaagaatataataaagtagcaatcggagctagcttctttagtcccagttggtactctatcttgattaaaaatgggtttttactcccggtttttttatccgggactaaagataatgatctttagtcccgtattcgtagttccggtttttcaactgggactaagggggttacgaaccgggagtaaaaactccttatccaccagtgtcttttcatgttggccgtgcggcgtgggcaaagcagcaagtgcgacggcggccggcaagtctgtcattgcccactagcccagagaagctgagcccctgcagcctgcctgcccctagccagaacggaggcatgccggccattgagtcattggcagcagcaacgaccagccaggactagcaacgagagattttggagtttgctaaaagactagttttcacctctttacaattctacttccttcaaatatgcgatctcttttctctgaatgatattaaattgaatcaatcaactattagtattaggatgaacatggatcttatttttgtctttaacatgcatggcaccaaaaaataaaataaaataaaataaaaatgcatggcaccaaacaattatgggattcacattctgtatggtgctagatacgtttcagaagccagagatgctctcggaataattgtatcacttgataaaatttactgagattaataaagcttccattatcttaaaaaagaagatacattccagaacaaaactggttttagaaaaataaaaaggaacattatcaaacaagagtactaaagggagtagaaattagtcgtaattggtgttgttttgtactccatttatagataaaaacatcatatatccctacatgaagaatttagttttcctctttagatttgcatgggcacaaccagggtaaaaaccataggtacaccattgggtatggtgttcgattgtgaagtcagcaagtatgtagtcttatcgaggagatcatcgatgtcattatgttatattaacagtatgatgaattaaaatattgaagatataactgagagtaaggtcaataatatagcttgctactggcgctaaaattgcatacgtcagctattacagccagcacaaaatagcctattcatacaacaattatttacaactttcaaccttacatggctatgcagttttcctatttttctaaagacgaaaccatcaatccgtttctctcaggagatcgcttgaacagtgaacacactagtactccaaatctccaatcgaccattgatttgcttgtagtggctgcgaaagttgtggacagcggccacccttacggcgaagcttgttctgggccgtagctgtggcgaagcgctgcaccgttgtgaggagacgaggcgaccttgcgtcgttgcgcggccgacgcaccatcgccactgtccaagctaaagagcatcggttcctatttcctcctggtttatttttatctttagagcaggtacaataatagactataagtcagctataagcttatataaaggagataagaaaggaaagagaagagaaacagactacagatatgtaacggctgtatcacacggactccaaaacgttgtgtgtgtatgacaggtgggaccaattattaatgatatagcatatatttatatttgtagttatctattgtatgaattagctaccagatcgactacagatgatttggagcgagtaattggctatacttattaaactcgacgttctgattctggctcgatgttcccgttttgagatggtcacgccgccacttctctaggggtcgcgccgcatcgacagttgaacgggcccacaaaccgcctggggtgctgctggcatcggctgcgggccggcgacaggaaagcttcaacgctcttggagcacgcgtgcagcgagtgacaatttagtcgccggctcgccatctctctcctcgcctctatgctccagtctagctttcgaacctacgtgtcttaccttgttgctagctaatccctctctatcgtactcgctctaatagtgcttcaagttgtcaatcatgaagcacatattatcacaccatctataatgaacacattggtcatgattttctatattaaaagtaacgcaagtcctggcaatcacaataacaatcacaataagtaaaagttttactttcttcgtcccaaaataactttatttttaatcttagatatacaaaacgaggtaacaaaagaatcacatataccgaaaagtagtattagtgaatggataattgaggttggtaaggggtattgatagaacaaagctcaacgatttacatatcgaagataagaaagatataaatttttagaacagacaggtaccgttatagggtcatgttactttggagaagcgctgtaaaacccgcgagtcaaatcggacgttatcgacaagcattaaggtactacagtaaactcagtaaacggcagcatatcataaacaggtgtggactgggcggcacaatcgtaaaggagtttgttattgatttgataatcacaattgaacattaatgtcattttaaactatatcgttgtattgtttggtattgataaatatatgactttggtattgataaatatatgataatatttagtttgttactaaattgatcatgcctagagaatatggcaaatattaagtctatcctaccaaaatttgacaatgctaccaatttgccagaagtttggtaattccttcttgtgctggtgcagttgccaactccttttttttcttttttgagaaccatgcagttgccaactcgaatctacagggcataagaatatgtatgtatgagcaacgaaagcatcatctatttggaagtgaaattcccagaactcaaaaactccgccgcccaaaactccacaaataggaagcaaaggtgcccatctaacaaaaagatacaccccagatcctacaatcttgtggaacaaatttcaaactcgtcgcgaaacgttccttaaaatttcggacctaactactctcctgctcattggctgtctgtaaaatcagcatcgatgacatcaccttcctcgcctcctggcttctcggatgggccagcagagccagcggcagcatcagctcctggggtaggtcctgctcctggggcaccctgctggctgtagagggcctgccccagctgcatcacttcctggttcagagcagcgagagcatccttcatcgtctgtgtcgagccacctgcaacagcgtccttgagctccgtcagcttcgcctcaaccttacccttcacatcgcctgggaccttgtcaccgagctccttcaattgtttctcagtctggtagatgacagactctgcctggttcttggtgtcgattgcgtccctcttctctttgtcctccttggcaaacttctctgcttcttcaaccatcttctccacctgaacagtttttgatggatataagtcaatataagatcctagcaggtattagtcaataagacagtgactgcgagtttgctcgagacatacctcatccttcggcaatgtgctggcaccagttatcgtaatgtcctgcttctttccagtacccttgtctacggcgctgacagaaaggatgccattggcatcgatgtcaaacttaacttcgatttgtggaacaccccgtggggcaggaggaattccatcaagccgaaagctaccaagagatttgttgtccctgacaaactctctctctccttggaggacattgatctccacgctagtctggccatcagcagcggttgagaagacctctgacttggaggtgggcaaagttgtgttccttgggataatcttggtcatcacaccacccagtgtctccaaacccagagaaagtggtgttacatcaagaagaacaatgtcgctcacatcaccagacaacactcctgcctgttgtcaaaattttgccagtcagatattctgtagttcagtagagtacatttgctttctgactctagaagataatcaatcctagaacaccagtgagacacacactgattgctccctatagctaaaatttagataccatgcatatgatgtactaaattccatcgagtcttgcctgacattatttatctagagcaacatattgaacttcagtttttatgacaacatatttttcccaaccaatatctccagaacctgacaaaaggagttggttgtgatgacaaggcctttacccatcgcatccatttcaaaccatttttttaaggatcatttgtatatcgtcacattctccgcagatttcatattactagtgtgaacaatgttgcaagttttccacatgtaaggatagaacaaaatagcacatttattttaaaatccattgcaaagcttttggtgatatgatatcacaagtatctaagtagtatggtagactcatttaggcagcagttaacttgggctatgattaactcacctgaacagctgctccaagtgcaacaacctcatcagggttgacagtcacattggggtcctttccagtcattttcttcacaagatcctgcacagctggaattctggtggagccaccgacaaggatcacctcatctatgtctttaaatgacaactttgcatctctgagggcattgtccacaggggtcctcaacctagaagacagttgataaaacattagcagtgtatcattttttttctatttttgagttatcttaatagaactaatttatcatacatacagtagttgtca

SEQ ID NO: 9331 - DNA, 38562 bp, Oryza sativa
ccgagaaacctacgagaatttcgactggggacgcccagagcagataaggtcttgtcagattctaagagccgaacgaccatgtaagacctagtcatgtaagagttctcaaaaggtgtattaactaagccgtgtaatcggaaattgatttttccaacttcacggctaggggctaggtaaattgcattttcagctaggcaggttacgggtcatcgagccttcccctccgagaacaggtttccccgaggacaaggcttagggctagggagagtacctcactcgacaacgggccaaaggcagcctgtaaaaagagtagtactcgctcacaacacaacctgtttaagcatttactagatagatttctactttgattacaagttcttaatagagataacaatgtattataaacccccttttagatatttttctatagggaatgaagcctaccacgacggccactgccagttcatggaagcgaaaacgtcctcggctaaaggagcaagggatcacgccaactggtcgatctcatccgccgataaccgagaacggcgaaaacccccgcgcaagaatctgaggtacatttgcgagcggcgatcttggatgcaggcgaggacgtgacctccggcgtaacggctggcgcggcgacactcctcttttaggctgatgtcgatccactgtccaatgccttcaagctgagcacactgttgatagtcgttatcaatcagtttcgaccgtcaatattaccaaaatagaggagaactagtgatggttgcaatgcatatgcttgttagaataataatattccactagtattaggtttactaaccttttgcagagaataacaataaagtgaaggagaatcgagatcaactccaatgataaatcaatcggacgatgtcgagaaccaaacttgtgtatgaatgggccaagaactcagaattgacacgacaaactgggccaaaattcacaagtctgcggagaagaacaacagaggaggctgccagccaaaccttgggcttattgggccggccccaggatcggccgaacctggtggttcggccgaacctggtggttcggccgaacccccctcttcgccgctggatgcagggtttcttctggacagtgtggattagctcccaatgacggttggagggtatttccgaccattccaaccgtcacaaccgtcattgggaggctatataaacccctcaccttctcacttcactcacacacctcaagcaagagctctctcgttcctctcaagtttagtttagtagtatatagctggtggaatagaattagaataggaatcaggagtccggaagccttcggaagagttcgggtatggctctagtagctttcctttcctcttttgtaagctttgtacttttattagaatactcttctaaatacatttctggtattgaaatactttccgagtatatgagtaccaactttacattatgttcttgttatactgaatatattgctagcttgtctgggagatgcatgctttggtgcgggtatagtgtttgcttatgcaattactctatgtcatgacgatgatattagagtagtatctggtagtttagacgtggtgtctagattacaggatatcattatttggggttatatattgcggatgagaggtgggcctctgatggtgacagctcagtacgggtattcctccacgcctatatataatcctaagttaatttcctggggagggtactcctccatatttagccccagttggatggtcatgacgagctgtcgtaaggaactaggcagtcaggggtggcttctcgaagtaccaggagggcatcggatagaaggtattagctagtatatcagttaactagaatgtatgtatactatgtatattaaaagtatagaaatagattctctttctcttttcttttcgcctagcttagattatttattatgagtagtaatgcatgtgtgtcactctacccttggattatcttaacccctacttagaatatgattatcacaagtattatataaattattagttgagttctctctacgtgatcttcccacgggataaaatgaatacgatacccttggaatactctcaggcgaaatgctacaatggtatatccatgcgcttgcggatgaactctgtaaccataatataccagaagtatttctgcgccattgctgggaattatatttctagtaatgtcgttaagaaataccaacacacacgcccccctcagctagaacaagtagcccgtcgtgttctcctcggggtccgcgcgatcgaccctcagctggtggtagatgtcggccatggcattacaacagctcttgaggtacgagttcatccagacctcgcgacctcggagagcctccacggccttgtcttttttcacgaccacgagcgatagcccaagttcggtgacctcaaactttgtcctccaagaagcgatgcgtttgtctcgttcggcgatgacaccttcgagatctgcgaaggacaaggatgtaggagatgttgcctccttaataagataataagctcaaagggacaatttctctatgacatcacacctgagttctcgcgagggagcccgactatgcccggactaaacgggccagaggccgcgcccacgcctccgagcacaaccgcatccgtaacgacatcgggagcaggcatatcgcccaaagagggcaagtcgatcatcgcgacatcgggacatccgcattgctggacatcctcggaatccacacagctatgaagaataaaagacgctacagattaacaagtgacgtgaagagaaggaagtcactccgcctaggagattaacagaagtacttgtacaaaaactacaatacaaggtaaaaaaaagtttactcctcataaagggggaggacgcactccccgagatccatcacactagagacatgtcctcgcgcgtggcatctgctgcccccttcgacaagatctccttgagatcggtgacagggagagccagcttcacgcacgcgaggacgtgacacgccctgtgtgaatcccgttggagatttccttcgagaccttggcagtatgccgcgacgggatgacctccatctcgcccgccagctccgacaacgccaacgtcaaggacgtctcgtcgaggtgcgtcgggatagaagacatcacaccacacgccaaggctagctggtgaaggcctatgaagctcttgcggagggagtcgcggagggagaagaggtggtcctgcaggtcgttcatcttcttctccaagccctggtgctgcatcttgttactggccacgatctccttcatcttttgaaggtcgtcgttggcgacttcgagttcaatctccagccgggccacctttccgtccgacgctgttgcacgggccaccgcgcgatccatctgggccgccacctcccgagaagtgttctcgaggaggcggcggcactcggccatcatatcggaccaagttgttagttcgggcgacgacgcggccacaggcgcgacggcaggcccggcggactcagtgacaacaggagcgacctccacgcaaggaatgacaacggcaggaaacccactggtcaccgcctagtccccgctttgcgcggagatcgccgaggctttcctgccaatgtcaggggacatcattagtaaaacttacagatgtgacgacgaaaggagtcaagagtttcacttacttgccggcgagcagctttagcacccttctcttcggaggaggagcgagactgctcgtatcctgagtaagatggcaaattatgacctcattctaacacttcaagaaagaagctaaaggacgacaatgatacgccttacctcggagccactagatttctgtcgagaaccggcgggagcgctcgacctcgcccaaggcttcctctgggtcccgctgcctcctgcgatggctggaacggaggggatgttggcgacttcgtcggcatccttgtccttcaacgaggcggaggcctggtggttgacaagggggccgataacgtccgtcaacggcagaacctacaggagttgaagtcactttgcgccttcagggaatagaaacatgaggaggtctggttctcatttacattgatagcagccgccttgtagactgccgacttgccgcaacgcggagccggtgtttcatcgaccgtagaggaaggactgatcaagacttccttgacccgctgcgccacgatgttggcggggagatctgaaataaatgaagatatgagaggatgagttaggctttggcctcgaaatcatcgtcgaaagcaggaagaagattacaacataaggacaaataccccgcgaagagattcgagttatatcctctgctcccgtgtagtcgaacacggggtgagcacgggcttgtagcggttggatccgaccgctgacaaagtccttaatgacttcatagccggtcaatccttgctctcgaaggtcgctcacagcgttgacaaaggcttggagagagggtgtcaacggaggtttagaagtccagttctcggaatgctccggctgaacctcgggtatgacaagaaccggttcaagttctttgagctctagatagaaccatctcgacctccattggctccgggatgtgtggcattggaaagagatgtatcttgccttcatgccatcacgaaggcgaaaccatcaacatcttgaaacccgattggcttccatccaccggagttcatagaaaaagcaaaaaagatctaagaaaggcactacctcgatgtaggcctcgcaaaggtgagcaaatatgctcaaaaaggcagtggagttggggtttagatgcaagagagaaaggccgtaaaagttcaagatcaataaaaggaatttagaaggaggaggcaaaaaaccacagcggacgaaatcctctagagctaccatgcgacctaggatgggggaaggatcaatacctcttgcttcccaagccatggtctgcttcagagggacggccccctcggtgtacagcttcttcagcgcgccgcatcggagaaagattggtcgaggtccgccatcggaagaagatcgtcggaacaagatcgccagtgggagacgtggaagattagggattttagggaaatggaaagtccgaggaagccgaggaacagtgagggttttttggcaaacagacttgaaatggatcccagaattccattaaataggcgcaccacctaacggttcgtattttgaggaaaggagagagattgccgccgaaaatttctaaggcccgttggaggtagttgttcagacttcaatttaaattcaaattttgcaccgttggactccctctagcgttgtcgatagctccatgtctctacggtcagtaaccgagatcgacctagcgagcacgacgagacgctattaggagaagtcgtgggcgacaacatgaattcatttaagttgaagtcgggggctactgtcagggttaccgataaggcataccttctatcctacgacttatggaatataccaataaggcataccttcacgtacatggattgtttccctatacgtcgttaggaatttgtcttaaattacggaaaatatccctacgagttaaagaaactaccaaagtcctactcggaggggatagaatctctgttatattgtatcatattacatacctccaggccttacttgcgggtcaagataatccacggtataaaagtggacccctagggggaggtgaaggacatctaatatcatcgccaacacacccaccatagcttacgaagccagagtattcggagccaagtcgccgggagatctcgtcgaatccatcaactacgatctcgtcggtatcgtctgttccatctactctctttgtactctgttatcatcgtcatcaatctcatataaactagactaaggctattacgtgttagggggcctgatccagtataatccttgtcttctatttgcttgatgtcgtactacgtagaccctctttcaaacataccccaatactcaacttatccggtccacgagcatcacttgtcgacaatgagaatttcttaagtgtatcctaaatgataaacattagggtagttatttatctacggggtatattctatatatgtatcaaatgctttatttttgtacttgtttatacccataactatttaatggaataactctatacttttaacatttttttagaactttaacatattttcaaacgtatatcgccctcgtatattgtatattgaagtgattatatgttactaattcttgccaagatttattctacccacacaatatcatattattataatttgcgtgaaatatatttgatatacgacataaaattaattaaaactcaattgcacagatcatataaaatactttttgctaacatgaaattttaaaagttattaaagataatagaatgcacagtagtgtttagcatgggcatattactagtatatgtaaatgactaaatgttatggctatttggctaaatagaagaaaaaatgttgcaacaatatatacagttttcagtactacatatgaaaatggagtccttattacctagaaggtatgtttacattatcacgagatatagtttttttatatatattcatgactgccatcgaatacttaccatagtagataaaagaagtagctccttctagctgacttagtggagaaaaagaattaaattttaaaaaacaaaaccaagagattctaaatatatcggaacgaattagcttaaattaatacacacgtgaccagggacgggctgttcggtggctcctttttttatttttgaggaagacctagtattcggtatttcgttatatttcattatagatatgtactatttttaaagcttcgattagactaatatgagtgctcattcatacgatggaccgggctgtgactgtgcgcactgctctgggtggagagcatatatattgatcgatcttatttatttttcatgagaaaatataacatttatttatggcaagacgttattcacgtcaactatggctgtgttagggagtagcactctaaacaaagccgcatttagcgcataattaattaagtattaactaaaataatttttaaaaatgattaatatgttttttaaaacaactttaatatagatttttataaaaaatacactatttaacggtttgaaaaacatatgcgtgaaaatcgaggaaagtgagttgggaaagtagagataagaatttaagcatatatctatcagtcaatgtggtactccctccgtcccaaaaaaacaaaccaaaccatgtgttttcgtgtccaacgtttgaccgtccgtcttatttgaaaaaattatgaaaaaaattaaaaaaacaagtcacacataaaatatcaatcatattttatcatctaacaataataaaaatactaattataaaaaaaattcatataagagagagagtcaaacattggatacggagactcagcgtttatttttttttttttatggagggagtatatagtagtacaacaatgcaacagccaatttccagttcgatcaggcgtgtgcgtgccgttgcgtccagctaaactccacgacttagatgtcggctcgtgtgtcaaatgcaaaattctcaagaatctgccgcagccgatcgatttcatcggattcttcgtggtttgcgtacgtcgtgcgttgtactatcgcgtgagtgctaacgagcgcacatccaaaaaatagaaactgatgcagttctcccgtacgcgtcttttcaagaaaaaaaagaatcgcgcaacgcaactgcgatcctacccttgtgcgtgagtttttcttgctagcactctctccgtaaaaaaaatcaaactcgtagtacgatgtgacatatcatatactccctccatcgaaaaaaaaggcaaatactgggttttcgtatccaacgtttgactatccgtcttatatgaaatttttttataattagtattttcattgttgttagatgataaaacatgattaatactttatgcgtgacttgtctttttaatttttttcataatttttttcaaataatacggacggtcaaacgttggatacggaatcccaggtgtggagattatgggtaccacatacccacacggcatggttatccgactggttataggggataacttatatctatgaaatatgtaacagatcatgacttgggtattacgttttcccgtatattatggaatggcctaaagtcctggtttgataagattgtaaagtagatttaggaaaccgataccgtattgattaaggtttctatcttgtaatcctgcccccatcctatataaggtgggtaggaggccctctagggagcatgagatacaactagatcgtcagatctatactacacccggcggattcaaatccccaaacaggagtagggtattacctctcattgagagggcctaaacctgtctaaatcctttgtctccgcatccatccacttttaggtctcgtgcgctaccccttttattattgcctaattcatgtttcgacagttggcgcggcaggtaggggtgcgtcgaattacccatcgaaaagtgcaatggaatcaactgcagaagaaacggcgagatcaatctcaccgacgtcgatggctcaactcttcaaccgggtttgtcgtttcaatctatctagtgttttttaacaatgtctatgacagattgatttcctggtgtactattattattgtagtactactgtcgacgagatcgtcgatagcatatggagccacctgggagtatacacggcatgctgcaacccctgtcctcagaacaggcgtagtgtgcggttgccggttggttgcgaatgttttggcccggccgactgctttgattgccaaagtaacagtctagcacgcttctcctcgcggcgacgtaatcaggggcaccggaacagctgcgttgatcgcatgcatctactgatcaccgccatatatgcaagtatacatgctggccaataggccaaccaatcaggagtcctgcgtttataggctgctaccaacatgcacaggcttgaatccaattattcaataagcagctatcgacacatatgagtcaattaatatataggagtgtatgtagttgtatgcatgcatcttcttttgtttactaatctgatttgactcgtatttacatgtacttccatggatcgatggccatggccctgagatatcgttctgatccaacaagccggtaaagcaatccttctactattactgggtgggttgtcttcatcaccggccacacattggagcagctgcctacaatttaccagatggtgatcatatgacaaatatcgtcatgcccgcaactggcgccgtcaactcatcgagttttatctcttccaacttattattctatattattagattgatttctaatttcagattaatctcttgctatttttgttgttgtttgcatataattacacggcactactgaggcgattggcgttggtcatggactcgaggtgtctcgctatgcgattagttggccatgagtctactccaccggcttgccttcaccactgccgttgctaatggcaacaacgtcttcaccgccggcctgcctccgtcgccgccgactggtgtcctcgcctatacgattggttggtcacaccaccgttcatggacgtctacgtcttcatcgaccggctggcctttgccgccgccgactggtgtttccgcctgcacggccggcctattatgccgccgttgttgggcgtcaacgtcttcaccgccggcctgcctccgtcgccgccgactggtgtcctcgcctatacggttggttggtcacaccaccgttcatgggcgtccacgttttcaccgaccggctggccttcaccaccgctgactggtgtttccgcctgcacagccggcctattatgccgccgttgttgggcgtctacgacttcaccgccggcctacctccgtcgccgccgactggtgtccttgcctatacagttggttggtcacaccaccgttcatgggcatccacgtcttcaccgaccggcgtgccttcgccgtcgccgactggtgtctctgcctacacggctggcctattatgctgcatttggtgggcatcttcgctttcaccatcgaccaccttcgtcgctgccgactggtgtctttactgttattgatggacgactttgttcccacattggccacctctgccatcaccaaggggaatattacaaagctaagtcatcattaattttctttatatgatattttccttttcctctgcctcactacatcaactggttcgccgttgactagtgagtcgggggactatagatgtcatatcatattttttaacaatttttcataatatttatcttgattgcttgcgaaataatccgagtaacaataaagttcctatcgagttatggagttctattttcctatgctttccatttggtttgtcgatggatagttgcctttgggccgattcctagcacccgggggctcgttggatggaccgagtaacgcaaggtcctaagtattattcggaataaatcaaaagcatagagataagataaatttattttctgctcttacaattgcaaaagtacccgagtagtaaattttgattcgtgaaactttgttccattaatgacgaactcatgtcactcatatgcatgtttgggaagtgcctaaaccaactcccgatgcttgggggctatgactagtcgggcagagtgtttaaacgtacggagtcatctgctcggggaaatcaaaattgacaagaggagaaatacatatttataaatattttaaaatacttgaatttttctcaagtactgtgcttgcatcagatactactcattctatatgtttgttctgcaggatccagatccagatatgcataatagggatttatagctttaagcttatctcctacgcttcaggaatggattagtcagaatatcaccattggcttgctgtcgtcgtcgccgactggtgtcctcgcctatacggttgggtggtcacatcaccgttgttggacgtcatcgtcttcaccgccgacttgccttcgccgatgtcgactggtgtctccgcctgcacggctggcctattatgccaccgttgttgggcgtctacgtcttcaccgaccagcttgccttcgtcgccgccgactggtgtctccgcctgcaccgctggcctattatgccgccgttgttgggcgtctacgtcttcaccgcctgcttgccttcgccgccgccgactggtgtctctgcctgcacggctggcctattatgccgccgttgttgggcatctatatcttcaccgaccggcttgccttcgccgccgccgactagtgtctctgcctgcacggctggcctattatgccgccgttgctgggcgtctatgtcttcaccatcggcttgccttcattgccaccgactagtgtcctcgcctgcatggctggcctattatgccgtcgttactgggcgtctacatcttcaccgaccggccacctcgtatgacaccgactggagctatcgtattcacggctggccatatcgccgccgctaataggcgtcatcatcttcaacgtaagctgtctacgtctgctgctgactggtctcttcacttacatggctgcatgattctgatactgttgattggccttatcgtcttcaccgccggtcgtctcgtctgctgggattcgagcccaggtctccacgaccacaacgtggaattctcaccactaaactactgccgactggtttgttcgcctccatggctgcgcgtcttcgtcatcattaactggcgtcatcatcgccggtttgccttcgccgccgtccatagtgttttcactttaatagctggcctattttgccaccgttcatggacatcttcgttttcatcatcatactacttcttccgtcgccgactggttatgtcgccgctgactggtgtgtttatcttcacaactacacgccttcgctaccgttcgcaagatttgctacttcaccaatcacgacatctacaagagcttcgacatctcgacatgcgtcaccaaatatgatgccttattattttactatagcaagtggtgttctaatcatcaatatttctactcggacatcttcaacacgtatcttcactcaagcaatggctactcgacgacaagctagagttctcgactctatgttcagttgttttccaactaaccaaagagtcgggggctacacaaatacaaggctcaaaatttgacatgttttttgtcaaaatgaagcaatcaatgaatcaacaagtaaattttgggagttattatcttggtcttcgcttcagagccgacattttacttcagcgactctagttatttcgtcgattcaacgagttggacaacatcatctatttttcttcaagtgaagcatcttctacagctacaacaccaagttctactgtcatcttcataaatcaagaggcgttgcatcaatctacattacgcgcactctagcgtcaacgaaattactcgagcttcgatatcttctcaacagtttgatggattattgtcactgacctcattaccaacgcctctactttatcggccctgacgtctacgccattgctaatgggtgactacgtcttcgccttcggttgcttacgtcattgccgacttgttatttcgccttcacggttgacctactacgcaaacgctgatgagcgtcttcgtcattatcattagctgctacactgctattgactggatcaccgacttgtcatcttcatcaccatcctgtcaagcttcttcgacatagcctactctactactatcgatgggcaacttcgtcatcatagtcgatcatgtctgttgctgctaatcgtcattaccgtcggttgcatttgccgtcgccgactattttcttcatcttcatgattgatggatttcgccattgccattgatgagcgtctacgttttcaccaccggcttgcctccgccgccgcccatggtgtcttcgctttcacggctggcttattatgcctttactgatgggcgtctttgtcttcttcaccggctgtctcgtctgtctccgactaattatttcgtcaccatggctacaaaactccgtcgctattgctgggtgccttcatcttaattgttagttgatctgtctgccgccgactggtttcttcgcctccatggctatgcgacttcattacctttgattggtatcattgtctttaccaccaccaacatcttcgtcagctttgatgggtgatatcatcttcatgttagtcatttcgtctccatgtcgactgcatcagctattgccaatggacaattttgactatgacagaaggacaagctatatattctcaggggcttatcaactcaaacactaggatcataccttcaagttggattttgttctgagattattttctatgctcgaagactgaaccaatcattattctccgtaagggctatcaaccgaatacttgcgccagtcgggattcaatttttatatctattttggagtatcccataagggataatcactcagatcagaagctattcatatgagctacacttggtctatattacccggaagatttattactcgggagcatgttatatgcgtcatcctttaaagggtgtcgaaggcatttttttttggcctaggcctaatatgtttgcagcccatattttcatgtgtggcctgtcacgttcttttagggacttaggcactttttgcttaggccaaagtgtgcgtgatcaagtgcccaatatcttaaaatccttttataccgcagttactcaactttttaggagttggtacaatgcatcttaaaaggtgtcaaacagtaaagctttatatagctgttccgctgacttttttatataagtcaaggtgttgtttgggtttttaagcaatcgattggatacaatatcattgctttttgccacgtaagtgtgcgtttttattgaccaatattatggcttaggctgattatatatcttggtcattttccaggcggttggtaaatcctttatgagtttatttactcggattttacaccacatatgccgtatatttccgggtgtggtgaaaccatgtgtcttttagggacttaagcacatctgttaaagcagtgtgcgcatggcgtatgcccaatactttggaaatttctttattcacaacattcaagcttttttatagctgttttgctatgtgtattttcaatgatgtagtcaactttaggttgctctcatcaatttttacaaagcaatcggtatatcacttggatcatgttattcggggattcacaccgcatatgctatatatcaagtcatttggttgattacaattatcaaaaccactcggttggttggattatttattccttgactatacgcttagtttgttcagctaaccacatagtcggaggctacacctattaggtgcatctagtcgatgcacctaactttattttccaaccctccacagtctagtcgaagattatcttttcgactatgaaggtctcaagggctactatggagattatgggtaccccatacccacacggcgtggttatccgactggttataggggataacttatatctatgaaatatgtaacagatcatgacttgggtattacgtttccctgtatattatggaacggcctaaagtcctggtttgataagattgtaaagtagatttaggaaaccgataccgtattggttaaggtttctatcttgtaatcctgccccccatcctatataaggtggacaggaggccctctagggggcatgagacacaactagatcgtcatatctatactacacccggcggattcaaatcctcaaacaggagtagggtattacctctcattgagaggacctgaacctgtctaaatcctttgtctccgcatccatccacttttagatctcgtgcgctacccccttttattattgcataattcatgtttcgacaccagagtttgtcttttttttttggaatggagggagtgttcagattcattgtactagtcacattatagtactagggcctcgtttagttccccaatttttttcccaaaaacattacatcgaatctttgacacatgcatggaacattaattatagattattttaaaaaaactaattgcacagttagaggggaaatcgcgagacgaatcttttgagcctaattagtctatgattagccataagtgctacagtaacctacatgtgctacagtaacccacatgtgctaatgatggattaattaggctcaaaagattcgtctcgcagttttcaggcgagttatgaaattagtactttcattcctgtccgaaaactccttccgacatccggtcaaacattcgatgtgatatctaaaaattttctttgcgcgaactaaacaggccctagttgtctattttttttgggacggaggaagtacttgcttgtgagcctttttgttgctatagcccaaattaccccgtgtccgtggcccatgaaaaccagtcgcttccgtcctcctctgtgtgtcgggcatcatgtaggaagtctaggaacgtatttacacggtgcacaaaacactcatcaattctaattagtgcacacattgtttaacaaaaaagatatagcatatcttgtcatcaatacaacgaatctagacaacgggtagtctagattcgttattctaagaggggtcgtatccccttagagattgagttttctttagaacggaggaaataggtggcagtagaaggccaaaaagaagagggaggtggttcagcccatccattgaagcccatgtttgtcagccaccaaatctatgaagccaagagtaaaagattattatctgtcttatagtccatgcattcctccataaaaccaatatatgattcatatattgatcataattcctcgttactagtaattcgctagtacagttgaatgcaaaatatattgctgtccactgctataaggaagtaagctaagtattgaaaggaatacgaattaaaagtaaagagagaaaaacgataggaaattcaaacatagatccggcgagttttctctgaggtataagagattcggcaatctccactaatactcgttggagcactctacacaaagagtacactgtctctgatagtcacgaagtccattggcgctctcatcatggtggttcttctccgctctgaaaggtgaaccccgaaacctccacaaccacaccggctctcccacaatcttcttgacagatcaccgggttgccttcgagactggctaggcatgccaagatgccaatagttaacaggaagagagccactcctcctgttaagaacaggattcttgttggtgcacactaagccactcttttttgacgtgaaacagtaggaaaatataatttacagggagggtggcaagcaccagaaaaaagcatactctcaactcaaactagcactaaattagtgaagaaaattatcacaattagctcaatgatgctcttagactctcccatcaattgctcagctcaatagggttccaaaggacaccggggagtcaagccaagggatgtataaagccccaatcaagctccctagcggtttgcagccatcgtaaagaagcagccaaaactgcaaatcgtcaaacagtatggcaccgacccgaactattctgcccttcatacttttctgattgtaactgggcaagtagttgttgggccataaagcataggacaatccaacatctcctagattgcccaggacccctttgtccacacggtgtcggacaatccgcaatgttcaaaaaccaatgaccagtaacaatcgaatgaacatgccagattaaccgacgtcgtgtcgaactgtccgctagttgccaaattaactaggcatcagacaattcgagagctgccggacagtctagccagttcatttccactatctagtcaacatggtcagacaatgaactggctgaggatgtttcttttgttgcgtacatatgattgtaaggatgttcagtgcagggttgtccctagtaatttggggcctcgtgcctaatataaaataaggccttacctttagaaaatactattatataatagattagaattatatattatttataatacattaggtgggtatgccctctcacagctcatgagtcatgaggagaaagagcggatgatgggtcccaatcatatgattctcacaactagcataccccctcatctactctaaacgaacctttggctgcctattgcattcttaaagtaagaaacaacaataacaaacaccttccctgaatcgagtggacctagtagccagagtcttagatggtacaaagaagcccatgatgaggaggaggtagtccaatccctgtattgaaacctatgttattagtttttttttaaaaaaaaggaagaaacatatgctattaactattagatgtactcacctattttacctttgtattaatatatttgccgtatagttgacgcatttcaatgtaaaccagcgattcaaatattgatttttttgaaagatccaaatatacaaacgttactaccaatctgtcgttgaagataagtcaaaaacaaattcccatccacctatttaagaaggtggacaagtggatggttggtaggcccaccaacgtgccccctcacacctcctgagtcacaaggataaagagcgaacgatggagcctactcatacacttctcacaccttgcacacacaacacaacccatctgttttagccggacctttggccgctgcactattaaaatgtagaagtagtgcaacccctattaaaacccatgttattaaatactatgtctattcaaccacattaatgttgtatttatatttttctctatagtcgttgtattctaaagtaaacgagtgattcataaattgaatataatttttcaatagatccaaatataaagtctaacaataatttgtcactacatatgaatccaaaacaaaattttcatccacccatttaaggtggaaaagcggatggctggttgccccaccaacatggccttcacacctcatgagtcaatgaggaagagtggatggtggatcccagtcatatgactccgacaactaacatacccactcatgtagtttagataaacctttggctgcctagcaatatcaaaataaagaaacaatgttaacaaatacattccctgaatagagtggacctagtagccaaatacttattaggtggtataaggaagtccatggtaagaaagaggtagaccaattcctctagtcaaacctatgttattcactattaggtatattcatgtatcttatctttgtgttaatttttttataattgatgaaagtaaaccaacgattcactaacagattttttttgaaagatccaaatatataaaggatactagtaatttgttgctaaagattagtccaaaattaatcacctatttaagaagttgaaaaagtggacggttggtaggcccaccgacacacccctcgaacctcatgaattatggttgtgtttagttcacaccaaaattggaagtttgattgaaattgggacgatgtgacagaaaaattggaagtttatgtgtgtaggaaagttttgatgtgatggaaaagttggaagtttgaagaaaaattttgcaactaaatacggcctatgattaggaagagtgaacggtggggcccactcatatgcttctcataccctgcacacccgcccatatgttttagccggactttttggctgttctgctattaaaagaaagagtaaatcttccacgacgtgtcataagcaggatggcatgtactaatcatatgcctattataactagcatacacacttatctagtctagaaaaacctttggctgcctattacattctaaattaagaaataagtaacaatagtaaacaacttcccttgaagacctagcgtattaataaggaggtagtccaacccctctcgttgaaacctatgttatttaacaattagatatactcacctactttacctttgtattaatatctttactgtataattgatgcaatcatcacatattgtatatatatatttttcaaaaggtcccaatatataaagacaacaatccgtcactaaagataagtcccaaaagaaatttctatctacctaactaaaaggggtaattgcacattgactctcttttgaaagctaactatcaatttgaccctcttttatcaactttaattatttaacccttttcttaaaaattgaagatatggtatgaccctattctattaagggcatctaacgatgttaactgaagcacaaaatgtcccttctgcccttactcatttgaccctattacatgtgggacccacgcgtcagttctctcttgtcctctcctccacagctccacacgcagggagaaggccgcgagcagcgagagggcgagccagcgccgaccagcagctgtggagcaccgcctccactcctcgtcaccgccgagccgtcgttgcccctcccttgccggatccagccatcacagctccatcgctgggttcgccaccttcctttcttagtgcatgccggtggcgcctcctcttccctccgcgcgctgaccgccgctgctacctccctccttccgtgcgcctgccgctgccgccgcggcctcctccctccttcagcacgcctatcaccgccaccgccaggcccggctcccctccctcccttcgccgcgcgccggcctctgcctccctcctcgctgcacgcgccgccgcctcacccgacggtgcgcgcagctccactgcatgctgccgccaccaccgcaggggaactgtcgccgccgtcgcagaggctcggcgcagccgctcccttcctccgcaagccgacgccggtgcagatccctccatccgtttcccaccaccgccgctccttcccttcacaagcgtgtgccagcgaggatcccctccacgcgcttcccatcaccgcggcccctgcctccacgagcgggcgccgccgcggatcccctccgcgtgcttcccgccggcgccgcccccttcctcccttcagacaccgagtgccaccaccgcaactcgctggcaggagagagagagatacacatgtggatagggttagggatggatatggtttcctcaagggtattttggcattacgaattttatttatatttctttgtttttttaaatcaaatcttaacggtgtagtggaaacagggtcaagcggaaggttcgtttttgaaaaacatggtcaaataagcaaactaaaaaagtagggttaaattggtagttagacttcaaaatgggataaaataagcaattgtccctattttaaaagataaacaagtagacagttgataggtccactgatgcacgccccctcacacgtcatgagtcatgatgaggaaatgcaaacgctgggacccactcatatgcctctcgcaccccgcacacccacccatccactttagctggacctttggccgctctaccctctatcaaagtaggaaataacagcagcaacaacagctcacagccgtaaaagctcacacacctcctcctcctcctcttccacgcgcgtcagtgggccgcgctgcaccgcgcattgcttcacctctgcacacctgaaaccgaaaaactcaatttggagtgaagcagggagagagagagagagagagagagaggagagaggtgtcgtggagggaagtttttgaacaaaaaatttccccaacccgttgggcacgatgccgtcatgatccccccttacctcactgccaaaaaaatttcaatatctcacccacattaatcaccttcctcacgagtctaacgagcaaaaatcccatttcatcatcattcatatcaatcctctcgatttcttccacgtccccggattctgtttcctcctcctcccccgtctcgatccctcctcctctttccctcgctccagcgcgctcgccgtcgcccgccgcccgccaaccatggaagcagctggactggaggaggaggaggaggaggaggaggcgatgccatggtggtgttgccgcagcaggaggaggcggcgtccgtcgaatccaagggagtccacgtcatcggcagccgaatctatgatccggagaacctacaggtggtggcaactagagcctacaggcggggtaagctctactgcgataagtagggacgatcttggcaggggcttggtttgatggaggggttggcggcggtgtaggaaggtgactgggtaagggggtgtgactgtggaacggtgaacttgagctggcacacggctggctcaggctcaacaacacgagcaccgctccatgcacacgaactcccagtctaccacaaacgccacactccctaacgacattaccgattgggagggtgagggagagatgagaaagaggctaacatgtggccctatcctcgtcttggatccagatcaagtccatgagggatccatgtggcatatgcccacgttgtctcatggagcggatcaggggctagtttttgaccagtgatgatgcacagtatacaactcatacttgaagggttgatgcataaaaaaataattttcatgatgtcattcagagttcaattttgatcccttctactccaatgaaaaaaaaagatcggttgaaatgggacaggagagacatgttttttttgtggcgtacatatgattgtaaggatgttcggtgcagggccgtccctagcaatttggggcctgtgccaaatataaattaagaccttatctttagaaaatactattatataatagattagaattatatattatttataatacattggggtgggtatctaataccacttcttttttcttgatctgcattgcaatcaatggccttctatccacatcaagaaagctagctttaatctaatgctactttctttagctatatccacaataagcatgaattgtttttaaccaatgataactatatctatgtcaaagaagttcaccaacctacatctgtaaatgttatggcaatccggctaaatagaagaagaatttatgggatctgaaagtgcattttgagaattcagggacttcgatgacatatacgaacaagtttagggactagtcgtgtactttactaaaaaatactagtaatttggtactacagctgcgtccaatacaaatttccatccaccctacttaagaaggtggacaattggacggtttggaggccctcacacacctcgtgtatcatgaggaggaagagcaaacggtgggatctactaataagcctctcacatcctacatgcccatctgctctaaactgatctttggctgcctaccaccttgtcaaagtaagaaatatgcatcaacaacaaaagggatgtttagatccaggggtgtaaagttttggcgtgtcacatcaggtattatatagtgtgttgcatggagtgtttgggcactaacaaaaaaataataattacagaatccgtcagtaaaccgcgagaagaatttattaaacctaattaatctgtcattagcaaatgtttactgtagaaccacattgtcaaatcatagagcaattaggcttaaaagattcatctcgcaaattagccgcaatctatgtaattagttattttttagcctatatttaatacttcatgcatgtgtttaaacgtttgatgtgacagggtgaaaaattttgaggtgggatctaaacagggccaaaaacacattcccaaaatcgaggaaacctagtggctagggcctaaggtagcatatttacattaattattgattaggtggtacaatgaagacaatagcaaaagggagaggcagtacaactccctattaaactcatgttaatatctattcgactaacttagtaatatctttgttctatagtcgatgcatcctaaagtaaaccagtgattcatatattgaatatatttttttagttgattcaaatataaagtctctactagtaatttgaaactacatatgaatccaaaataatttttcatctaatcatttaagaaagggcgaaaagtggatggctgattggttatgccccctcatagctcatgagtcatgaggaggaagagcggatggtgggtcccaatcatatgattctcacaactagcataccccctcatctactctaaacgaacctttggctgcctattgcattcttaaagtaagaaacaacaataacaaacaccttgccttgaattgagtggacctagtagccagagccttaggtggtacaaagaagcccatgatgaggaggtagtccaatccctatattgaacctatggcccgtttggttggagggagtttttaggagggattgggagtttagagggatgaggctattaagtgttttgtttggttggaagacatgtgaattttgatgggatggagatgggtaattgaggaaggaactccctccttttcaatacctgggtaggggcaggtaattgggagggaattcctcctttactttgtctaagcaaatatcagccatccgtttttattaatgacataatctccaactaaactccctatcaatttccatcacctctaccaaacaagatattgggattaaaaatcaaattcccatcttaatctcatcatcaattccctcgtgtaaactcccaatccccttccctcgagttaccaaacaagttgctatgttattagttttttttaaagaaaggaagaaacatatgctattaactattagatgtactcacctattttacctttgtattaatatatttgccgtatagttgacgcatttcaatgtaaaccagcgattcaaatattgatttttttttgaaagatccaaatatataaacgttactaccaatctgtcgttgaagataagtcaaaaacaaattcccatccacctatttaagaaggcggacaagtggacggttggtaggctcatcgatgtgcccccctcacacctcatgagacatgatgataaagagcgaacgatggggcccactcgtatgcctctcgcaccctgcactcccacccatctgttttagctggacctttggccgctatactattaaaatggagaagtagtgcaacccctattataacccatgttattaaatactatatctattcaaccacattaatgttgtatttatatttttctctatagtcgttgtattccaaagtaaacgcgtgattcttatattgaatataattaaacgcgtgattcttatattgaatataatttttcaatagatcaaaatataaagtctaacaataatttttcactacatatgaatccaaaacaaaatttccatccacccatttaaggtgggaaagcggatggctggttgtcccaccaatatagcccttcacacctcatgagtcaatgaggaagagtggacggttgatcccagtcatatgcctctgacaactaattacccactcatgtagtctagacaaacctttggctgcctagcaatctcaaataaagaaacaatgttaacaaacactttccccgaatagagtagcccgagacttatgtggtataaggaagtccatggtaagaagtagttcaattcctttattcaaacctatggtatattcatatatcttattctttgtgttaattttttttatagttaattctaaagtaaaccaactattcactaacagaattttttaaagatccaaatatataaaggttactagcaatttgtttctaaagattagtccaaaattcatttctatccacctacttaagaaggtgaaaaagtggacgattggtaggaccaccgatgcacccctcaaacctcatgaatcagagcgaacggtggggtccactcatatgcttctcacaccctgcacacccgccccgtatgttttagccggaatttttgtcattctgctattaaaagaaatagtaaatattccatgacgtgtcatgagcaggatatcatgtcttgatcatatgcctattataactagcatacccacttatctagtctagaaaaacctttggctgcctaatatattctaaattaagaaataacaatactccctccgtcccaaaaaaagtgcagttttgtactattcatctccaacgtttgaccgttcgtcttatttgaaaaaaacttatgattactatttttattgttattagatgataaaacatgaatagtactttatgtgtgactaattttttaaaaaaaatttataaatttttcaaataagacggatggtcaaacgttggacacggattttcacggctgcacttattttgtgacggaggtagtagtaaacaccttcccctgaatcgagtggacctagagtattaataagggggtagtccaacccctctcgttgaaacctatgttatttaacaattagatatactcatctactttatctttgtattaatatctttgctgtataattgatgcaatatcttcacatattatatatatatattttttcaaatggtcccgatatataaaaacaataattcttcactaaagataagtcaaaaataaatttctatctacctactttaaataagtagatagttggtaggcccactgacgcacaccccctcacacctcatgagtcatgacgaggaagagcaaacggtgggacccactcatatacctctcgcaccccgcacacccacccatccgctttagctggacctttggccgctctaccgtcaaaccaagcaagctgtcaaaggaaatagtaggaaataacagcagcaacaacagctcacacagacacacacctcctccccctttgacaattgacaccccctcctcttccttccacgcgcgttagcgggccgcgcggcgccgcgcattgcttcacctccgctccgcgcggctgaaaccgaaaaaaacccaatttggatcgaagcggggagagaggacttgaggagacgcgtcgtggagggaagtttttgaaaaaaattttccccaacccgctgggcgcgatgccgtcatgatcccccccctcgcctcgctgcccaaaaatttttcaatctctctcgcccacattaatcaccttcctcacgaggccaacgagcagaaatcccatttcatcatcattcataccaatcctctcggtttcttccgcgtccccggattcagtttcctcctcctctccccccctctcgatccctcctcctcttcccctcgttccagcgcgctcgccgtcgcccgccgccgtccgccgaccatggaagcagctggagtggaggtgaacggaggaggaggaggcgacgtcgtggtggtggtgccgcagcagcatgaggtggcggcgaagcaggcggcggcggcggcggcggcgaaggggaagtccgtcgaatccaagggggtccgcgtcgtcggcggccggatctatgatccggagaacggcaagacctgccaccaggtaacccctcctcctcctcccacctacctgcctgcctaccatctgttcgacaccgtgtctagccggtgtcctatgaggagtcgtgcgtccctgttcttcctccccggtggttgggtcgggttggatctgaggaattcttgctcgcccccccttgtttttgcggggaattcttgctcacccttgggtttagcggttgctctgtttcttgctccctcgcagtgccgtcagaagacgatggacttcgccgcgtcatgccacaagatcaagaagaacaacaagcagtgcacgatccagtactgccgcaagtgtctctttaacaggtgaggggggaatttcttctcgtcttctttcttagcttcaggaggcagagcaaggctggctgaccatgtgatttctgagtgattcgtggcgcaggtacggccaggaagccgagaaggtggccaatgacggcacctggacttgccccaagtgcaaggatatctgcaattgcagcttctgcatgtgagctgaccaaacctgatgctctaccggtcatgctgattatctgtggctcgcgttttgttgtcagaagtgatggatggactttgatttgtttggcaggaagaagaaggggctgccgcccaccggaatacttgcccatgctgctaaggcttcaggttgtgcttcggtccatcatttactgaaaaaggggaaagaagcggtggctgccgcgcagaggagcacccagaaagtgagatctacacctgtgaaggtgtgtggtgttcaggattggcacgatcctttgtcacattacaattcgctgttgcatggtacgattgttcactatgtttgatatgttttgctgatcctttttttatgaacaagcagaagagcccaaagagggccatacagccagatgctgctgctgatgaacctttggctgaaggggatgagaatgtatgcattgatttcaatgctgctccagtgaagaagcagaagagaagcaggaaggtgggtaatggtgtggctctgacgaaggatgaaagccctgatgctcccaaggaacaagttgttctgcccaagggcactccagtcactagtgttgccggtgcagagtgggagcctgaagatgttggtcttgcacttcagttcttcgaattctgccgcacatttgctgaggtagttacgaaagaaagatcaaggatatttaatagtatgattgcacatgccttgtcagagtaatatcttactagcatttgcaagagaataatagatcgagttttttttttctatttacatgtctgatgcatgttatgttttggtatgaagtatgacaatgtaaaaaatgcttttactggtaagcaccgaagtgttgatattagagcttcctacaagtttggaatcatatctatgtgtttatgtaggtaaggcatgcaatgccatgatgggatacaaatcataaagggaataggtattcggattagaatttggagagggagatggtggggtgaccgggtgacagcaaatgggcaaaaggaaatatatgactacctgttgagttcattgtacgcattaaatggatgcgatttctctgcgtgcaacatgctaacacctagatacaggctatctgttaattgccctttaatgtgtacaatattcgagttcctatttgtaattatgaggtttcttttttattgcatggcacttcttgtccatatgatatacatgttaacattgataaactggtcgaaaccttccaattatatttcttggtttgtaatttaagccatgtagtagctttcatataacccaaattaaatgttattatgttctgtcgaatttttttatttgtgataggctgcgtgttcaactgaactaccaaagctatgttttaaagttttttttttaaggaaactaccaaagttatgtttcatcctatacaatatctcttgcaaaaggtatgtataaagctccattgttttacacatagtttgagcaaagttcaaacttctgagcaaaacaactatctattccatctgttccaaaatataagcatttctgactatttacctgaacggaaatgcttatattttggaacgagggagtaagtgatagcgaagcttattcttttctgtgcgagtttataatttatttcttctgttatagaccaaacatccaagtccttaaggcataattttggtaaccagcaaaacattgtaacagttgttttattaggcgatgtgatagttatcttaatcttttatgtttatttctaacaagtgtcatggaacaattagtgtaaaatttttgcaactaccgtgagtcctgttccattacaattgttgcatcatacttcctccgtttcataatgtaagactttctagcattgtctacattcatatagatgttaatgaatctagacatatatgtgtgtttagattcattaacatctatatgaatgtggacaaacctagaaagtcttacattatgaaacggagggagtaacttcttagtgttttttagagttttccttttgaattcgggcttaggatcgctttgcgttataatctgaagtatttagtcattgccgcaagtgatcgctgcgatgcaatgcgagcagagttgagcgaacagtctgtcatgtaagagtacctgtatctgagcacaaactaaccatgggcgcgtcatgcttatatctaggatgtactcaataatttacaaccccaagtgtatcgttttacggtctgatctcgtgcatatatcgtgcatatgctctctttttgcttctatgtaaactccttgtttcaataataataatacaaggataacgcagtaattaatttattgagattgctgtgggcgttggttttgaactattcttttttctgctattttgttttacatatataaagcatgcatttattttctggtgtacttaacaatttgagaaaatagtcacagtttgctgctagcattacaggctttttaattgaatcagatattttaaaacaatatcttgtttccttagttaatatactaatctgctctacatgctcacatggtacattgagattatattttgtattgcaaatggaataacatactgatttttccccacagattttccaagtacgcaagggtcaaccagaaagaatccttcgggacatagctggaggtcgtggacttcgagtggtgtcctcagtcatcgctgacttccacataactttgttatccatcatccaagaaggccgaggaatcaagtaagtagatcccaaaccgagccttttttttttctaaatgcagttgataaaattataattatgttgttttcttctcaggcctatcacatattcaagagataatgatgcatggattgttgatactggaaaatgcataagcgagtcaatctttgtcccagagggacttccccttgactccctaagtcagggggtatcgggatataaaaatctgagcccttcttgtaagctcagtgttctgaactttttgtgtgatgaaagtctttctactgagtaagtattgcctacacatttgttaatacttcccttcgctattgtgatgttgttatttctgattttttaaattactcttaacattgttcaggaagttgaggagctgcatattatctgaaacaaaaaacccctccagagaaaaagctcattctgcaaaagagaaggttttgatcttggcttgcctttcccaccttgtcacatggttctagaacaattgacaaaatatctcctgtttgttaggaggagccaaaagaagaaactataaagaacacagatgaagcagtgcttttgaaaactgaaggagcagctgttgctattgaggaagataagaatggcatttctcaacaaaaggatgtgaaagaagtaaagaatgcagacacaaatggtatgaattatattgctaaacatgcttcgtcatagccttttaaacagattactttagaacattttgcatgatctcctgcactgtttatttcctgtaatgcgaaggaaaataagctgatcattgttattaattttgttctcaactatgaactatggcaacatcagaaaagaagcatggaggtttccttaggactaatcctttcatggtagacaaaaaggtaatctattggaagctggatgactattgtaataacacaacaatgatgctccaaggtttgttggaaagcgttattcaacatccttccactaatttcagttctgcattataaaattggagacgattaacatctgtctgtatcagaggttgatgctgatgatttaatggggaacaaagacaagtggtttatgcttaatgaagatgaaaagaaaatagttgaaaactatttatccacaaggtaaggatttctccatatcaatttatttggatttatttttatctattataaatcaggaatgcatgctgattggtatgctggataagtcaccaaaatattttggtagaaacactatttgatattttatctgcaaacaaaattcgtgtttttaataaaattttccaatgattgaaccacctgtacattgtgatgtacttgatgggtatatcctttgaaggagcatcctaagtaatatgcactggggatattatttcctgaaaatgtagtgtattgtgattccacaaagctcaaatatctcaactgaatcattccaatatgcttagttatgatcaagaaactttagtagcataaaatggtcggtgaagcactttgtccagacatctgactaactgaagtgatgtactgcattaaataaagtttattttatatatcatacttgcattttcaatgttccatggccatattactggatatggatgaatatatctgtgtttttgtgtacctcactactataacttgcactgtccacacattttcctagctgaagtgatgcaccacattaattaattatagcttgcattgtccacatattttcctagctgaagtgatgcaccgcattagttaagagtttattttgcatatcaagctagtggttccttattttctacttgactgaaacttttgtataatacagggtttagtatgataattgataatgaagtgagatattgagatgtaacatctttgttccccactagttttatgttgtaatttcaggaaatattttaaaaaaataatcaaaatttgacatcagaagtttagacgagtatgcagagaattactgccaagattggatgaccatcactggcttaactattaaggaattagtttatttattactatcataataatgcaatcagttatctttttaataacagaatccaaactatcagttctgatgttttcactgttgatctaaaggtgctatacaaatgtttcaagaatcaagattatataggttacaaaaaaattgccatgtatgttgacatgctgaagtttcatcttgtccttgtgatgaatgcaatgatacttgttgctcattgattaaaactaacgtattagcatattctacttccaacttctgaaatagcatatcagtaacttgttatcgctttcctcaattggcaatgttttaatacctaatattgctttcaataactttctctctttactcttatatcagatcacacaagctaactaagttcactttgtttttgtcaactccatgaatagtagaaattgtctttgtcgacacagtttgtcactgatctgacatgtgattttaactggtaatacaggcctaaacgcagggggagaaaagctgcacaatagtctactgatcatactctctaggttcctcacctggctgaaggtacccttttaattcagcacaccccttttcatttctttagtttattattaccattttgagtttagttttgtatgggtcctgcatctagactacgctaggagttcccatatcattttgtttatgtgacactgcctacatcaatcttcttacttttacatgttatcaatcggatagttgtatttttgttgatttaattttgagtagataatttggaatgcgatacatgctatgatctatgatttggtattttgctactttttacggaatttgtagcctgctagatgttcttacaaagatatgagaatccatgtgaggacatgccctcatggatactcaactaattaacatgagtttagttgcggttattaatatgatcattttttaaccagtcataacaattgataaatgtaccatgagcttgttattgtgttgaagtggtatcactattttgttaggacttgaaactgtgaaataatatttctgttcttttttggcaggtgggtggactatgctagttgagataaggcaacctctgttgaggccagaagggccattttttgctacagaaaatttgcgcaattacagaagaaccaagaattgttggatcattcacagaaattgaatcagaagcttgaacaagttttgtccagatggcaaagccggcaacttttgtaacacctttgcagtttcctagatgatactgacggaaaatgtttcagtatgatcgcgttatactgaaatgttgcactatagcaagagtttgctatagtcagtcaacccccgttaccgtggtgtggttaaagttaaactgttgtgtgtaacatgtgactgtcgataatgactatccatccattcagttcagtgctttagatgcctttgatttttccccccttcagggctttactgggttatctgtgttagctcacttgcagcacgggtgactttcacaaacaagtgacaatggcaattccttgccttgtcacaattggagaaattgacatgattttccagatggtccggatattattatgctccaattattcttgattggtttagtgatttgccctttccagattgcggactaggggttaggattacatgagtactcataggaaaaagtaaggggcaaaacctacgtgaagtctagcgtcagcttggtatagtttggttctgataatttgttgttggtcactatggtctctacagatagtattctactgtagaaaagtaccattggtttatgtatttgattagtagaaaattccactgccatatttgaggtagtagtagtatggatagatatagcctattggacgaggaaagatagaaagtctagacttaataaattttggtccaaaactttcttctgtattaggtaaggcatcttccatcattttggttttgtgtttttttttatgaagcacacaaactatgtttgttttaactctctaggattccatgaacatgtggtccaaagattctatcatacttttgtcaagtcaaaaaaagttgctagttttgtagcggcctgcaccacacctccacagtgtggccaaagaagaaaaatctatggacaaactcctattatcttcacccataggatgtactaaatcaccccctaagaatgcctttagagtctagggggtcactagtaaacacctacatactggtggatcgaaatgggcatcacttctagtttggaaccagtggtgagaaagaaatagtgatgttttacggtaataaaattgaaggaaaaaaaatagcacctaggccagctccagttcatactctgagttaccttctagttccttgcacgacaccttgtgcgcacggtggccccttgaggtgcttgcgggtcccgtcttcattggaccctatttgtcgttgtcaaccccatatcttacaagaactgactagatctagtagcctcaagtttggagcaaccaaatctgacactacaatgcctctcgctttgccactcatccttgtcacccaagaccatggttgttttgttgcttgttcctaggccaatcgccatcatcaccatcacctgcgctcagagcacccagatctggcaattagatctagcagccgtaatattgcaacaatcaaatcaatcaacccggagctctggctagatagatttgattgttcaagggcaagtgtgggtggagagaaagagagggggcggagggtaggggagggagatcaagggcgagtgtggatggagagaaagagagggggcggcgggcagggaagagaggggatgtgaatcagtaagggttgagggagactaggtatttaacgatagtgtaggaaagtggctcaatttggccttactcggctgttactatcacttcttgtttctatcttgaacatgtggtgataaattttgttattagtggatcaaaatgaattaatacttatagaaggttaggctatgtgtttgctcacaagtgggtcatagatcaatctattgttatgccaaccataacattctaaggtatggtgacaaaagtgctagcagactgagcttttaagaaccaaagtagacggacacacatccttttgttatactacgagcacctttaatttgtaggaaaatataggaattttggaggattataatcctattggaaaatttccaattcctctctcatccaattatatctctttcatccaatttctacgtttttccagcggtctaatcaaacagtcattcttatattttttctacgttttacaatcctctgtttgtttgcacttgtattcctattagaattctgtgttttttctattctttcgttttttccattcctatgattcaaaaatgcccgacatatgcataaggtgtcattgatagatggatcccacttgctctaggaccatatgtcagtaacacatactgcatatgcagtacaagcaaaggatctcatttaaggccttgtttagttcgcgaaaaaaaaatttttgtgtcacatcggacgtttgaccggatgtcggaaggagttttcggacacgaatgaaaaaactaatttcataactcgcctggaaaccacgagatgaatttattaagcctaattaatccatcattagtacatgtgggttactgtagcacttatggctaatcatggactaattaggctcaaaagattcgtctcacgatttccatgcaaactgtgcaagtaaatttttttgtttatctatatttaatacttcatgcatgcgtccaaagattcgatataacgtttttgagaaaaaaaatttggaaactaaacaaggcctaaattagatctggtagtagcagaccctagtgcaaaagtgcacccaataacatgtatcagtagtactcacggttatgtgctaaaaggtagaatttcactgattgtgtattttgccacatgttacaaatttccgttttttcttgttatttttcttgcaaatgcaggtgcatactgtcaatattgtaatttattaaagaatttttcataacttctaatgtggggtttctgggcatgggaccaccgatagtaatgtttacctagtacgtactcccttcgtcccaaaatataaaggattttgaatggatgaatatttcctagtattacgaatctggataggctaggaaatatccaatccgtccaaaatcccttatattttgggacggagggagtatattatgggccatataattgacaataaggatacattacttttgagctaggcaggtgaagagggagatgagaccaagaagagagagaatattattttaaacaacatgtgttgtaggcctacggatttgtgcatggaattaacgaatatgcaatactacacaaatggcttttgttaaaaccacctcatcacaaggtctggatcatcctgcctattgagtgttgaactggtaattatagtttttttaataaaaaagttagataatttttcatataaagtcagataaaaataaactttatatccataagtattgttgtagaacttaagaatatttacaatctatagttgacaacctttatatttaagatcattcatatgtctgtatacgtgttagaaggtctagagactattttgttgaggccaaaatttgactttactacacggctttgtatggtgattggagacaaactttatatcatggtttttaaggtggtaaggtgaccccggactaccttacaggtaaggcttaaggcgagatgacgtcttaggcacatcaaagctgcattttaagagcagtacgacacacatatataccttgttcttggcaactcttaagcccatgtagcatccaatacctacatggcagcatccacccccttagaagcatcaccattttttgtgttatgaagataataatagatgcataattgtaaacaatagttaataaattgcttccatttacttgagtagcataccttgttgatgacctgaaagcagcaaggcacattattgatgagcaagatgataatataaagccataaattcaaagacaacaaagtaagcatttgagcacgagtaaattgcatattggaccactatattttacaactctatcagcttggactattggtagatctacatttccctattggactgggtaaatttacaaaggtttcagtttggggctgttcttgtacctgtagctccctctctcctctctttgtgtactctctctctctctcgctctctctctctctctctcttcctttgtgggcaagaaaagaaccaccgggtgggctcaagactgtagcatggagctgccggccgagctcaacttaagtgcaatgccggagctgttggggctaaggccgagagctgagctggctgctgactgggctcaaggctgagcatgacactgagccaccaatgactctcgaggccgagcatggtgtaagccctgacagggctcgaggtcatggtcaagtgcgtagtctgcttcgagcggatgccaacagtggacgtgctactagtggagaggggtggaggggctaccataggttgttgcttcgctaaagcatggctactacagggaaatcatcatcatcatgggtggtgttatccaatttgccacaacaacttgcgtgatggctctcaccgtggtcagcggcgctcggcctcttgcctccacttgccaacgcatggcatgaagtacgtctctgacatgtcacagtccacacaacaaacaaaccaaattatacaatcggtatgcactgacggactaaccatccatttattcgcctcggccacattgatctccacattgttgggtaaaggaccggcttgctggtcatcttcgtgatggagagggtcagaccatttactagcggtcaccaggttcatcaccttcttgatggggtggtgtagttcggtgatggctctgagatatggagaagagggaggagcgctagaggttgaagaactagcccaagctgaagcaactggtaaagataaagtggtctaaagtgaaaaagtttgtttgtccttagtccaatttgcaacaatggtaaaaaagagcggctcaaggtgcaatttactctaaacataataaactatcaagcaggctaacctagcaggcaagtaaacataataacaaagcaaaatagtgggagctatcatatacctaatggcgtataaagataatagtggtccataactccacactccacactccacactctaaacaaatatactataagtccaactccttgtctcttagtattcatcatcaaactcatcgaaattgccattggcatccaaattctcttagccatcttcaatacctgcgtgagcttcatcacaattgctcacatttgcatcattaggtggatcttcctccttatcttcttcttggtcagattgcatatcttcctcatcttcttcaaacattgttgtattccttgggtgcctttgaaaggttattggaacaacaaggttgtgaactctccttagaacatgcgattgttgtcggtagataagtgcaaactttcaccgtcaactcctgcataaaagaatacaaaatataatatcaaacttagtggtaggggtttattactaaccatttccactagtctttgtaaatattggtatgcaggtgatttttgaaagaaaatgcactcgccatgagactaaatgtacctccgaccaaccatacgcaagcacaaggatcggagagcccacatgtcagtcaaaactaactgaatttgagctaatccaccgtcaactgccaaaggggtccactgtcatacaccggagaatgtcggtggccaatggcggtgtgcctggttcggctgatccaaggttggcgcccccagccacctccttgcacgtggcgaccccctattggttggtgatggcg

SEQ ID NO: 9332 - DNA, 136901 bp, Oryza sativa
  unsure (1)..(136901): unsure at all n locations
aagccatggattatcggcatcattcatttagaaatgaaagataaaatgtcaaagatcaagaagatgagatcttcccgataatcaattgacattgaggttggtaaccctccaagtgaagaaacaatatggtgtgaaggtactcctattggtttaactttgctttttaaatttgagtttaggatgccgtactattaagagggataccacatgcatataattggttgaacactagtgctcaaaatgcttcatctttgtgtgagttgaaaaactaagccaaaatttcaattccgagttgtttcacttatcacaacacttacaccgggtttctttgcaagtttttcataatctcttaaaggttttggaccatgttttatgttgggtttgatagcccatgaaactagctttccatagagtccaagatcttcgaaatcggagttcggagtaaaaagttattgcatttttacttgagcaacatcagactatccgatttttcacagaacttcactctctgtctttgtttgaaaaatcctttcgagtgagtttttctaagtgtcggagtatccgatgttggatcagatagtccgatgatacagagactccgaaatttcatagaacttgagtctctgtttgaggacgaagtttttgcttctaaaatatcacatactccgatttaacatcagatagtccgatgtctcggaaagtccgaaatttcatggaacttcattctctatttctcgttgccttggaggtttaaaatatcggactatccgatctcgtatcggactatccgacgtgggctgaaagattccccttcaacggtcacattttggggatctatataaaccccccaccaacccttttctagggctgcccaaactgattacattcctatcttgctttgggttgagctttgtgctaagtgctttggatttttgagctctctccctctctatctcaaatcccccttgttctttatgacttggatctttgtgtgtgaatttggagtttgggagcctagtgtgtgtttctcttaatcttgagcactaggatttgtccaagagttgtgtggtgtttattactcttggaggttgaggactcctagacggctaggtgtcgttcttgggccaccgatctacgtgtggttggccaagagaagtttgtgaaggccggatcttgcctccgcaaggaaagagatacccttagtggaaggaggagtgcatttgtgcaacctcacgaggatagggttgaaaaagacccggctctttgcgagcccctcaacggagactagaatcccctcaaggatttgaactccgggaaatacatcggagcataaacctcggtgatatcctcactttctttaccttcttgttccattgctttgtgctatgctaatattgttgttggtcgagctctcctctttgcttgtggattgaatctagatctcttaggttgttctcttgtttgtattgttgttgtgcaggtcagatagtctgatctcagtttagactatctgatcacataggactatccgacctgatatcagacaatccgaccctgttttgttttagcttccgcatttatttttaaaaccgcctacttgcaatcttgtttttgctaaaagtgagattttacctcaaatctaaatctattgagtttttgaaaaagttgcctatttaaaacttttagggttggtcatttcaaacatatctttagttcaaagcttttgtaaaagaccaaccattctaatgttgcagccttacaaagttcatcaaaaatcttgatttgaccatatttggccaaaacttgcatatggtgggttgaacaatttgagccaaaattctttgtgaataatggcatgaattagtatctctaacccatctaaggctttccaaatgtcaaacttcataaaaatcttatttggatgtgatttgacactttggttgagatttattgacttgaatggcctacaaaactctctttgacatttctcttgaaagaaaaatcttttttgagaaattctttttggaaaattttctattaagtgaaaagatcatttctgcaaggtttcgatttaaattggaaagaatttgactttttctcaccttgctcaagttgctgaaattttcagaaaattcatggtttttgactgatttgtgatttttacatctcaaaataggttgcaaactggaatgagtttatataatgacttttgttcctctatggttggacttcacatctaaatttacttggatttttctatagtcatttgaatatttttatgatgccctttccaagctctttttgagttccaaattctgaaaatcctgaaactttcagttttctaaatttttgtgtttttttgtggcttctaattgtttgagaattgggtaaaactcccaaaatgaaaaatatgcaatgttctatgacctatctacaagatttattgcagattttatagtggaaccaaaggcttcggtaagaccgctcggtttgcaatcaagctcatctatcaccatgcattcgagcccggaggctctgggtacataccccggagactccgggaagatgtgcctttctccaaaatataggctacactccccatttgtttttcattaaacacatgcatttctacaagtaattcaaatactttgaagcacacatttagggggagtatatcctatgttttgtgtttttgagactaacttgttatcaagtgtatttttgtgattagtctcataggagatcaaaaacatcttcgaagatagtttggaaggtgagaccacaataagtccatgatgaccaaggtggactacttgatcaacctcaatcaactcaagtcaacctaccgcaattgtctatgaagaacatgaagacatgtttccggcacaaatggatgggattgataccaagggcaactcaagagcaaagttacaccatacaagctcaagtcccatcggtgtaccatccaagaattcaccacatcattcaacgagatcatctccacaatatcctcgatgatatacaaaaagggagtagctattcattctcaatctgcaaatttgtgaatgttactctctcttgttgtatttggactattagaaggaagatggtgcaaatgctaaaccggatcgggtcatggccttacaagaagagcacaagcactatcaggacgtagactgtgatcaaggagttaaacatgttcatgatggaaaagcttaagttctttctcgggattggaatcaagcaaatcaaggaagagatttcatcaagcccatcaaggtgccaaattcaaattgggttcaagatatcaattttattgaatgggcatctcaaaaatcgacaaggaaggtaacttgatgatccatagcttgttatttaaattggtatgattggatcacttgccttgtctgggcatctaggccaagtttcatttcttgctaattagcctaatttgcaaaatgttgtgacgacatgcttgtttagtcattaagcgagtattaatcacaaagttgttctaagtgaatcaatgtttatgtgaatttttggtcttagcacaaactatgagattcatacatgcgaaactcatttgtgaaatgttttgtgaaaatcttaggtgagattctttttcatctatgctttaaaccctttgcatgtgagctttctatgcgcaaaatttgtatctcaatgcttattgattttcttgtgatctttatgtgaaattgcttcatttcctaatcacaagtgatgaaatataaaattgagaggtaagtactcgatgatccctcatcaaggatccctttgcttttctttccctacttatgccctttttggtgttagatgtcaaagggggagaagtatactaaaggggataaagaaaatattgatcaaagggtgagatatttgtgagaaattatcaaaatgaatgctttaaagatgccaaagagtaaatgagaaagggggagagaatatttgaaagtgtttatcaattggtgtgaatgcttattatttgatcaccatgccacatgcaattaagattatcttttgatacttgaaattgtctacaaaacttgattactcatgctttctcaatcggtaccggaatcaattggcatagaatcaagtttttgcaattggcatcaataatttcatttgatacattttgaattggtgccaagaatttgagttgtgtgtgttgttttaattttggtatctccttcacacacaatacaccccacggatgcaaagagttagggggagctctcacattttcaaaaatatgtgcatgtgtgttcacttcataaacttgtatgcacacatttaggggagctcaaactaacctttggattcaaaatcatttattatcaatcttttgtaagctttaatcgtgttgtcattaatcaccaaaaagggggagattgaaagagcatctatgcccttagtgggttttggttaattgatgacaagcgattaagggactaatgcgcttattgagtgtataagcaaatgattagtccgatgaagaagctaggaaatggacttatagatggatgagaattaaagagaaaatattgaagatgcgggtatgaagtgactacctatggcaagacggtgaagcgcaagtgacgctcagctgcgatggaccatgcggtggtgaagggcaagcaaggggcttggggccgacgaaccgaaaccggtggtgaagggtgagtgaagactgtgtcgtgatgaaccgtgcgaggccatttgaagccatggattatccgcatcaatcatttgagaaatgaaagatgaaatgtcaaagatcaagaagatgagatcttcccgataatcaattgaccttgacgttggtaaccctccaagtgaagaaacaatatggtgtgaaggtactcctattggtttaactttgctttttaaatttgagtttaggatgccgtactattaagagggataccacatgcatataattggttgaacactagtgctcaaaatgcttcatctttgtgtgagttgaaaaactaagccaaaatttcaattccgagttgtttcacttatcacaacacttacaccgggtttctttgcaagtttttcataatctcttaaaggttttggaccatgttttatgttgggtttgatagcccatgaaactagctttccatagagtccaagatcttcgaaatcggagttcggagtaaaaagttattgcatttttacttgagcaacatcagactatccgatttttcacagaacttcactctctgtctttgtttgaaaaatcctttcgagtgagtttttctaagtgtcggagtatccgatgttggatcagatagtccgatgatacagagactccgaaatttcatagaacttgagtctctgtttgaggacgaagtttttgcttctaaaatatcacatactccgatttaacatcagatagtccgatgtctcggaaagtccgaaatttcatggaacttcattctctatttctcgttgccttggaggtttaaaatatcggactatccgatctcgtatcggactatccgacgtgggctgaaagattcccctccaacggtcacattttggggatctatataaaccccccaccaacccttttctagggctgcccaaactgattacattcctatcttgctttgggttgagctttgtgctaagtgctttggatttttgagctctctccctctctatctcaaatcccccttgttctttatgacttggatctttgtgtgtgaatttggagtttgggagcctagtgtgtgtttctcttaatcttgagcactaggatttgtccaagagttgtgtggtgtttattactcttggaggttgaggactcctagacggctaggtgtcgttcttgggccaccgatctacgtgtggttggccaagagaagtttgtgaaggccggatcttgcctccgcaaggaaagagatacccttagtggaaggaggagtgcatttgtgcaacctcacgaggatagggttgaaaaagatccggctctttgcgagcccctcaacggagactagaatcccctcaaggatttgaactccgggaaatacatcggcggataaacctcggtgatatcctcactctctttaccttcttgttccattgctttgtgctatgctaatattgttgttggtcgagctctcctctttgcttgtggattgaatctagatctcttaggttgttctcttgtttgtattgttgttgtgcaggtcagatagtctgatctcagttcagactatctgatcacataggactatccgacctgatatcagacaatccgaccctattttgttttagcttccgcatttatttttaaaaccgactattcacccccccctctaggcgacatcaaggtcctttcaggcgtgcacgttgatccgtcagcttcgcctcgtcctttcctgtctgtcccgtcccatgcttttccgactcgatctcgtcgtctcctctttctcaattcgaactgatctctagcgtctcactgcctccacgtaacaacgcccaaatcagggttgtttcattaatcgcacggtctcttttcatgtttggccaaggaggacgaggccggggaactgttttaaacactcgggtggacgtccacccgagatattagaatctatcctcggatgaggccaggtagctgcaccggccttggtaggagtccatgacctccggtgagcatgctgctccatccttgtacgcaatggctgtgagcttgtttacttgaaggcaaggttgtcaggatcgggatactaggtagtatcgttttgctcaaagtaatatcgtatcgtaggatcgtatcgtagtatcgggatactatgagattttattttttttaagtttaattaatatttatattaattatatatagccattctatatagaaaaatatagtgatgatatatatcatgcaaatagagacatttatcaagagaaaccacgttggttttgatatatttaactgatttttatataaatttgagcatatttagttacattattttcaaaccatgttattttaaataatattttgtagtatcgtagggattgtagaatcgggataccacctaaaattttgttggatcgtgtagtaatgaatagtaggatcgagatactacgaaaatttggatactaggtgggatcggtatcgtttcggcttgataggatcgtagtatcgtaagatactaggatacgaatcgggacaaccttgcttgaaggaactgattgcgattttgttgtacggtgggttaattgttgagcaaattttagtcttttttggttgcaaaactgtttttatggtacagttcatgtgaaatatcaacttttcccctgaagttcattactggatgccatcttgtttcagaaaaaaaaaaatctttctctccgattttttgataaatcggatcggatcaatagcaaccttctgcaatggggaggtgactggctgttgctcatcccacggccacggagtcacgatgcagaggtccgattgtgctgcgaccttctgtgagccgttggattcactagcacgggataggtctcaatcagtgtcaggaagggctaccatcgctaagcaaaagtcactgatgtgagaagttatcttaatcgggtatttgaccgtcacgaatgataattatctcaatcggactaagcataaggcccatcatagataggtttggcccagcatatgagtcaaacgagattagttatggcacccgccacggatgacgggcattttacccgttgcaacgcacgggcatttttttagtccctataaaatttgggagtataaacttttaggtatacaaacttattagaaatagaaatcatgtggtgccaaatattaaaagcgtgtgtgttcgtgtggggcctagtcaagcaaatgtttgtgctatagcccttttgtgctatagcccttttcgcattgcggttacccttgcctctatactatagtttggcccattttaacgatcttacaattttgtttttccgattttcacataaatgatggcatgtttggttaatgggttcttcgaataaataaccacccactatagcaagttttaatatgaactatccatatttctcagctaatttcgtcctaacccttcattcatctctatttctcaatcccacccttcacaacccatcaaaacacccctaaattgttaaagccttgtttagcatatgtggggaactttctcatttcacgttgagttaaaatgttttcttgtgaaactcccattttccaaaacaatacttatattggaaccttcccgtaaagattttaaaattcacatgttaaaacttcaaaccgccgttgatgtagaaggagcaagtattaagatctcataagatacgcacatggagagcaataacatcattttaggtgaaggacggatgcaagtccttagtcgatatgagatcgcaatatccccaaagaccaccttcatttggagtttgtgtagaaggtgcctttgataaggagtggttcatcttcatctctccattctattctctactttatcatttaatcatgtgatgccttaggaccagtgcttaaaaccttattaaacttactttaacatacatttcgacttgtactcatatccatatcatatacaaatgttaatgaatatgttctgatttgtatttgatcccatatattatgactctcgactaggggtgaaaatggggcgggtatttcccgattgcccgcccgacccaaggctcgtaggagtaatatgggagaaaaaaatgggatacccgatactatccgagttcgaatccgaattcgttagaaatatgggttaggatacgggaagacatgtatccgcccgcatgtcccatattataaaatatgtatgaaaaatctattataaatccacctacaaacatgataaaagattggttaatcactattttacgagctcacatgtaatattgtataatttttttcttgatatatctcttttaatactttaattatcttattatatttaatatatatgaattagagatacaatatatatccatttccgaatctgattcgaatgaaataatatgggataggacacaggatgagcgatatcttattcggcactagccatacctgcctccgaatttaaagaaaaatataggttaggatataggaatgccaatccgaccgtatccgcccgttttcacccgactacctatcagtgactcgcacccgatcaaaaaaagcatatgaaataaaaaaaacaccagtaacaaaaagaaaaagtgttgacgacacgagacaacatgcgtataactgaagtagctaaaactatacaattcaactaggaattgaacacatgagacaatttataatttgacgaggctatgcaatataattttctcttgtgcaatttgcactgttaatcgcaccaatactttccaagcaaggaaaaaacaaagagaaaaggaaccaacaccaacttgaccactttgaaacgagactcgcatggccatgagcacagaagcatgttttcgtggcatgtcagatagctttgaagataaattgtatagatgtagtgacgtttatctaaagtatggaaccacataaccccatactcaaactggagggattaaaacagcgacatgtgtatgtaattgattatgataaatcagccaaaattttagcaaaaattagagaaacatgcgtttgccgggagtcgaacccgggtctattgcttggaaggcaattatcctaaccgttggactacaaacgcaattttgattatttatattctccaaaaatctaaagtttggaaacgtacaaaatgttgatatgaatatcatagatatactggtcaagaagttttccttttcacatgacatgtaatacaattgaaattttccagtgggacatgaatgtattttgtaggacttctgtgtgtttgtagatcttctagtgtcaaatatttgcattccgatggtgcccttaaagtttttcattctgccaagagtgtaaagtacatatagggtgtgtttggcaaatagaatataggagatgggattgggaaagggaaatggatgagtggctaggattaaatgatgtgtgaagaatgaatggctaggatgcaatattgccctttggagtgtgggtcccaatcccatttgctaaacaaaaccatataaatgtaacagcaaagaaagagaccaagccatcttgcgaaactcctaaattggtgcctttttccatcccatttcaccttcgaaaccatttaattttgcaattatattttcatgtatacattatagagaatgtgaagtaaaaaggaattgaagccttcagaggaatcaaaccgtggctatttagttaggagaactcttgtctcccttttttatttccctacatagagctgctgctgttgttgttatgagtaaaatctatcaccggtccctaaacttgtagcgttgggtcatcccggtccctaaactcgcaaatcgaccgttcaggtcctcaaacttgtttgactgtgtcatcccaatccctaaacttgcagatcactcgtttaggtcctccaacttgttcagttgtgtcaccccggtccctaaacaggatggtctaaaaactttatatcaaaaaataattcataacttttttatgtgaactctaatgaagacaaacttgatatcaaaattgtagccctcgatgcgacctacaactttgtagttgaaaagtttttgaattaaaactgtttagggtcccaaaatattgttgcatgtttatagattttgaaattttaattttaaaattacattttgggacaaaaaattacttaaaataaaaaaaaattcaacaacaaagttgtagatcgcgtcgagggctacaagtttgatataaagtttgtctttattagagttcacatgaaaaagttatgaattatttttaaatataaagtatttagatcgtcctatttgacccagatgatattcaaattcaagtttagggaccggggtgacacaactgaacaagttggaggacctaaacgagtaatctgcaagtttagggatcgagatgatacaatcgaacaagtttgagaatctaaacgatcgatttgcgagtttaggtaccgagatgacacagcagtataagtttagggacaggtgacggactttactctattattattattattattattattattattattattattattattatttcttacaagttacaatcgaaccgtaattgtaaagaaaaatatcattttaaaaatcttaaaaattcaatagaaaaaaataaataaaaaaacctagatatatattattgccttaatgtctatttagcaacagtttaactcttgattcttgttccttagagttagaattgaagatagagctaaactaaactttactatctttttcaatcttatatgagtgaaatagatggatttgctaaaaaaatattaaaaaatcgagctaactttttataagggcatccacattgttgctttttagccggtaataagcaatacatgctctcttcctacccggtaggaagcattgtgagagtggcaaagagttaaaacctggtcatacagctactaccgatgaacaagagataaacaatattatttgtacagtgtttctgacagaactcgtgggaaggagtcatgcagcagtcacgggaattttactatcggtgatttttttttagctgggcccatcttattcctctccaacgcgcataaacaatgtgaagggtgcgatggtttaataccgtctgacctcttagcccacagtattgccgaagtcggcagctaacattgtgcttgccttaaccccaactatatacgagtttataccggactccacgtaaagagccaggtagaaatgtagaatatgactacaacacgtatactgagtaaaaggaaatacgccttctgaaccggttaacggaaaagaagcccgttcgcggttcgccccttccaaaccgacttccaatcgcgcaattcccaaatataaatctggcgaccccaacagagccgagctagggtttcgcctcccccgccccgcctcctcctcctccgcaccgcgcgaaccgacccgacccccacttcgccgccgccgccgcagccgcagccgcgatggggacggagcggaagcgcaaggtgagcctcttcgacgtggtcgacgagacctccgtctccgccaagctcggccgcgccgccaccaccaacggctcggccgccgccgccgcggccaacccgtccatcaatcggtggacggggaggccctactcggcgaggtacctcgagatcctcgagaagcgccgcacgctacccgtgtggcagcagaaggacgatttcctcgccgtcctccgcgacaaccagaccctcatcctcgtcggagaaaccggaagcggcaagaccactcaggtattgaatctgtccctgtgcctgtacatctcaacattgaactgtaaaagtattttaggtttgtcgttattggttgtttattaggggatcgttattggttaggttttgtttgtgtattgagatgtgatgatattgtgttatatgattaggggatatttttcccctagatactagtggcatggagctatggtaaattggttagattttgtttatgtattgatgtgtgacgctgtgtcaaggtttttggttgctatatgggtgccttattgatgatttgttcttggggattaattcgttttctgttgatcagattccccaattcgtgctcgaggctgaaggcttgagcaaccgctcaatggttgcttgcacccagccgcggagggtggcagctatgtcagtttcccggcgtgttgcggaggagatggatgttactatcggggaggaagttggttacagcatccgttttgaggattgcagcagtcacaaaacagttctcaagtaagccttagtttgtttatgtttaatggaagaacatgattagttgcacatcctttggcagattgatatggtgcggatgtttctttcttttttaggtattctgatctaatcatgttgtgttgaacactattgcttcctatcagatatttgacagatggtatgcttctgagagaagctatggcagacccacttttagagaggtacaaggtgattgttcttgatgaggcccatgagcggacattagcaacagatgttctgtttgggcttctgaaggaggttctaaagaacagacctgatttgaagcttgttgttatgagtgctacccttgaggctgagaaatttcagacctatttcagtggtgcaccgttgatgaaggtgcctgggagacttcatccggttgagatcttctatacacaagaaccagaaagggactacctggaagctgctatcaggacagttgttcagatacatatgtgtgaacctgctggagatatccttgttttccttactggagaggaggagattgaggatgcctgtcggaagataaataaggaaattaataacatgggggatcaggttggcccagttaaagttgtgcctttgtattctacgctgcctccagcaatgcagcagaagatttttgaacctgctccagccccatcaagagagggaggcccagctggaaggaaaattgttgtgtccacaaatattgctgagacatccctaaccatagatggtatagtgtatgtgatagacccagggttttccaaacagaaggtttacaatccaaggataagggtggagtcccttctggtgtcgccaatttcaaaggcaagtgcacatcagagagctggtcgtgctggaagaacgcaacctgggaagtgtttcaggttatatacagagaagagttttaacgatgatttacagccacagacatacccagaaattcttaggtcaaatctggcgaatacggttcttaccttgaagaagcttggaattgatgatttagtgcattttgactttatggatcctcctgcaccagaaactttgatgagggccttggaagttttgaactacttaggggcacttgatgatgatggaaacctcacgcctttaggtgaaacaatgagtgaatttcctctagatccccagatgtcaaagatgcttgtcatcagtccaaaatacaactgttcaaatgagatcctttcaatatctgccatgctgtcaggtatgtcaaacaaaacttcatgtcgccatatggtttgtcagctaaattatatagtgcgtaataataacacccgcacaattttgcttgcatcaattgcacattgtagaaagcttacaagcttcttatcatgagagtttgcatccactttagtgcatttgctcttccaatatgctttattaattctttcagagctgtaatcagcaactgtcgtgcacctagcttcttgagctattgatcaaaatgatcatacagtttaggctgatgcagatagttgctgtttgttgagttattctgacaaagcaaatggtatcgtctcgcctctttgcatctgctgaccaccatggacttcgtctgttattgccgtattctttctctagtacccaattgctttctccggcctagggaggcacagaaggctgctgatgaagcgaaggctcgatttggccacattgacggggaccacctgacacttctgaatgtataccatgcatacaagcagaacagtaagttcatgaccattttcgttcaatctacactgatatccatttcattgcctaacagttgtcttttcgacaatgcagatgaagatccccagtggtgttatgagaacttcatcaatgccagagctctaaagtcagctgataatgtcagacaacagcttgttcgcatcatgaccagatttaacctcaagatgtgcagcacagacttcaatagtcgggagtactacgtcaatatcaggaaagccatgcttgcagggtacttcatgcaggttgctcacctggagcgaacaggacattacctgaccgtcaaagataaccaggttggtattaattttctgatgcccagtctctttgtgtacaggatgatgaaattgcagatttcttactctttgttgtgctcaggttgtccatcttcacccctcgaactgtctagaccataagccggagtgggtcatctacaatgagtatgttttgaccaccagaaatttcatccgcacggtcatggatatccgtggtgattggttagtcattatctggcagacagctagtccttttatgagtattgaagatttgaaagaatttctgacatgtttgtccttcatgtgcaggctgattgatgtggctccacactattatgatcttagtaatttcccctcgtgcgaggcaaagcgcgtccttgagaggctgtacaacaagcgggagagggaaagagctgctaataggaactgaagttgatggcgttttccccttgcgctagccttccactcgagaagattcgggtatatcagcttgtcgtgccggcgccaacaatggatgcttcctcatcctatcgtatgatttggcttgatggatgctcgtcactacgtatgacatgccaaatgctgctctctagccgtacaatctaccagcaatggcctaggatcatatttttgtttcttttagaagttgtagcctgtgacgcaggatattatgtaccggtctcccatattttgatggttctggcacccttttatttcggcatatttgtttcgtgtttggttagtcttaaaagtgaaatgtgcatcattgctaccttagcccgactttctttcgatagtgtcaaatcaaaggaaattttactttaggtcgcattttattaccgatgtttcattttgaatcacctttaaactaatatttttacttgattgggttttcactttggaccaggtaattttatctttgttacactttgcagccaactacaacccggaacacagatttcaaaacgctgagtgtatgatagatacatatttcaaaacgctgagtgtatgatagatgagatcatgtattaatgatgtaggagatatattagttatagatgatttggagttgatagttgactgtaccattcaatttgctctaaagagaatcaagatatgctgcttgttgctttattaccacattagagaagcggaacagcgcaagatgaaaatgtgttttcagaagtaaaatcatgttaataaaaaaacaaaaatgttaatagtagaaatcgtagaaataatagcttgtcagcatgcgaatattcatgagctttattaccacattagagaagcggaaccgcgcaagatgaaaatgttttttcagaagtaaaatcatgttaataaaaaaaatgttaatagtagaaatcgtagaaataatagcttgtcagcatgcgaatattcatgaggaaggaggaaggattgaatagttttcaggctcccctctgtcttaaatttcccaatagaagtatagtttggacgtttggtacgagacgaaatatttggttatcatgtgtacatgattcaatacaaaataacaactcaaaacgcaggcgaacaaaatatttacccagcttgcaccaagctaacaacgttatttcgagaagggtcaaaagaataatattcttacatgtttccactatcctatttcaaatctcaatctcaacgggccaagaggccaagagagagaagtttctatagccaacgagctcgcttacatatgcatttcaattttcaacggctatacaggcatatatctacttcattatattcccatttggggtttaatgctacatgttacactctccctgatcattttttgttctgcatcccgactccttttcaccatgtaacactcataaaaaacgaagctcagggtgaaacaatggaagtctccaagccgtgaaggtaatcaaatcagctttgcagatgccacataaggccaactataggacttgctagtatcctgcaacgccaactataagaaatgataaagaatatagcgccactgaaattgcaattcccgccacaaaattgtacgagaggcgcttgttgtcacgactaggcacaaatgcgatcttcaaggtgttagtcaactcaaatagcctatgggagacctgtaggaataagttataacataagcaggttgcctgtaaggtctaaactcttcaaagtcacagggaagatctacttactgcaacatatatagcagttgtgagcatgaaattcagcattgggtaatttgggattattgtcaatagccatttaggttgcccattgggcacttttgatctgcaggagtaaagacaattttcagtcattgacaagaacaagaggaacttctagtggcacgaaccacggaggtaatattgtagagacagcagctggttacctgagccaaatatggaactgtgatatgtacgtttctaaggtaatctttccgagccagctagcacagatgaagagtacattaattgcatattcacaatatcgcattacagtaagataaagtccaacataaaagtggaacatgcttcacaaacacaaaacttacgcaaatagtgtgagagagcagcaccggaattcttgagtgaagttgcgtaagcagatgtacacacttttgagtacaataagcattgagcaatcagttattgcagtacaccaaggatttttttttataaaaaaaatcgatatggaaaaaatacatacgttatggggatccaggatgtatagggatggtatttgttgtaggtaatcttgtctagcttataaatgtactcgtaccacaaacaaccagcctgtgatcacagtaaagcaaggtggtcttaccaaaagatggatatgcaacaataagtggcttattcagttatttgataattaccgttaaagcaattgaaactatcaaggccttaatatagagtttagttttcgtttcagcttcttcaagcttctccatccacttctcaacctgcaacacaaacaaatgatttattgatgtaaaatactattctctcgtatgcccacaattttacaaatgactcaacaccctcaaaactgaaagaaccagaaaatttatatcagcacatttctctcacacatgcatatgcgcaggcgcgcagagacatgcactcatacaaacaacttttatgcgatttatgaaatttgataaaactaaagaaatagaacatctataactgaacactatgtaaaagtatagcacagttggcaggaaacatacagttggatggtaataagcataaatcatccccacaatccatatgtagcgatccagtccagatcggaaatgccactcatgcaatcgagggagatcaggtttagatggatcagtatagcctgcacacaaggtaaattacattgatcatccttactaaaaatatatatataaactatcaaactcactaaaagtttacagagaaaacttaccgagaagaaacgtgaatgggctccagacaatctcgaagactcctgggatttcccatatcaggataaccaccaaaaagcaggcaacaaactttatagccatcactgatccaatctcgttatacttatttagtattccaagagcaccataaaccataagggtaaaaagtgtgtgcatagggcaaatataatagagggtgtagtcattatttagcacaatacaacagaatgccacgaaaaaattgaggcgccacatcatctgtcaaggtgaaaacatgtcaggaaggtcctacttatggaagaaagaatgaaggggaatgaagggtctaagaatgaacctgagcaaatcgtgcaaggctgaaatccttccgcacataataataggagaagttaccaaatccagtcatccagacatatgcagcaatgaacacacgaattgcattgtatatctctttagcattgaagtagtggtacatcaaaaacagcacctgaatgagggaaatcaatgctgaaaacaagtgatatgcatgcacttgaacatagatgaaaaacttactaaccacacatgtatgctattgaggcattgagcattgactaattaacttactaaaactaagagaggttcattaatgaagactaggtaagcatacatgtagaacaatatgacaaaagatgtttaataatgaacacatttatatcctctttgcatagttctgagttctgagttctgataaattagtattatgcacaaacggaaaccaacaatatgacaaaagatgtttaatactgaatgcatttataccctctttgcatagttctgacttatgataaattagtgttatgcacaaacagaagccaactagtataagataccccataaatatatgaaaaggaagacggagttttttttccccaaaaaagatacctgcatccaacccttccattcctcagtttggtgcctattcagatacagtatagatttccccgtgaatgacgacttgtcttggtggaccttgaaagaagtcatagctgctacgataataagaagaaagtaaaggaaaaggaacatatctcggctgtaattctgcagatacaggataacagaaaaggtcagaacaaaaaatgtcccattgaaagaacagcacattatataggcactttccatgaaatattagtaaggcttagaatgtattcgtaaaagatatctcaactagatacaatatttttgcaactacttttcaaacgtgaaatcaggcttgtaataaacatcaatgtaatagcaccttcgcagactctcccagtagatttgtgcgatcacatatgtaaaagtaaagcagatgacctccaaactcagatctgaaaaaataataactgctcagccaaataatgcaacatagaagaacacgtgaatgcaagatgcagctgtagcttacattgctctcaacgtcaatcgattctctagaataagtgcctggtccaacaagaaaagtctgtgcaacagattatctttgtcagtgccttagtaatgttgatatctcaacgtttatatacaacatgaaggagaaatcatacatcacaaacaacctgaacatttgtgatgtgagagaagcataaactggcttttgcactggtgcttggacaccctcctccaataacatcacttgatcctctcctttgtttgagctagaatccattactgctaaatttacatccgagtgtctactaacaaagataaagaaacagaaattccaataagtggtacatttcaagcaaaataatggtgcagcacacattcagtccagacgaagtacgactcttgagttatgcttcttgtaacataagtagatatttcaatctcagtggcaacatgagagtatatcacttagcatatacgaaaattaaaatgcatggataccagaactgtaaatatagctgtcacaattacttacgctttaatagaagcagcattcttcctataatagagaacctccgcatatgcccaggcggtgaaaacccaaagaaatcccagaagagcagagacctgtcagaaagttgccagctatctcagatccagtgattgaggacccccaaaacaaaatcctactattagaagaatatcactcagtcatctgtatagtagacaatagttctacggctttcaagttgcaatcaaacactgtaattgtgttatttgaacttgtggggtaaaagtagctcatcatagtccggattcttgcaatccacaccaatatgtatttctgcaactaaattactatctagttttagtatttttaccaacctgaacttcctaacaactaccaaagtaaggaacaaccgtgcgctagaaaatcaagcagattgacaccaattctaacaggttggtcagcacatcgatactgctaccatctcttagaaaatataacagaatagcccatgctgccagatcttaatgacggtcttactctaacatccaatacctccagatctgaaaccgcagccacttacgaatttccaaccttaaaccctacatataagctattatatcgccaattttccaacagctcggatgaatgaaacctccaccatatatttggtgctactagcctaccatacaaaagcacagctatgacctgatgatttacaccctttgatccacatccctgaaaccagccacaaattcaaatcccgcatcagccaaaatagttagcctcctatccgaataccaccgaatcctaaaacctagcactaatacttgtcgtatcaacaaaaaagcaaaccagacaaccaaccgatatccacaaccatctcaccgatcatcacccaatcccgccaatttagccaacagcagcgttaaagcaacacaagctcccgccagagattccacgcgcatgccatcatctccagcgcgcttcctcccagtcccagccacctaaacccaaaacccaagccgcacttccgcggccgcggccgcgcccggcgcccggcacacgggcgatgccttcccattccccccgacgaaatccttgagccacctcgccaaccgcggattcccccgacgaaatcgcctagggggcagcaaatgccgcgcggtccccgcacccgcaccaacaacagagcagcagcccccccctccccggatcgacggtgcgatttagggctcacctggcccggcgtgagggaggtcgaggcggccatggcgatcccacccgcggacgcgatcgcctccgccattctctctacagcatccgccccgcctccttcctgcgccgctcggatccagccgcgtacaggagccgagcagagaagagaagagaagaagagagggagaggacgaagaaaattaggtgcgaagaaaaaaaaaaagagaagcgcggtttaaagcggcgggtggatgtgcgcgtcgtacgagggagcgcgagcttgccgacgctgccatgtgggaccgagcaagagattccacggtcactgacagtgggggcagtgaggcatttcagagcttgtgggccccacacgccatcggatttgcgagtgacggtgtaactaaacggatgcttagtttggtcgatttaggtgagaagaagaagaaagaaatatttccgtttttattatttctctctttacacgaaaattgcagctttgtagattacaggattgcccctgtcggtcggcgagatcttgttgcacttgcacccctcactcactctgctagtcttcttaattccttcgcgtttagtacttgtgtttgcgtttttcgatgattatcactaacttaatctccccgcaaagaaaggcactaactttaatcggtagtactgctccgtttcttggatttcgatgcacatcaattcgtcagagcatcctgtctgtagtgaatagctcgccttaattaagaatcaaattcggaatttgagatggttagcagcgcagatgcccaactggaagtcaactacggcaacagatggtgattttctcgatcaaaagcccatagttgtaattgacgtgtgttgagcggtttatgcgatctgaatcaaagcgataagctgataacaatggcctctttttttctcatagttggcttgtaatatgcgtctacgtggagtatacaaaacgccattaatcggctttttttcacctgggaagtgggaacatgtttgcccaggggaacaggaaataggatttttatgttcagtgcgagagtcactagtctcgtcggtagttggtatgcgccctaacccaccaactaggatgcatgtcatacagatgcaatggagctagcttagtacaggacttcggctgcgttcgatcgtcgcttttagatgttagttttgctgtcacgtgaaattagatgtgtgattagcatataattaatcgagtattaattgttactccctccgtcccataatataagggaatttgagtttttacttgcaacgtttgaccactcgtcttatttaattttttttaaaattattatttattttatttgtgacttactttattatgcataactttttgttttttatatttgcaaaaaaaagtttgaataagacgaatggtcaaacgttacaagtaaaaactcaaaatcccttatattgtgggacggagggagtcaaacttagaagtatttttttaaaaataacttctatataaaaaaactttcacaaaaatacgcaatttgataaacatgctaacagaaaaaacgagtaagttgtagtttagatttggagctttagaacgggaccttcgtctatttgtggtgatgcagtgccaaacaagtattttccctccatgtcaaaataagtagctgtataattcaaatttaaactacacaactagatttatttttggatagaggtagcatgatggtaacctgatggtgatagtaaaaaagagagaaaatgacttgtgtgaatattcctttgaacttgtattcgtggatacaatttatataattgatcaattgttgataatgaaacttaattagtgcttcttagcaataatatacttggcatgagcatgtgtatgccactcttctccaaaagaaaaaaaaaagaaaaacctcaaaagtcatacccacacaaaacaaaccttttaaagtacagaaatttaaaatgattttcatgaaaattagttagaaaagtgtgaatccacgtaaaagagaataaagggcctatagccaagtggttaaaagagtctcagtagtaccttaggtcctgggttcgactctccatgagagtgattttttcaggatttaacggcttttgtgctttcagtggtaggcgacgcccagtcttcgaagatgctcataggggtagggatcaccagtgacaagttcttcctatgagacggaggtgattagggagttgatgtgcggtaggcgcaacatgccgccaataaccaacccaaagctacctcgccacgagctcgtccccaaccatcccctccgcaatgccatccacaagttacatctccgtcacgccatgcgaaacaagtagcccgttggcggccacccttttccccacctctcattaccctctcgttattgctcggaggcttagtgacagataggaaagataggaagatgaggaataataccacttacgaccctttcagtttgcaatggtcgttgccctttctaatctaccgtggcctcatcccatcgatcgccacccctctccaagtcggtgactggtcttcttcccaccacttgtcgcctcctcacagggccagctctaggtctagacaagttgtgcaaccgactaggacccagagtgaatggggcctatcctaatgtaatgtaggtcaagagtaaatagctgagcagtgtgccttcaatcaactgatgtatggacttcttgatgacctatcccattccagtcgtctcatcccgaggccaaaggcgtcgagcgggagcaactcgccgtcatcgccgacgactccttttcgacagacaacagtaaatgtgtctcttcctttgatcaacaattcatctcagttctctcttctactcttgcctggaccgtacgctcgtagcaggcagcagtgtggcacccagccggccaggccaaagagcgcaggaagcaaagtagcggcagccttgattgaagactatgtgcataggtacatttacatactagcagtagattttatttctcaatttataaataatcatagaagatgatatatcctactccctctggtttcattttaattgacgttttggagaatgacacagtctatagtttatatgtttgaccttatttttctattataatatatatataataaataaatatatgcttacttttattatagtcctttgaaagagaaatctatatacgttattctagtttctttaaactaaatatttttaaacttatttatggttaaagttataaaagtttgacctcaatcttgtccaaaacgtcaattattatagaaccagagggagtatctggttaagatgatacatcctatcgggcttttaggtcaagatttttagtgttcttgccttctattttcctttctaattgcagttgtaagattttaatccgttagatgatgatgataattgtgatgtgttgtagtgaaaagaatattttggacaatattgagcacaatattgttcttaatgattttgaataaagaaatgagtaaatttcacaatggtctgccttttcttaccaatgttttacattgggctagggttaggtcaaaattttcactaacaccatatatatttgccaagagttgcactttgggctaggctccaggatttgagcccatctggatgagcagacatcttctccctcccacaagggcatgcgcaacctcgccgccgccacttctgtcgctggtcgggagttgagtgcaaggggacacgatgggggttagccaaggagaagggcgatgcagcaggcactgctctgttgttgttttcccttgctgtccagtagttcaaggggctgacgagattggctagaggatagagattaagcgcgccggcgaagtgagtggcggagtggttattggaaggaaaagcgttagagttggggacaacggccatggccatgaagctgacagtggcagaatcaaggtcaatgaaacaacattaggggacaagtgcttgttcttcttctccagctctagcatgggattgacatgaagctcgtttcgcgtgtgattgacatatccagttgaattaggggcagggcatagcaaacggtggagaagctgtgctccagagttggaaggagagaggaggctcccagcttgcccatttatctcctaatctcgctgacaagtgagccaccggtccaaactgaaattttttgctgtaagacctagcctaaagtgaaaacattgtctataggatggtccaaactagaactttggtaaatataactagaccaatgtgcaatttactctaaagaaattccagaagttcttttttaatcacatattggatatttgccgttttctctttttgaagcatcgtcaataaagttgttggagtttagtggttatttgccgttttctctttttttcaatttttttcaatgaagcatcaacgctatttatcgatattaagaccatattgcaatgtcacgttaggggattaatggattataatgtgtcttataactaaaaggaaatatctagtctaagggactattgtttcgagtttgcatagggtcctagaaaacgtagtagctttgccccctagtttgctacatctctatctatcagacggcttggtgttttccgtcggctgccggtcgaaggcttggtgagaatgtgagagatgggaagagagggaagagggaggatagaggaggaagaagaggtggttgttgacatgtggggcctattggacacgtcagtcaaaatcgggtattataaacctcggatacactgttttgcaagttaagagacgtgctacaattggtatcgcggtacaagaatgtaacttgaactcggcgtcaagataagggacctaatatgaacttattccaccataaaaaaaagaacttattccacgatggaaagctcttcttgcgttcagcagccagtagcccaacaaggcccattgttcgggttaaacgaacccaaaaccgtacgaaagcccgagaaaattgccttcgtctgcgccccgcgggctctcgtcccaaccgctcaccggcttcccgcggcggcggcggcggggctccatgctcacggtgaccctcctggacgcgcacctcgcgcggtgcagctcggcgcgccacctcctccagatccacgcccagttcgtcgcgtccggtctcctcgccgacgccttcgccgccagccgcctcatcctcttcaccacctccacccgcctcctcccgctcccgttccaccactcgctccgcctcctccacgtcgtccaccgccccaacgccttctcctgcaacatggtcctcaaggcggcccgcgagcatgggctgccgcacctgtgcctcccgctctacgcgtccatgtccgcggcccccgactgctacacccataccatcctcgccgccgcctgcgccaccaggagggccatcgaagaaggccgccaggtgcactgccacgccgtcaggcacgggttcgggcgcaacctgtacctcgcgaacgcgctgatgagtatgtactccgcgtgtgggtgcctcggcgacgcgcgcaaggtgttcgacgcgggtcctgtttgggacgccgtttcttggaacacgatcctggccgcgtacgtgcaggctgaggatgtggaccaggcggttggggtgtttgcacggatgcctgaacggggtgctgcggcggtgagttcgatggtgtcgctgtttgggaggagaggaatggtggacgaggcgaggaaggtgtttgatgtggtggagcgcaaggatgttttcacgtggactgcgatgatttcttgctttcagcggaatggcaagtttgcagaggcgttggctttgttctcagatatgcgtggggaggggtggcctgtggatgaggcagtcatggtctgtgttgtcgctgcctgtgcacggttggaggtaactcggaatggggagatgtgtcatgggctggctttcagagctggccttggctcgaggttgaacgtccagaacgcattgatccacatgtactcaagttttctgaatgttgttgcggcacgaagattgtttgacagtggccagtgtttggaccagttctcttggaactcgatgatagctggctatcttaagaatggctctgtcaaggatgcaaaggaattgttcactgtaatgcctgacaaagataatgtttcttggactacaatgatatctggttgtgtgcaaaatgaccagtcctcagaggcactcactattttcaacaacatgcaagcccaaggaatcaagccagatgaggttacgcttgtaagcgtcatctctgcatgtactaatatgtcttctctcgagcaaggcaagtcaatgcatgagtacataagggaacaccaatataccatcacagtcatacttgggactagcctcattgacatgtacatgaagtgtgggtgcttagaatctgcattagaagtcttcgatacaatggaagaaagaggaacaccttgctggaatgctgtcattgtggggctggccatgaatggtctggtgatgaagtcccttgacatgttttcggagatggaatcatctagcactgccactccaaatgagataactttcactggagttttgagtgcttgcagacatgctggcctagttgaggagggccaacatttcttcaagttgatgcagcacaagtatcacattatcccaaacatcagacattatggatgcatggtggatcttcttggacgtgctggatatgtcaaagaggcagagaatctgattgagagcatgcccatgtcaccagatgttccagcatggggtgctttgcttggttcctgctggaaacatggtgataatgaggttggagaaagggtggggaggaagcttgtcaatctagatcctcaccatgacgggttccacactatgctatctaacatatatgcttcagaaggaatgtggcaacatgtaaaggacctaaggggctccatgaaacaatggcatgtcccaaaaattcctggttctagtgtggttgaatcatcactacctttgtgagaatatatcatatgatggtacttgaaatcagaatacagtgcttagagtggtttgactcaagtttcataaggtactgagccgatccttaattccttatcagcagaactagtgttctagctatcttatgagttgctttggtagcttgtcattcaaataatctttcttctgtctattttttcacatgtttttagataatgtatatttttcacataagctaaaagtttttgtctgccattaattttcacaacattcatcttttgatcattcacctgaagtcagatataacctcagtcgctccctcctcatttctgcaaaggtaacatccatccatctggcaccatgaataagtagccacccactacatggtcatgactccttttttgcatttagccatgcataatggtgcttatgtattatttatttattaatttgtaatctatggtgaattcaatctatgatggggactaatacttctgcattattgaaggcatggagcacatgagagtgagggtggtctacttcaccaaattaaggagagtaactgtctgtttatatgaatatatcagggagcttggtgaagggaggagggaagaataaggaagcaaggatggcctgttatttatagttagcagatgacagattaacgcaggcagactacccaagctcctaaatggtacgatttttgcaaaaaactttcttcatcaacatttcttagataacttgtttaaatcaacttccaatatttaattatgccctcgaataattgtcatgaactctgtgtcatccatcacccatcatctatttagggtgggatcttaaggggtgcaataagcttgcaacctttattggtatgtttagctttgtcgttggaagttttgaagttgggacaacatgttatcacacttattgcactggaaaacaataaagagaagatctgtagatgtttttttttccatagagaaaagaggaatgtaggtcaattccgttgttttgtttctaaggcatttgtttgttacaaaatatgtccatgttaattattatgaatttatgatgtacaagttgcagccgtacaggcagctagctnnnnnnnnnnnnnnnnnnnnnacatttctggttcagcgatcttattcagtattaaattcaagtctaaagaggcttatatttaaggtgaacaacactcaaaatttactgttgtgcatattgacgaaactaagtaattccaaacaaattttgcaagaagataatcattttgtattgactttctaacaaagaagaatttacggtgtgaaatgtgagatgagatccaccttgacaaagtgatagatgacctgctaaattaattattggactgaggggatttcattatatgacaaagtgaaagtgactggcctatcttaaaactgcacgggcaaatactactggaagagtttttctgtcagttccttgcatatgactagaaaaatatggaacactcctccctattttatattttaaaatgaagtagagatcaaatgcagaacaactttggcaccaccataccattatctcccttgaggggaaaaaagaattcaaagtcttattgacttttgactaacataacaaatgcatggagaaataatacaggtttaattgacagaacgataatcatagctaaagggaaaaaaagaatacaagtctaattgactaacatagctgacggagcgtggggctcctcaccgggagaccgcgcaggcccccctttgccggttcggccgggggccctgggtgagattctaagctcctggtctgagtgtggaaggttcgcgagagtggaaacacacaagacacgggcgatgtatacaggttcgggccgctgagaagcgtaataccctactcctgtgtttttgtggatctatgtatgaagaagctacaaaagagctggagaaccagagagctcttactctctccctctctagtccttctggatccgaaaaaatcccctttctaagtgggcaaggtcctccttttatacctcaaggggataccacatgcaccatctctctctttttgtggggacttatcctatcttttcataaacagacggagacttgtatggttgccgtccgaatgaccttctgatgggacggcccatacctacctccacttccgccggaagcaggcgcgacgtgggaacatggctgtctgctgacgacgtgaccagtgtcagaccggtcacaaatcggtcattcttgtccaccacgcgtcagtttatcaatctgcatgttcgcccctcttcatacaatgtcttgcttgtaatggttaggatgaagcctggtatatatctgaccgggaccaacgtgccatctccaggagctaacacgccggctccggctagggacgagtgcttggaggctctcatcctgacgggatggggcgaggcgtgcgtcagaccgcctgtcgccacctaacccacgatctgaccggtctgtgactggtcacagaccggataaacgagcgcgctgcactgcgttacatgcggcgtgacgcgctcgtccaaaccgcaataaatgtggttaggtgagccccgctatgctcacctaccccatatacgtggcgcaaaacccacaaggggtcggggcgcctcggccctcggggccgagacgggagcggtccgacccctcggggagacaaagagaagggcggccgtatcaccctcgggcccgaccccccccccccccccccgagggggttaggccacgtgggtgatcgtgtctgcctcaagtctctaagtcatgatacttccggtcccatgtcaccgacaatagcaaatgcatggaaatgataatcatttgtgcaagagaaacaacatttcaaagatgaatccatcccccaaaagactaataatggttttgttgctgttgtgaatttgtgataatgcaatgaaagctcgattgcatcaaaatgttgcatgatcaaccggatcatctttgctgatccacaagttgtctgcaactcattgcacatcaaaataaatgaaaggtgaaactcttcatgcaaaactacaaagccatgtcatcaagcgaatatggagcagatgatttttgcttcgggtgttatacgctgtcggattctctgattggcaaaatatcttctcaatcctccaggatacttcttttgaatgtacgtcacatctatacacagttcgagtttgtttattttgtaaagagtaaatttcacaaaactacagatattatgaccaaattatcacaaaactacagatataactcggtgtatcacaaaactacacatttaacaccaaatttatcacaaaactaaacatttaagatgaagtgtcacgaaactacgtgtttagtaactaaattatcacaaaactacaggtttagaaacaatttagtcacaaagcaataatgtttatagcttcaccataacaatgttgctagggatttaaactccaaaagttgtagttttgtgataacttcaatattaaatacacatttttgtgatatttaaccttaaatctgcagttttatgataaatttggtgttaaatctgtggttttgtgatgcaacaccttaaatctgtagttttgtgataatttggtcaaaatacatgtagttttgtgaaatttactcttctgaaaacctcattgcatattagtctatttccgttggagcagttggggatttatcaactcaaatgccaaaataatttcaaaaaggaaaaaaaatcattgttgagaaggctttgatgaaagctgaaaggttagcctgccaaattatacagttctggaaatgggacaattaaattgaccaatctgttattgcttcctagaatgggttgccaattttctatagttccaactttctcaaatgagaaagtctagtgggtttaggtcagtaaatgactcatacccagaaacaaaaatgagcagacatcccctatgtaacgcattgtcctgcaaaaactgcagcatgtttacagatattctaagagcaatgctacgctgtatggagcattttcactatgtcaaatgcgggtaaatatgcgggtgcaaacccaatttaggtgaaaactagtgtaaaccctgagtttggaaaagatcttttacatggttgtgtaaaataatctcatctacatgtatgatttttttggggtgaatttagacaactgtttggtcagggttcacatgagttttcacctaagttgcggtttccaccatatatttacctgtcaaatgcagctcaagtatttcaactattctattatagataaaagctaccttttggtccctcttttggtcttatcttttccatctgttatcttaagaaggatagtgaaatctgcagattattaaaattaaattatttagaaatccatatcctattgaatgtgaaactataatcattttatctttgcaactgtgggttcgtgggccttatagaccttgaggtttatgatagtcttatagtcccccctcactgtcctttcaccaatcagctttctttcaccttttgatatgcagcccatatttgcagggattgttccccatatcaagcgcaagcttatatgcatatgttttcatttccattattccattgttttcttttactcctgaatacatgacaacttggccccttttttaatcatatattagatagctaagtccttacacctacccaaaaaaaaaacatttcttgtgcgtgatatctgaacccaaaattgtatgcgcctgccacgtgcttggttttcatagatgtagttatggacctctgtattgaatattttcattcatctgtaaggacattgtagtttccatcattttgcaaatcaaaatggataaacatgtcgcatgatgcatttcgcttatttcctattggcagaaatcctcagaagtaatctactggcagagtgtagagctaagggcatgcaagtgcattagtgaaatccaagcatcgttcacatggtcaatcctgccctagaatggtccaatccaagaaatccattaaaaccagtaaaagtgatgtcaatagatgggctaaaaagagctttgaggtatgaagtactatcccagctgccagctttgcaactttgcataatgttctgtttgttcacatttttcctgttctttcctgacaatagttaacttcagcggtgaatgaaacgatgttgaaaaatggaaatgattgtattacgattctcctcctaaataaagtacgcatacttcatttgtagctagctaaaacttttgaaggtcatgtgtggcatgaaatggaatataaatagaactgttctaggaaataattcttgtcttgaactatgatatctagaagaatccccaaattaatggtttagaatgatggtagattatcagctacagttacacactaaatagtttatttattaattctagttttattttgcagcaatgtagataaagtagactaccgatcttatcgttgcctgattaatggtattaaactaagattaaatatcaagtacaagtaaggaataactaaaatttggattaaaaacaaaaataagactagaatttggtttccatgcaaattctaaaaaatatattggttaaccatatttaaaataattttaaaaatgagcgaaaatgcaccccaaagacaatgactaaatttagaataaaaaagataaattctatttgtatatgaattccaaagttatccattttcttaaatgtacatgattttagaaggcgagccttcagatctcggaattataactaaccaatatgcgtggataatattaaatattacattagtatttttgtcattaaaaaatacttttgttttgttaaaacaaggatctgaaatcatgtcaatctgctaatgacctaaattagaaattcctaaatagctttttagaataaaaatagacttaaaatatcaattaacttcatataatatacaaataaaacagagctacccattttgtatattcccaaactaaatacataactaactacaacataaaccaataactaaaggaagcacgctaacacaagcaaagtatgaaggcctccgtgccatcccccaaaaaaaaataaaaagataatttgcctgaactcgaggaagatgagctacacatacattggaacattagaggaagcacaataaaagatgataagggggctgaaaaaattgccgttttagatcacggagtttgtaagcaccacttgcaaatactcctaattcatgatgtactaccaaccaatagatagtcctcgtggagagtcaaataccctacttagagcaagttttatagtagaggtgattgccatggttacggataaggcatatctccaatcctatgacttacggaatatacgaatacggtataccttcatgtatacaatgtgtttccgtatacgataaggaaatctacaagatactatggaaaacgtcctcacgataggcggatgtcaaagtcctatttggagaggattgggcttttactatatcatgcggggtccgtagtcttcgagttctacttggagactaaggagattcacggtataaaaggcgtacccctgaggggtttagatcatcgaatcttactaccaacacacccaccatagtctacaagctggaggacgcgaagcctactcaccgagagatctcgtcgaatcatctcgacaaggatctcaccgataacgccggattcatctattctcattgtactatgtggttttccatatcaatatcatataaattggattagggctatcacatgatatctttgccttcttgttcgccgatgtcgtatcgtgtagatcctcgtaccaacgtaccccaataccttattcatccggtctgcgggtatcacccatcgatatggtcctttaattttattcatattatctactcgttgattagagcaagtataataatgagctataagttagctataaacatatgtggatgagagataagaggagagagaataaaagtgggctacaaatttatagccaattacggtacatgctctaagagattgtgtgtatattagagatgggccagatattaatgttgttctatatgtttatatgaaactattgtatgagtaggctattagatttgttacacatgatgtgttaatttttagatctagcagttggctatactattgggacaatacaacacatcgccaatgcacttatcccaatacaccactttatttattttcacttaatccattagcttatttctctcatctaggagtttgtgtagatattggctcctcctctctttcatctcattatatgatcttagagcaagtttaatagtatagcccactactagctccaattcacttatagccaaactaatagccaattcataaaatagttgcttactatactattaatatatggtcccacatgtcatacacacattgcgtcttggagtccgcgctgcagctggctacagatctgtagcccgctgctattctctctcatcttttatctcattaaaatatgtttatagccggctaatagtctgctattgtacctgctcttatgtactctctccgtcctattttaagtgtagttgtgggtttctgtatctaaagtttgattgtccgcttatttgaaaatttcataaaaagattaaaaaaataagtcatgtacaaagtaccatttatgttttatcatctaataacaataaaaatactaatcataagatatttgaagacagactcacagatagtcaaacacgttggacacagaaaccataactactcttaaaataagatagaggaaatagcatcttccaataagatcttagagcaagtttaatagtacagccaactaccggctctaaattatctatagtcaattttatagctaattcatataatagttacctataaacatatactacacaattaatatatgatcacacctatcatacatgcatgtatattggtgtccgtgctgtagctggctataaatatgtagcccgctactcttctatcttttttttatctcctcgaaatatgtttatagttgtcttatagcctgctattgtatctgctcttaaggtttgtactcgctctttgtacatgacagagtcgtgagaactcaagcgcacccaccaatggatgacgtacccatggatgacgtaacaatgaatgacatatgtcaatggaagattctttgtccaacggccttgatctttcatatacgaaccaggattaatcgtccgtactcgtaagagcaggtacaataataggctataagccagctacaaacacattacaaacacattttaagaagagacatgactacacagctagtggtagctggtctgtctccactccatatatgatagacactatccaactatacttcaaatacaattttctctaaaactgctcatccgatatacgatccgattacaccgttgtgttcgtaacaattaaatctttataacaagatatcacatgattatattttgatgaaaaaatataaattacttttataatatatctaaattacttttagatttcactaagttacttcttagacatataaaagtaattcaacaaagcctaaaagtaatttacatatactatagaattaacttataaaaaaagaaagttacttctataatatatgttaattactttaaaactttattgaatttacttttatatatttaagaagtaacttagtgaaatctaaaagtaatttagatatattataaaagtaatttgtgattttttttatcaaaatataattatatgagatcttgttgtaaagatttaattgttatgaacacaacggtgtaatcggatcgtagatcggatgagtagcttaagagaaaattgtatttgaagcatagatggtaggaatattttttctacttgcttgatcaagtactatagtaaagtaagattcttcaagacacatatctggacaatggttgatcgtatctggacaatggctagcgtcgctcgttatgactaaatcgagagcgctctcgatttagattttgcgtttaagaagataaataaggagaaagaagaacagcgggctaaagatttatagccagctgtagcacagactcctagacgcaatgtgtgtatgattggtggggccagatattaataatgtagtatgtaactattgtataaatgagctattagattagttatagatgaattggagatagtagttggctatactattaaacttgctctaagcagattaattctcatactgcgttcgacatgtgcaatcaagatctcccgtcctctgagttcgacatgtgcaatcaaggattaccttccgtcttctgaaaatttattcttgtacagcgttcgacaattagggtgagtttgaggagaaagggattgagaatattgggaagatatgtaaaacgaggtgagctattagcgtatgattaattacgtattaactatttaaaattttaaaaatggattaatataattttttaaagcaactttcctatagaaatttttaacaaaaaaacacaccgtttagtagtttgggaagcgtgcgtgcggaatacgatgtcctttctcaccctataccaccagaacgaacactccatctcctcctttgcatgtagccatacatgatggtccttatggaatttctttttctttcttttaatctatggtgatgaattcaatctatgatggggactaatacttctgcattattgggggcatggagcacatgagagtgagggtgatctgcttcaccgaattaaggagagtacctgaatatatcaaggagcataggtaaggagggaagagtaaggagccaagaatggcatgttctttgtagctaatggatgacggattagcgcgtgcccactttctaagcttctaaacaatactgtgatttttgctaatactttcttcatcattatttcttggaaaacacaagttgcacaagttgattaaccctgtccctgcctgtgttaattatgatgcacaaatctcaccgtacaagtagctggctagccggttaatgattgacacatttctggtttagtgatctgattcagtaccaaattcagtctgaagaggcttatatttaaggtgaaaaacgttccaaatttactgtacgtgttgcacattggtgaaactaagtaatggcagcagtaattttctagagcaatttactctgcatgattccaaataaattttgcatgaagataatccacttgtattgactttgtaacaatctcacatgcttgctgcaagtgctaatattaaaccgtgtgaaatgtgagatgagatccaccttgacaaagtgatagagggcctgctaaattaattattggacttaggggatttcattatatgaccaagttatgcagatactgccggaagagtttttctgtcagttccttgcatattagtactaaaaaaaatggaaaaatcattttccttttttttatatttttaaatgaagcaaagagcaaatgcagaacaactttggcactaccgtaccattatctcccttgagggaaaaaataatacaagtctaactgactaacataacaaatgcaaggagaaaacaatacaagtctaattgacagaacaacaatcattgctaaagggaaaaagagaatacaagtgtagttgagtaacatcaacaaatgcatggaaatgacaaatcatttatgcaagagaaacagcatttcgaagataagatccaaccccaaaaaactaacaatgattttgccgccatgaatttgtgataatgcaatgaaagcccaattgcatcagactgttgcgtggtcaacccaaccatcattgccgatccacaagttgtgggcaactcactccatatattttgttaaagaattatccacgtgcaaggtctagctggacaaccatctctgcaactgcaactggctaactggtcagtggtcacttgctccaccctaaaatacgtactccctccgtccaaaaaaagacaaaccctggtttccgtgtctaatgtttaatcgtccgtcttatttgaaaaaattatgaaaaaaaattaaaaagataagtcacgcataaagcataaagtattaatcatgttttatcatctaacaacaatgaaaatactaattataaaaaaatttcatataaaacggacagtcaaacattgacacggaaactcagggtttacctttttttggaacggagggagtagaatagtgctccctccgtcctataaaaatgaatctaggatcggatgtgacatgtgctagtacaatgaatctggacatatgtatgtctagattcatagtactaggatatgtcacatctgatactaggttgggtttttataggacggagtgcgtatatatcaatctatatcggattagacacattcactccaatcaaaatcgatttgaatcacttttttttttcattacactatttcgattagacatatttagcactataagaccctgtttggatccactgacaaatttttacaccatgtcacatcaaatgtttggacacatgtatagagtattaaatatagatgaaaaaataactaattacacatattgcgtataaatcgcgagacgaatcttttaatcctaattgcgccatgatttgacaatgtggtgctacattaaatatttgctaatgatagattaattaggcttaataaatttgtctagcggtttatagcagtttataggcagattccgtaatttgttttgttattagattacgtttaatacttcaaatgtgtgtccgtatatccgatgtgacacgctaaaactttacacccttagatctaaacacagcgtaaatcccggtcaaattcatagctttagaatgtatataatctgaaagcatattattatattttgggacgaaaaaagtattagacaagagtgatgctctggtactctttactggttactaccagtatcgtcagaggtaaattagtaatttacaattataatgattagaatttattttatcatttatatttttttggctaaatcaatatatgatcatccattgtgttggcgttgctcatgcttcatcgaaaaagccaaaaaatgagaaaaaaagtagtcattgctaaatgatgattataccctcgatcaccacctacttttttttgatagtaatgtcccttcacgtttctactaccgctaaccgtggtggttgtataaatagatttgaacccttcgattaataaaaataacggttcaggttgatttctactaccagtagagagcaccgtagtgaggctcatttagacaatatgcacagctccatcccaaaatataagtatttttagctatgaatctggataactgtgtgttcaaatttataaccaaaagttattacattttgggacggaggtagtaatttatagtcacatacagtatccactgccttgccctgaaccctataaaacaccctgctgttctgccattccaaagcgccatttcctctcgcttgcaatctcaccattaacaggctgtaccaggaagcatccatttcgatcgcaagaagaataatgggtgagagcagaggcagcattgccttcttcgcgagctacaggccaccggtggctctggacatattctgctgcccagctccaccgtctagcccgaaggacgagctgcacctgacggacggcgactcctacaactacaactgccagcccatcccaccggcggcgctcaagacggtcgtggagcgcctcggcgtgtcccgcggcgacgccgtcgagggcgacatcgattccggccgcatcaccggcctcgtcttcgtctccgagagggagcacaacctcgagacgctccacatcgccctgcgcttcaacgacgacggcgaggtccaggtcttctccctggccgacgcctatggcggcgacggcctgttcagcggcgcccgcatggaggacagcggctgcattgccggcggctacgaggtggatggccgcacggttgaccattacctcgtgtatgtgtccaccaaggagccagtgcgagaacgtcgcagcccgtggaacgtcgcttacaagaccaatcttagaaccggcgagactgaacgcctcacaccaccaggttataatttgatcagttactgaattatatcttgccaaagcttagccttttgccacttgatagccaacagatattactcgcgcttggaaattcttgattttagtgagattaggatgtaccgctggtttcgatatcttaaaatatactttctctattgatatattatagtatttatagtagtaaaatatgtaaacatccggaactaggttgatttttttataagacggatgaagtatgttaggagggcacattcgtaggatatgaatgtagtattgcgtatgtagttgtatgtgtgcgtgtgcgtgtgcatatgtagtgtaatcactgaataaagaaaatttttgatttggtccgtgcaattgaatttggacaggaacatttgatataagcccatctgtgtcaccatccgggaagaaagtagcggtggcttcgtaccaagggaagaaatgggacggtgagatcaagaacctcaacaccaacatctacgtgatgagcttggagaacccgtctcaggatcgcgagcgggtgatcgagaacggcggctggccgtcgtggggcagcgaggacgtgatcttcttccacaggaaggacggcgacggggagaacagctgctggggcgtgttccggcacaccctgagcaccggcgagaccgtccgggtgacgccggcggcgttcgactcggtgactccggcggccatcgacgagaccagggtggcggtggcggccatccgccagaagtccgagttcagtgatgtccgcgtcgaggcacagtacaggcacatcgaggtgttcgacatgagatcgccggagcagccgatgcagatcacccggaacaccaggccaaaggccgaccatttcaaccccttcgtgatggacggtggcaagttcattggttaccaccgttgcaaaagcgagctcctccaggtacatagccatggctatgtccattgatcacgttttcttgtccagtgaaatggcggtccagccgtatgcccgtatatagtatatcattgcactgatggataactaattttatttagataatgactgagtagttggttgatttatattcaaagccgcagatgatattatattgtttctcgtgcagcacggcgatgatctcccgagaaaatttcacaagctgcaatccccacacgaagatgtcggtgtgttcagggtgtccggtgtgttcccaacattttccaaagatggttctcagcttgccttcgttgacaacgagttcaaatccgtgtggctggccgatagccaagggatgcgtgtcgtcttcaaggtatacctcctgcctcctgctagtagttgctatatactaatatgttaatcctccagaaatgctgtacgagtagtcaatattttttttcaattatgaagtgctaaactgctactgatcattacttaacctgtttgcttagactgatggcccagacagcgtcttctcaccgctgtggaattccaagaaggatatactctatgtgtgcatgggaccttctttcaaagccagtgaaacgttggagatccattccatacacaatgtatccactggtgaccggaagtcgcggcagctcacgttcggaggattcaacaacgccttcccttccaccaatccagacggtaacaaaaaccatcaccaatattcaatcatcccgtaaaatgaacttttcatagttaattttgactgtgttttggacttcttaattaggaacgaaatttgttttccggtcgacaagagatggaggggcaaagtacagcaagaacctgtacataatggaggacgccgacgccggagaaggcgaggatggcagccagtcgacggtgacgcggatgaccgccggcgagtggacggacacgcactgccagtggtctccgaacgggaagtggatcgtgttctcgtcgaaccgggacaggccggcggacgcgccggagcgcgaccacggcctcgacccgggctacttcgccgtctacctgatggacgtggcgtcccggtcggtggtgagggtgatcaggagcgggtacgacgtcgccgggcacgtgaaccacccggtgttcagcccggacgggcggagcatcgcggtgacgtccgacctcgccgcggtgaccgccgacccgatgtcgctgccgctcttcctgcactccgtcaggccctacggcgacatcttcaccgtggacatcgacccggacgacatggcgaggaacgaggacgtggaggggttcgtccgcgtcacgcacagccggtacgagaactccacgccggcgtggaccgtgttctccacgcacgacccgcacgcgcagtggaacctcctcgtcgtggaggacgagcacgtcccgtcgtgcccgtacgcgcatccggacggaggcgagagttggcacatgaccggccagatttgcatccccaaaaggcactgttaattctctcgccattgcattactacgtttcttgtttagaagcgttgttgtttgtttaacgtacgatatttattatctgaagacgttttcagcatttgcttggatgtacaacgtgtgtatgaactgtttgcgatgtaatatttgtttatttgcttgagatgtacttttttcttgtcagtaagacttttgcataaatcgaaaaaataatcacacgagtgtaatactacgaattttgttgttagaacaaacctgactgtgtgtaaaacattaattcccagacagcttgatcgtttggccaatagctgataaactgtaaaacaatttatttagcaattagaaaaataatatgtaggtaaaacttgtatatattcatgtccctagtataaataaaaggcaatactgaaaaaataagtataatataataaccctcaaaatttaaatttcaagaaataagccaaaaggtaaacgatggttatgcatatataaaaccttaaaaacaagaacttatacaaatttcctaaataataaccactgcttgaaagaaagaaaaactcacaagaaaccacaatggaaaggattaagtttgatttacccctctcaactagggtcaaattgagaattacccctttaactatgataccggatattggtatttgatatccctgaattattgaatccggacgaattatcccccacatgacatcctctctgtcttcttcttccgccctccctcacatctggcaaaaaacacacgagaaggaaggacagtacaagaagcatagaatgatcaagtcactgcgtgaactgttcacgatggagtctttgctggcggcgttcttgcagagctcaccgtcaccagactatgtcgtcctgcccatcgcaattcatgttggatacagagttgtggctactcctgtcgtgccgccatgtgttctatgccgcctgcgttgacaggtggctccgcaccaccctcatcatgctcgctatgtcaggccattgtcttgcttccacatctgtcgatctccgtcatcctcaccactagagccaaggagcactctaggagcttccgagtcaagatgggcaatgtcagcgaccgcagctcgtccacagccagctgcggcaacaacctccccatctactcactcgattcgttcgaataccacattgatgaggaggttgaggctatcgtctcctgcgccatgcctatgtcaaccaagaccgcagtcctataaacataattattgaaagccgtatgagtagtttctatatatatatatatatatatatatatatatatatatatatatatataaataaatccttctacatagcagaaggaatatattgtaaaaatttgcaggaaaaaaatatttctgtaatttaaaaatagatatcaaataaaaaaactgagcttccatttggtaataataaattttggtgctaccatattttttttatttgattaaatggttggatccgtaattttttttcatttaagatatttcaagcctatcatgtacagaccagttttaaattaatttgttcaaataaaatttttctatttaaaccgctatgttttgagtgtgtatgtgggttggagggaggaggggattgaagggttgttaattcatttggattcaataggttaggggtgtcaaatatccttgtttagagagtaaattacagttttgcaattattgaggagataaatcggacttaaccccaataaaatcggttgaaaataccaaattactttgaagaagaatcataggacttattcttttggtgttgacacaaggtacatgctacatgtatttttttaaagaaaaaaataatcagctgaggaatcaaaagaaaacactgctatctgcagatctgcttattgttgcacagcataactgttttcgcaattcataggaacgtttttcttttttcagggaaaaattaccgacctgagccagaaatttaattgatatttcttccttcgtcaaccgtaacttcgtggacggcacgaagccatcggcgtccacccaccacatcgacgcgaccacactccacacaagccatggaggcgtcactcaccgtcgccggcgccggcgcggccgccttgtctctgcggccgcaaatccgccttcgaatcacccaagcgacccctctgatgccccctcggcggctccaatccggaccctccaagatccagacctccggcgcccgggcccaccttgcggcggcccccgcgtccacgccaccggcggcgggaggcggcctgtactcggcggagacctacgagctgacggcggagaacgtcgaccgcgtcctggacgacgtgcgcccctacctcatcgccgacggcggcgacgtcaccgtcgcgtccgtcgaggacggcgtcatctccctcaagctcgaaggtgaacccctagatttttcttaatccccttgcgcgcgtcaccaattcttggccagaatcatggctgcgagaccaaatcttgctatgcttaccacttactaatttgtggttttgctacggcatctatccaggagcgtgcggcagctgccccagctcgacgacgacgatgaagatgggcatcgagcgcgtgctcaaggagaagttcggcgacgccgtaaaagatatccgccaggtgttcgacgacgatcagcagccggcggagccaacgccccaggtcataattttgccaaggatccccaagactctgtaaatttggagctaccaatgctcattggctggatgttgcaggcggtgaacggccacctggacatactgcggccggcgatcgccaactacggcgggagcgtggaggtggtcgccgtcgacggcgaggactgcctggtgaggtacgaaggccccgagtccatcgggagcgggatcaaggcggccatcaaggagaagttcccggacatcaccaatgtggtgttcttgcagtgagctatccagaaaatttttacctcattggcatgcatgagttaaaatgcaccagttttcgatggctgttcatgtgctagtgaacttgttccgatgtatgttcaggtgcaatctttacagtgttcgcagatacaatacacaaacagggaaacggaatgatacttgcctattgtcacctcacttgaaatagtatttggatttaggggaataatccatatggatcgtcaagttagatgttcaaattataagttttcgaaggtagcaagtagccaagtaggaaaagcccctaattggccaagtattagcgattactactacctagcaagtctgaaaaatctggctattggggatgatcgaactgttaaaaagtttgtctgaatatttgtctgagactgaaatcttagcgagaagagtccttgaatatctgtctaaaaatcttgatgacattgatcccctttaccaccgaaggagcaccagtctgtctataatctggctactagataggatcaacttgcctgaacgtccgtggatatctgtctaaaaatcttgatgacattgatcccattccatttaattatcgccaaaggatgcatcagagtgtctgaaaatctttcgatgtgtgcagtccaaatacatgtatatgtaagatcgaactgtctgatgcatccttggtgatttcagactcgtgcatcaaagaccacattattaaaccctcgtaatgctacaaaaatcgtcagctctggcccgaacagaaaaccaggatatgttgtattcctactgtagatcaatagagttgtacgggcacattaggacctgttttgaggagttttaaattttgaaaagtagctggagaagctagaaaaaccagtttcttgcttttaagtttattttctggattccataactacaactttttataatttaaactaaaaactacactgtttgaagaagttttttattttgagagaggctgcggttgtcagaatcacaaactgcagaccatcagtgtttccaacatttcaggccggtgtcctctatctcgtttagtacaaagtacaaacaaaggagacaggccaccactagaagcgtgatcagttccccaacccaaagaagcccatgttctccggcccagttttgaccgaactttcggaggccgtgcgatgcgaatgcgacctctacggtacaccgtacacgtacagtcttaccacccagtactactcggcccgcagtgtcactgtgacagaacaggctacagagagcacatcgaccgtggaatgcgttccgggtcgcaaggtcgcatgatcaatccattgtcgtcgctaccaccacatcacgtgacatgtacacatatgttatggccgtgtactagccatgtaggacatgcatgctgctcgttcattccaaggcccatatgcctcgcacagtctcagagatcgagtcccactcgagccccgattgatcactctgcccaattgttcgttcttggccgcaaccagacagcatcaaaccgctaaaccagaaaacaatctttttcttaattagtagacggtgactaaccactaaaattaatggcactagtactactagtgtactgtactgctactggcactggcaggcagctccatcggttaacgcatggcgattgccttggttggagcgtgcgaccgtgcgtgcgtgtgcgtgtgcatctgcaggtcaaaccaagcgaaggcaggcggccgcgcgcccggccgcccggccggctcgcgctcggtgtcctcggtgattaggccccgcgcgagcgatgcgttgcacgatggtggtggcgcgggcggagtagtcgtcgctagggaggatgagttttttttataatcgggtggtgcacgagcaagtggtggtgttggtggtgcacgtgaagccctatgcggttcggcgttgggattccaacaaaatattttcgcgggaatggcgctcggatccgcccatttacgccgcgcggagcggacgggggccggggcccctttatttccgttgccgaacggcggcacgggacggacggatggatggatggatggaacggccggggcggcgccggcgcggctttggtttcactgcgtcacacagcgagaagggacgtttctacagcgggggagggtagtttaggctgtgtttagttcagcgtaaagtttggattttgattgaaattagagatgatgtgattgaaaagttgtgtgtgtatgacaggttgatgtgattgaaaaggactgaagtttggatccaaactttgaatctaaacgcagccttactgcctaccaccggtcaagccgtatgcgatggtttttcgtcggtgactgtattgttttaattaccccggttttagttgcggtgctggtttgggccagatgtgaccacgtcggtgtgttaaggtttctgtatttttttaaacatgacctaggtggagcaatcttaatagtactcccttcattctaaaatattaacgtaactgtgtatccagatttatagttaaacgttgttatattttatgattgagagcgtgagccgtgaggcggcaaatttaacctaaccgtgcccaatccaacgccaaccatatgaccggatcaccccggatcttcaaccgaagcagctgccttgctcggcccttttttactgcacttgcgttgctctcggactattcataccaagtgctcgggaagctcacacgctagagaccactaggccagcgcgagcgcccagctatagcccatcgatctcttggaaaagcctgagatcaaatcccagcttaactccccaaagatttcctgactccaaatctccatccgctccgcagctaccttctccccatatatacacgcgcactccctcccccctctccagcctccatgacccctcctcgctcacctttctctcttgcctgagccaagagctacactttctatatccaccacttcaccgtgcaaaccccatgcacacgccttgacagaagctgagctagcttctcctgcgtcgctgcaagctgctactttggtgcgtgtggtttggttaagttcgtgtactggtgcaacataggttctttcttctaagaagagactacttggttgtagtcaatttgtgtctgcgttttgctaagcttgcttgatgccgttttcctgcaggttcgtgactgaaagccaaatggaagatacggatcaggagctatgcaccgttgcggtaagaacagcgagttatctgctatatctctttatgtttgagcttgcgcactcaagctagcgctagctattattgtgatctcttgtgttgatcttctttttatctgtctatcaggtggagatgatgagttcaggaaaactcaagccatgtagacacttgttgttctatcaagactcccttcaccgagaagcatccataaaaatggttcatgtttagcaatagcacggtgttatcctaactgagcttttcttctagccaccgtccacatccttcttcaaaacctcaacatcactttgtgtgggaattaaaaggaattggtcttcttgaccttgcaagaccttttcttgaccttgtaagacccaacatcgttgtgttgtttttcttgtttcttatttttcaatttcatccacctcttctttctacctcccatctttctcctagttcttgccttctctctcggtctatccctcctgagctgtattgatcactttctatgttattttctcgatgtttaaaagaaaattaattttgtttagcaatatacgaagagattgtgaaattctagtatacctgtaaattgtaatattattgcttgcgtgatataatttgtaatattattattgcttgcgtgatataatgtatttctgcagtcagagtgcagctgatagacctaaggatgtttcctgttaccacatgtgaagctggaaatctacctgtaaggtagcttgacatgtatcacatcatgaacggaataagttcgctgtgtgccactcgataacgatttggatctttgccgccttgctcactgttgggaacaagtactcgtactcgttataacactgcatatgcaatacacggtttatgtgctgtcatttcgtttttgttatgcgccgctacagaaggttcagttctgtctcaaacttttgtcacagcactcgactgtgtactactcgatattgtcctttctcgcccatatacttcgagtttttttttattttgcaattacatggatcatcgctttagttcgcggcttaattagccatttactaaacatctaggcctactgagacgaagtttatatgaatatatagatcgacctagggaacaagtgtactcgcgataaaataaagaattgatcaaatactgatactaccgtaccttcgagatagcagcacaatcctgacctagcagaattatattgggccgtgtttagttacaaaatttttcttcaaaccttcaattttttcatcacatcaaaactttcttacacataaacttttagtgtgaactaaacacagccgattcagctaagagtctaaggaaaaaagaatatatagccattcatgttatacgtacctctagcatgcaaatcattacagggggtcaattgatatagcagtaagatgtatcggaaatttagagtagtcacggtatatcgagcagtccaatctataacctcccgttattatagcaggattacagttgatgaatcaaaacattgccatctagtcatgtatttatccttacaaatcttaaatgccaccacttaattatttggcatttgatctaccgtgtctgctacacaaattctactcccaattattccaattccaaattggttccaaaggatctatgttttagagccgtgcataaacataaaaaaaatttggttaaagttactaacttatcctcagttattacaccatggaaatgataccccataagatgggagttttaattaaatcgtgcagaagagattaagatagttaaaaagtattgtgtcactataatattagaaatgaataccctatttactcataggaacggtataatgcgttcaattgcatgatagggaaaatggtggatatctattttttaagttaaaaatgggggatgagctactccaagttttagtcttttagagaagcgttgattactctaaaattttgaatcaatagggattttgaaggtttaattaattgttgcagcaaaacagggaggtctgaaataataccatgcatgcaagtaatagtgatacagaaagtgtcaagtagctgttctgacttaaacagaagagagacaagatacggacaacttaaacaagaaaccaagcaatatgtacacactcacgtcactttaggaaagaagtggggaaggttgctccacaacacttttcagtcaattcattaatcattgacaccacgaattcttcagaaaacgggaacgcgtagagcaaaatgccaaaaagcagctcttacatctgtactgttggcaatactcaaattagcccattattaattaagtcattatcagtgacaccaatgagtataaatactttcatgcacttagtaaaatttgcaacagtatctgcattcagttctcagaactactagtctgctactctactctactactacaaaaaatgtatcagtaatttggagtctgcccctagtgtactactccattgaagcctggtatcatagtggcagatcagacaggtacgtctaatttggcagggcactctcactcaagtctgtacagtaaatgagccattgaaaggcatgaatgaagcaacctaccgttctttcacagcacaagatgcatgcataccttccattcttgctaccatgaataatgggtgttacataaaatgggaggatgcagaatgctacaacactaacacatgctttattgatgcatgccgttactgcatggactgattgaattggttgaattgtggtgctcttcacatgggtaagattgtagtgtaagagactaaaatagcacagagctcaaaggctatgaaagtatcattgccttagacttcactttcctgtgtggaaaccaccaagagttgtccaggtattcaatcaaaaaataataaaagaagaatgaagggaacaggtattcctaaatacctaaaagaaataggggaaataagaaaggaaaaactttagggttcctttggactgaaataatttcaaagaaaacctggaggatttcaataatccttggaaaatttttcctacgagctcctttggaacaacggaatataaagttctacgaatttgcttcctatgtctcaattccatagaaatctaagcatgagctcgtatacctctttttattttcctttgagaagtcccatgctctctccctacctccctacctccctctctctctctggccgtgtttagttcacccctaactactccaaacttccaactttccatcacatcacatcacatctaaaacttttctacacacatgaacctctaactttttttccaaacttccaactttcctcaaacttccagcttttttcaggaactaaacacagcccctctctcactctctctctctctctctctctatctatctatctatctatctatctatctatctatctatctatctagtatctctcttccacaaaacaatttcctccaaagtttctatattttatttgttatgaaccatccaagcgtataaactgcttgtgttttgaaaccctataggaattcctagtctgtgacatcctattcctacggtttacttgttcatgcgatttagaaatactgcattctaaaaaggagcccttaatctacacattagaattcaaaatacggcaggatatatgtagtctccaggaagcatgcaaatcaaacacccattttcacaaaattcatgtgttttcaatcctctattttgtgcatgtatccctatcctattctattgtttttttccctattcctacgttttttcaattctacatttcaaaaggggcctgaaagttaatgcaaatactcaggctgttatcaaggctgtgtttagatggtggaaaagttgggagaaaattggtagtttggagaaaaaattggtagtttatgtgtgtaggaaagttttcgatgtgatgtgatggaaagttgggaatttgggagaactaaacacgacccaagttatatgaggtctatgatctcaattccatatgtggcacttcaattttcatgtcatatatgtgccactttcagcgacaaacatgagattaggcaaaattttaatggtagacagggattttatccgaataaaaaaaatactccaggaacaatgctcctcagtccaccacttttcaagtttaagcgtcatcaatatcacaaaaggtaaaaacactacattcttttgtacaaatttttaagatgcaagaaaccacaagcaatggcattcctgactgagctttttatccaccggatgcacattgttatagtttgaaagaacaagtttcaaaagtcccaactataggaaaataacagagaacacggagcaaggtaaaacatttagtaaattgaatcaactaatcaaggtcccctgttagatgcctctacagttctttttaatttcatatttttttttactttagagatgaaagattggttgagaacaagtttaatagtaaagccaactatgatcttatagcttatattagagttaatatgtatagtaaatgagctataaggttatctgtattttttttctcctcactctagctctcacatatgcatttaatatattcatcttaaagtatgtgaatagttagttaactcttgcatgagccaaaccttttcattttcaaattctttcttctctacatataagcttgacttatagtctactattaaacttgctctatgaagatagaggctatacagaaacaatagagagaggataacagtgagctataagcctactataagcttatgtggaggagagatgtaacccaaaaaaaatcaagggtattggctttcatgcaagagcttaacacaagctccaagacatacattaaatgtataagtaaggccgtgtttagtttcccccctattcccaactttccatcacatcatatcacatccaaaactttcttactcacataaattcctaactttttttttcaaactaccaactttcctcaaacttctctctaatttcaggaactaaatacagcctaacttttccatcacatcaaaactttcctacacacaaaaacttacaatttttccatcacatcgttctaatttagatcaaacttccaattttgacgtgaactaaacacacctttaacatgacagccatgaagctctatggacatttatgaggtacccaccaccaccatctgtcccctctaaagagaaataacaatcccccctatataccctggcacaattggacagctactacacacagggggtatagttttgtccttaaatgcctttttgctctctccctctgctggaggattgtagacgcagcgacatttacgcaccaaaacgtttgaaggttgtcatgcatgcatgcatgcttgctaagggcgcaaagcctgagttttttcagctcagaagttagtagtaagtagacaaaatggattgaattcaaacagtgaagcgagcagccactgtgcgcaagcaacagataggcaagaatccacgccatgtccagaaacagttgcaagaacaggagcagtgacgagtttagtagcgaagaaaaagaaatgctactgcattttaaactttgcccaacagggagactcagaacaggcattgaaagcatgcaagactctggagggtattactgccgcagcaacccgactagtcaaaatctaatgcatgcatgcaaacggctcgagatttaatggtccatatcttttgcatcttctttgaaaagtgaactcttgcaacatgttctcaaaagatagcctcacactctcttggcagcagacatcaataaggtaggttcagttcatgatcgatttagactaatttacaaacttcaccagcccccaaaacaaaccctcctcaaatgacatcgatttagactaatttatgacactccatgatctatggtttaaagtaggctgtgtttagatctaggggttaagatccaggggtgaaaagttttaccgtgccacattggatatacggacacacatttgaaatattaaacgtagacaataacaaaacaaattacatattccgcttgtaaaccgcgagacaaatttattaagcctaattaatccatcattagcagatgtttgctgtagcaccacattgtcaaattatgaagcaattacgcttaaaagattcgtctcgcaattttacacgcaatctatgtaattagttatttttttcatttatatttaatactccatgcatgtgtctaaacattcgatgtgacagggtgaaaatttttgcaaggggatctaaacatgccattaaatacagtataagtcttgcatcaatgtcttatctttatttttcatggcactagctttcaaagacttaccatactttagtttcttcttcttaacgtcctccagattttgttgaatgctcttctgctcccccaccactgtattcagctgatcctgcagagcagcccagtgatgcatcatgaaatgaccataaaatgggtaacgtatgatcataaaattgcaccataaatattgcagttcctagagtcgctaccattcattcaaaacaaaccaattgcaaagctaaagatcttgcttggatcttatttgtttctgcaagggagacctcgcagttccaggaaccgcctggctcctacgggtgatgtgaacaagacataaatgacagagtagatcagcagggtagcaactgtgccctcccagtgcattttgaaagggtttaccccctatagctagtagtatgcaaagccatgattgtgttatgaacttctgatcaacaaacagtaacaaaacacctacatattaagtgaaagccgtgcaatgtaagtgcatttaaaagtggccaggcagaccagtggtcaccatttgtcaagtcagtttgtgcagaagttaaatgctctatacgcactgcagagaaaaattaagaccgagtatgtccaaagcatttaacttaatgcgattttttcccggaaagccattagattgcagcagcaattacagtaagtactccagatatgaatttttacctgttcttttaagtggcagaggatgcatggagcaatcagggatgttaaagagggagcatcagtgaaaaaaaaaggagcaatttcagatcttgactgcagtcgagtctttactactaaatgtttgaacaggacaggacacacacattagctggctgggaagaagaccttaattggtatgaatatacggacctgacagtttaacccatgactgcttgctcctaaacaatgctggatgcaacagctggacggcatgtctggccctcatcacttctggggactcagtcagctgaaataagaatcaccagctattcttatcagaggcaagagcaagaacactgtcagaaacattctcccatatattgattacaaagtggcaatatttacatcctgtcagtttacaaccggccaatcaacttttgatcggcttttagtgtagtatgcaatcatgatttggtagaatgtacacacaagcgttatcgatggattaaccacaagattgccaaaataaccggcataggtggccaccctggtgaagtaactatgctaactagagcaacgtaaaaaatacaacgaagtagaatgtgcagtgcccatcttggtagtcaagcaccaattgtggtactacacaagaacctgcgaccttgccgcacgacgggagcatttggttcgggcactcttgttcacactgcatgcacacccttccagcagctcgagatcttcctcacaaatcaatatggatgccaattctggacagtctaaaagcattttagagctaaggtatcctgcaatcgtccaagtttgatatagccttgactgcttcccaataaaccttcctgtccttgtgtcataatattctggccacttgtcctctgagagtctcttttctgcgacttcaatggctcgctgtgctaagtcacgcctacccatcttgatacaggctagagtgaactaaattaacaaatacaaatgattaaacatacaatcggtggaaaaaataatggaagcgttaacaaggttagtgatatatcaattttagatttttacctgccatagcaatgtaggccaagatccaccattatgatacgaccagggcctgtatgcaataacaaaggtataaaaaaatagactcaaatactgaagcaatgcaaatctggttaatgctaataatacttcctgacaaatttaggtttcaatatctgcatctgcacataacaaatgatgtagtcatcataaaaaagagtttttcagttgcttacgtgtttttagggtcactgccagtgatgatacgccattcctcatactctagagcagggtagcatatcttgagtggcatatttgcaattatatcctcccatttggcttcaatgaggttcaggataccctctgcttgcctttgagtagctagagaagagataattgcccagagatttccaagagaaaaaaacctgaaatccatgtgagccggttgtagatttcctataaggtaaccacccttttcaggaatccaatctgcaagccaagaaggtatttgttctggatagatattgaacttattaatagcatcatgggagtactcttcagttttgtagcgataaatttcatttatcttcttcatatcaacccaatagtactctcttatgtgaaacgacaaagcactgagcctgtagttgatggcacggatcaaactgttagatccgtcatttacactgaccatttcacgggcacaacgcaaagcagaatagaatagcgactgcaaaatagataccactaggtcaaaaaccactacatttgagttgtgagtaggacttgcagtgaagaaaaacaccagtctggtactgaaagtctgagtttgtcaaaatcattatcaagcattagcttacctggatctcaagaggatgcccatggattcccatccgtcgatcgatcatacatgatccatcagtgactaacaatgttgggaacatgtcaaatccatcagacaagcataaattcaggattagtctgatgcctgtctgcacatcaaccctttcttgtagtgcatagtctccagtaattttaccatatgcccgcaacaggattatccaccaaagaccttataaaaagaggatggtataaaatatccacgtaataagtagtaagagtatattcaaaagtataatatgaacctatctagcttactcacccgaatcaactggtgctacacgtccaatggctgactctccaaagtcagggtcaagaacctcctcaaatgcttcactgtttccatctagaggtatggatctaactttgaaactagcaggcatcaatccctgaccaggactgtagcaatcaactgtcttctcccagctctgataggttaaaccaaacaaaaaaaaagtgacttttctttcaaaaaacaccaatgatcatcataatttatatattttaagaatgatacaaaatttaaaaataaaataaaagaaaagaaagaactcaactcttatgctaccaagcctaccatagatgagctagcagcgtaatgtgatgaatcatgacaaatgaagcatcttaccctatcctgtacatagaaacatagaccatggaaatttggtcgatactggtctcagaggtttggatacgctagtggatctatttttgaagttatggaacatgtttccagaataaggataagtatgtcttttattttcaaaagaacatattcatgttgtgatttattagttagagcttagaacatacttgtcctagagtgttaaaccagtgttaaccaccttacaaaaaccaaccaaagtagtagtgatttttaacagtcccaaagtcagttggtaatatttcagatttagaacaccacacaaattttggtgttcgagtattccagatttgcaacatggtatctctttgtggagccctcactacagaataccatgctctagctgtctcgaagtagtgcagcactcttctttcttttttgatttgaatgggttatggctagcacttgtgatgctaaatggtaacatcatttcttgcccctgtcccttatactgtagtatagacaagtagacaaccatgtagcactacctgtagacagccataccaactgacactaatgattcttgacttcttgagtattggtagcaaacttggtcatgcagaaatgttgtcttgctgtcttgcatgaatcatcaatcctatcgtgttctaattttagatgaagcttagtatgtactactaaatgttatgcattgcatatgaataaaaaacaattaaaagtgtattttaagacaaggctgagaccattatggtcatatcactaggaatgggcctaggaaaagaactagtaaatgataacctcaagtcatgcacccttgccaaaaatgaaaagaaaccatatctgctccaatagttacatttaaataaaccacatgaacttttagatcaacaaacaagaatatgtcatactcaaggtgccggcgctacaagattatagtattagtattataagtataacagaggcatacatcatgacaaatgtacattagtggaaatttagaaaatatacaaaacacatagattcagatccttcaaaatcctcatacgcttaaacaagttgttgtttgaagtcccaccaaaattatgccaggttgtaattgcactaattttgtgttatttaatactcaagttttttaagcaagtttctggtgcaagaataattggcattgttgcaagagatgcaaggatcataatctacttgagggtttattagaacaattgctggtgttatctagcaaaggctaatgagaaacgcctagggttttccggctagctccacaaggtggtgggctagacgacttgagttcgaagcctcaccccttctaattatttgatattaggtccttccctaatattcgcgtctagaaagacataatatgtgctactttgtgcagaagattttctttccacactgaaattgcatcagaatttgtgttatttgatccataataacgttttaatagcgcactgaacattattaccacggctacatttaaaccgaagatgcatagaatgtactactgccacggcccacgggtaacatagcatttattccgatgtttgtttgggcgactgacctggagttgcaaagtgtggagcaggaagttcttcacgatgtccccctcgcccttgaggaggaacgcgatggccgacgggacaaagtctctaatgaacacctgatcgtaattgagcatctggttcgcggtggatgggtcgttcgccgccaccgtccccacggcggtgccgcagtagctcacgaccgagcggccgagcagactccacgcctccttctcctccgtcgactccttcctgctcctcaccgtctccacccaggccttcagaccctccaactcgtgctggcacgccgtcgccaccggatccttctcgggcgcgggtagcccaggctcttcctccgggggaggagtcgcgtcatcggggagctcctcgatggggggcgactccagcggcggggccgacgaggcgaggctggcggcgcggaaggggtcgaagagcggcggcttgtagctctcccccgtcgaggacgcgccggagtccaccgacgtggagagaaggcggcgggctgaggcggcgaccgcggcgaggggagccacccccgcggcggaggaggaggagaagcggcgggtcgagaggtagaggagcgcgcgggcgtggcgcggcgcgccgcggcggaggtgggagatggcggcggccgccatcggtggcgatttggattgcggaagaagaaatctcgctgcttcgatcggattcggtgggggatttgattcgccgacggaggagagagtctctagaacgggtaatggcgactgcgatcaactcgttaacaatggggtagtttcagtttaggagaagtgttaaccttagggcaaccgcgagatcggacggcgtaggagtgaccacgtatatggaggttattctgtccgtaattaacacgggccgcgggacggcgggagccgaacatgtggcgagcaagccgtggcctcgtgggtggcggcgtgtccgcataggaggagaagcaaaattcgcattggaattggcgagcaagcgacactgctttcatcgctggcaaaacaaatagtatcaggttttcttaattaaaacacggaaaatcatccgaaatcaaggcggtatgggtaatgggtttatctaaaatccagaaatacattgccttcaatttaaacaactaacatgtccgtgctaacgctacgacgttatttataatgcaaagcaaacaaccaaaaggtaacaacatatgtttcaaaaagtttctaactccatattcaaacaagatcacaagtatcattcccaaaaacattgaagaaaatctaaataaattaccttctggagtcttagcatcgacatcatttttaaataactaaattagctacaatagtattgcatcgcgctggtggaacattaatgtcttccatcttagaaaaaacctacccatcaacactatcatcactaccagcgcaaccatctgcctatcttagtaaaaagcaagcaacctgtccatcgtaatgatgtcttctttgcaatatgccacgtacttcatcaggatcctttgggttctcccaattctctcaagcatcgatcttcttgaatataccgccatcataattctttgggtctagactggagagatgagccttacatgaattcaaaagaaaactaacttacagaggctacacatgaattgtttatatatatatatatatatatatatatatatatttgtaaatttacaaatagttcttcttcatttccttttcacaatctttgccatgtacttccggcacaaattcaatggttaattaatccgggtccaattacataaaagcatgaaaacaaacaatttgcttgaaaagttcagaagtgaaaactggaagctattagtgcagattaaatcggagcacaatgaaaaatccaaatacactccactaaaccaatttaattgcaaggttacctatatggcagccaaaccccttaaatgcttagacagatccctagagagtagtagaaatccctaagaaaacatgcagttgttggttgctaaattatgcttagcatcctaattacatacttacggcaacatgatgatggtgttttaccacctcctgctatttttcattttgcaccctttcactcgtttgcatgcctccccagaaattggtgcagcaaacacgatcccatctacacctccataaagtaagatttggttcttttgacttcttctagagcatggcaacattggtttctaaatttgttaaattcagaaatggtctctctgtatcatgtacttttgttttggtccgataaggccttaaaattttgagttatcagtgtacagaatgcattacccagtgatgatgtagaactggtttaggtgctgcagctatcaagactgaaaattttccattgagcattctagcaatctagcacagctaacaactcattaaatgaacatcactgatcaaaatgcaacagatcaaaggcactggttgatatcgcatcgtactaactcaacgtagccacgcgtagcagaagcctaaaccgcgctgccaccggagcccgtcgcggggggccgccggagcccacaagcgtacgagcaacagtgccttccgtaccaactacatcagccaatggaaccagctcccagaaacaccacaacaggtaaaatctcattgttttttcagggttagcctgatcataattttcagtataatgttctcagcccgaagaaccttaggttgagtattgcatataagtatttatcatgggaatagagtagtatcaaatcttaattcagatgataagagtgctcaggtgtcgatctgtgcaacattattctcacacaatgatatcttcataagcttctgaaacttgaaaatggtttgcagagttcctgccaaggaaaaaataaaataaaattgtgccatcagtaacattggaaacaagagctctatttgatcaaagtcacatacatctagcgccaacagtctatgaaggccaatatctgtagcacgatttaataatgctcaaaatgttagatctgctcaaaattgtggtagcatgttctttccaataaaaattactgaaagtgcatctaggaccccacatttgtttttggtgttaatgacaacacaattagagggtaactaatgctttttgttgagatgtctgcaaggatgaaaaaggagtggaacttaagcatagaaagctttgtggcaatttttgtggtaaccacctctctaaaccttgtgtatcatgtgttcttgagtattagaatgccgtactattaagagggataccacatgcatataattggtagaacactagtgctcaaaatcctttatttgaagtgttcctgttttattcctgtcggactatccgatctagatcagactatccgatatccgatctagatcagactatccgaaatttcacagaactttgccctctgtcattggtctgagtgttggcaaaaaaaaatatcggactatccgatataaggtcggactatccgatacatcggactatctgaaattttcttagaacttcactctctgttttgaattgctttttattcctcttgagtgaatttcaaatcagactatctgatgtgatcggagtatccgatgacccagagactccgaaattcaatggaactttagtctctgtgagaggatgaaattcatgattcaaaaataacggaatatccgatatgacatcggactatccgatcgatcggattgtccgaaattctccagaattttgttctctgtctttggcttgcttgggggtcaaaaacatcggactatccgatgtcacctcggacttttcgaggtgggatgaaaagattcccttctgctaatgaccaaatttggtaaattctatcattattggcatcggagatgaagatcagatcgaagtggaatccaagatgaagatcattgcggaaacagagtaagaatcggctgcagtccaaatcagctaaggtcaggtcggcagagttcgagtcggatggggctagccgatatagctgattctgataatatgactaggtgtacgtcatcgggttcaagttgatgtgcttcaagatgattgccacgcatggatagagtcctgggaaggcaattgtatctattaattaggatattctatgtgatttccttagagatatgtttgggcaaaagtctgccgtaaatacttatggtatcttagagtttgttagagataatagtcgtgtccgttatggacgtatcttgtaattctcgggtataaatagacccgagccctatgtaaaaagtgagaacacatccaatacaatctcggcgcatcgccaccttttttgctttacttttatttcgacgagttcgtgctctcggattgagctgcatcggtttcgatcttcaacaagaggtaaaacttgtcatgacgacttatgttctcaggattagtgcttccatctttatgacactataatcttgtctatataattcgtcgagttatcatatatctcacataatcttcgataatatctttatctaacctataatcggctaacatctgctaatggaaggcagccgattaggttagacaataacgttaacttagattatgtgatatatctaccactctatgaaacctccagcggcttgattgtctagatattgttcttcttttcatacttaatgctgcatcagttgagtttgatctattaagtcatgcttagaattgcaatctctagcctgttttctggttgccgattagggtagtatcggagtttcagctaatcttatttgatttaactacttttatcccatatgcttaatctatatgttaaatctgccctttatgttaagatcttgtcgcatctaagtatattaggcttatgtttggtatattctacttgctttaacatcttaatatagagtagtatcggagtattagccgatacatgctagatctacctgatcggctatgctataaatgtatataatcccactattaatatatatttcgatctaagtgatttatactgtctcggcaaggcgaccgatctatcccaatcacttgatttaagtatacatcgatataaggattatatatcattaatatctacagccgatcgagtagatttagttctgatttgcttattgatatttgccaatcgatgtacgcatgacatcggcttgaaataaatgatatgtcatcggcacctagccgatcggctatcatttataggattaattgcggtttatttgttctatctcttgttgattgcaggatcaaatcaactggcacgctcatacatccgaaagcgagctttggacctgcactggagttaagcagatctcccaggcctcgtgttttctgtcaacaccttcccaacggccacattttgggggatctataaatacccccacctaactcttttctagggttacccaactcattcattcacattcactttgggttgagcttggtgctaaggtgctttgaatctttgagctctttctccctctctcaaatccctcttcgttctttgtgtggtggatcttagtggttgtggatttggtgtttgagggcctagtgtgtgtttcactcgatcttgagcactagggtttgaccaagagttgtgtggtgtttgttactcttggaggttgaggactcctagacggctaggtgtcactcccgagccaccgatctacgtgtggttggccgggagaagtttgtgaaggccggatctcgcctccgcaaggaaagagataccccttagtggaaggaggagtgcttagtgcaacctcttgaggaaagggttagtaaagacccggctcttagtgagctcctcaacagagagtagaatcctctcaaggatttgaactccgggaacaactccgtgaacttcatcgttggtgatatctcttcatcttctctttagctttgcttaattgtgccgctatagatctagtcgctgtttgcgctatactcttgtttgtgtgttagatctgcttgttgtgactctttagtggatcagacagtctgatccaacatcagactatctgattttttcggatagtctgactgtggatcagacttttcgaccctaactcagttttagcttccacataaagttttaaattagcctattcacccccctctaggcctaattgaccctttcaaatacaacacagagatcagttgaagtacaatcgcattaattaaagtacaatcagtagtgccagttagttctagctaaataaaaaattcactaaagtttccatttgaggttgtttaacagaggaaaaaaaatctaatgtgacaaacttcatttagagtaactttaattcactgccttcatttaaatacatttgtaatccattttcaatttcatttagaccgttcatacgcagtttaaagcgggatgatgcaccaacccaacgtaacctaaagtaacttggtttagacggtttgggccaacgtctttcacgagttaaaccgtcttcatcttcctaacctgtacacaataacgaaccaaagaaaatgagaagggacacgatcatgaccgacctcaataagaagattatatcaactggagcaatgtaggcacttagaaaatcatgttacgattctagtagagggctctccgggcggctaatggagtgggaggggccttgcagccgcacaccgcccatggtgctagcttgcctagccacgtgccgtcgctgccaccgatcttagtacaaagtgaggcagatgcgatgtcgatgggtggtgactcgtggctatttgcctacttcccgcatcaagtttattcattaccacgcgcaatcacaacaacaagatcaccttcgtgtacgactgaagcggcgatggtgcgctggcatgggcactgagtgacgacatcatcccaggcttcatccatccttttggcaacatgatcgtcactaaaggctccaatccaagaactctcatgccataaccacggggatggattccaaggtcagctcccagatcatatggttttagtccaagcaaatggttgtacgcgacattatccttcctggttagcgactcacctcattggtcgagagcgtaatgacgagactaacaatgagatgactagctacaatgatgaagggaatgtagagactaagcacacggtttggacgagttttagagtagcccaccacaacccatgtataactttgatctggattggtttaccggtgttggcgatatggcatgaggcccttcgaccaaacctgccgaaaccagtaagaattcaagcccgaaatgtcaaggttagtcagggcgaagcccccctccctccaatggtgaagactaggaagcaaggacggcgagaggcagggaatcacgcgggtacctcgccaagccagaggcctcctaggcgaaggatgtagggcgaagagtatacgccgaagggggtcgacttcgccatagcaagattcggcctcgggaggaccgaagaagccatcctggcccatcaagtctaagggctaattgggtcgacaatcacttgacggcccgttaagggcccatgaaacacaattacactgtgtacccatgtaaatgtccctttcataagggcaaccatgtaaattctcctgtataaccaaaaccctagtagtaagaacctataatggggatataaatagccccatagggccatgtaatagggggatcccaagaaaaattatcaatttaatacactttacttctttcccaactactgttgagtgaccacgtctttcgacgtatgcggtagtcgtttcgacaacagctggcgccgaccatggggatttccgagcgaaaccactgagagcaaatgccaccgaaaagggtcgtgaaggagaaggttacaaggcgaaaggaaagcgaagccgaggtggagatggtcgccgaagagggagcagagccttcggcgccagttgccgaagatggaggagcattgtctgcctccgcacctgcaccatcactactgccttcggctcctgccacctctgcgcaggtgctgaatgcggctgacatggcgaaggcagccgcggcggcaagggcactccagaccaggcggagatcctttcgacaagccaactgctggtgctccaagccgctccgtcgcagctggcagcagcctcgattgcgctcgccgctgtacaagcccaagtcaacccagaccccgaaacacaaatcgaagccgacatggaagccatgcgacagaacatgacacgactccaagacatgcttcgccaaatgcaagaacagcatcaggcgtatcaggcggcgaggcggtccaaggtcgcttcggccccagtcctccaatatttggcaagctacgtcccaccccaagtctatccacaagcaccgatccagccccttccgccacaagttacgcaagcgccagtatacttcaccgggcagccctcgaccgcagcagtgcatccagctcctcacgtgcaactgcaggctcagccggtcgctgcccaagtacaccctcaaccgcctggccaagtgtcacaagcaatggcagaatgggcttcggctctgcaggcgcagctccaagctttccttcagcatctcagctaaccccacagcatttcaggtacagccccttcggtccacccggaggggaatacaagtcaaggtgcacctagttggttgccgtcgaatcagccaggtctgggggcttcgccttggagtcaaagaccgcaattcgacttcatcaatgcccctcaggcaccaaccgttcggccgcaagcaccaacgccaggcttcggagcaaaccaagcaccaaatcaggtcgccatagcatggtcccagcaaacgttcgacccatccatggcggctcaacaagcatcaccaatcagagccgggtagccgaatgccatggcccatcctcaggcgcaagccgtgatttcacccttcgccacgccatacccgcagcaaggtgccgtgaacagggcaagagccgaaaagaggctatcgctgagtgggggaatcaagacccatccaatcccaccccagttcaagttcccacccgtccaacgctactcaggcaaaactgacccaaaggaattcctctccatttacgagtccgcgatcgaagcggctgatggtgacgaaaataccaaggcaaaggtaatacatctcgctctagacggcatcgcccgttcttggtattttaatttgccagccaatagcatttactcacgggagaaattgcgcgatgtctttgtccttaactttcgaggcacctatgaggagccgaagacacagcagcatctactcggcattcgccagaggccgggggagtcgataaggtagtacatgcgtcgcttctcacaagcccggtgccaagtgcaagacataaccgaggcgtctgtcataaacgccgcttcggccgggctactcgagggcgaactcacaagaaaaatcgccaacaaggagccacagacgcttgagcacctacttcgcatcattgacgggtacgcaaggggcgaagaagattccaagcgacgtcaagcaatacaagctgagtatgataaggcttccgtcgctgccgcccaagcccaagcacaagctcaggttgccgaaccacctcctctcgctattcgccagcctcagccgacgatctagggacaaccaccaaggcaaggccaagcccccatgacctggaggaagttcagaaccgaccgtgcgggcaaggctgtgatggctgtcgaagaagtgcaagccctctgcaaggagttcgacacccagcaagcaagcaaccatcagcagcctatccgtaagaaggtccgaaaagacctctactgcgccttccacggacgctcttcgcataccacggaacaatgccgaaacattcggcaacgtggcaacgtgcaagatctaaggccgcagcagggagcagctgtcgaagcacctcgtgaagcagctgaagaacaagcacccccggccgaatagcgccaagatgcgcagcgcagagtaatccaagtgattacaagggccgacccgccgatctagctatcgaagtgataaaagaagatgcagctccgaatggtccacaatatgatttcggcgggcgaaggggccccgaagtatctgaaccagcaaatctcttttgggccgggagatgccgaaggagtaatgttcccgcatcaagatcctctggtgatctcagctgagatagctggcttcgaggtccggcgaatcctggtcgacggagggagttcggccgatgtcatcttcgccgaagcatatgccaagatggggttgcccaccctagcccttaccccagcaccagcctcgctccgtggtttcggcggagaagcagttcaagttcttggccaagcacagttgctggtagctttcggcacaggggaaaacagacgtgaagagcaagtattattcgacgttgtcgacatgccgtacaactacaacgccatcttcggccgtgcgaccttgaacaagttcgaagctatctcccaccacaattatctcaagctcaagatgcccggcccggcgggagtgatcgtggtcaaggggcttcagccttcggccgcttcaaaaggcgatctggccataatcaacagagcagtgcataatgttgaggccgaaccacatgaccgggcgaagcacgcgctaaagtccgcccctcacggcaagataatcaagatgcagattgatgacgccgaccccacaaagctcgtatcgctggggggcgacatgggcgaagaagaggctgcgaacattctagaggtactcaagaaaaatagtgatatcttcgcctagggccctaatcaagtgggaggtgtttcgatagatctcatcatgttcacctggcagtcaagccggacgccaagccaaggaaacagaagctgcgcaagatgtccgctgatcaccaagaagcagcaaaagccgaagtccaaaaattgctcaaggctggggtcatccaagagatcgaccatcctgaatggctggcgaatccagtgctggtgcggaaatcaaacggcaaatggtgcatgtgtgtcgatttcacagacctaaacaaggcatgtccgaaggacgatttccctttgccacagatcgaccaactcgtgaattcaacagctggctgcgaacttatgagttttttggatgcatattccggctatcaccagatacacatgaatccggccgacatccccaagacagccttcatcacaccgttcggcacctttcgtcatctcaggatgccattcggcctgaggaatgccggggcaaccttcgccaggctggtatacaaggtcctttacaagcagttagggcgaaatgtggaagcttatgtcgacgatatcgtcgtaaaaagctgcaaggctttcgaccacgtgtccaacctgcaggagaccttcgacaacttgcccgcagcaggtatgaaactaaatcctgagaagtgtgtttttggcgttcacgcaggcaagttgttgggtttccttgtttctgaaagaggcatcgaggcgaatcccgagaaaatcgatgccattcagcaaatgaagcccccgtcgagcgtacgtgaagtacaaaagctcgcaggccgaattgcagcactcagtcgattcatctcaaaggcagccgaaagaggtttgtccttcttcaagaccctacggggcgcgggaaaattcaattggacacccgaatgccaagcagcgttcgacgagctgaagcaatatctgcaaagcccgccagctctgatcagcccagcaccaggaatcgaaccgctactatacctggcagcttcgctagtggcagtcagtgctgccctcgtccaagaaatagagtcaggccagaaaccggtctatttcgtctccgaagaattgcaaggagcgaagacaagatacattgaaatggaaaaactcacttatgccctggtgatggcttcacgcaagcttaaacactacttccaaccccatagagtcatagtgccatcgcagtaccctttgggcgaaatactccgaggcaaggaagttactggccggcttaggaagtgggcagcagagctatcccctttcgacttgcattttgttgcccgcactgctgtcaagtctcaagtgctagccgacttcgtggccgaatggacaccggcattcgtccccgagcccgaacccgtcgaacaaccctggatgatgtattccgacggttcgtggtcgcataagggggcgggcattgcggcagtactcacttcaccaagtggtgtgccgattcggtatgccgcaaggctgcagttcaacacaaccaacaacgcggcagaatacgaagccattcttctgggcctaagaaaggaaaaagcattggggattcggcgcttgctaatccgaaccgactctaagctggtggcaggccatgtcgacaaattctttgaggcaaaagaagaaggaatgaagaggtatttggaggccgttcggtctctggaaaagtacttcaccggcataacggtcgaacatttgcctagaggccagaacgaggaagcagaggccttggcgaaatctactgcttatggtggcccacattcgcctggcatcttttttgaagtactatatgcaccaaggtgcccatggatagcctggaggtcatggcaattgaccaggtgaaactgggcgaagatccatgcgactagcgaactccgtttgtgaaacaccttgaaactggctggcttccgaaagatgaagaagaagcaaagcgtctgcaactcagagccacgaagtataagatggtctcaggccagctatatcgctccggggcaattcaacccttgcttcgctgcatctcttttaccgaaggtgaggaaatggcgagggagatacaccaggggctctgtggtgcgcaccaggccgcaagaacagttgcctccaaagtgtttcgacaaggagtgtactggcccaccgtgttgaaagtctgtgttgagcaagtcaagaagtgtgaaagctgccaacgccatggccgaagtcaaaacgcgccccagtatgagttgcagcccatcgcaccaatctggcccttcgccagatggggattggacatcattgggccgttcccggtggcgcgaaacgggtacaagttcgcaatcgtatccgtcgaatacttttcccgatggattgaggccaaaccccttggagcgatcacttcggcagcagtacagaagtttgtatggaaaaacattgtttgccgtttcagagtgccaaaagagttcatcactgacaatggcaagcagtttgactctgacaagttcagagaaatgtgcgaagggcttaacctggaaatcaggtttgcgtcggtcgcgcacccacagtcaaatggggcggccgaacgcacaaacggtaagatcctagaagcactcgaactcttggaagaagtaagagtcgaagcactcgaacacatgcgcaactatgccataggcacttcggcaacttacaataaaaaagttcgaccgacggagctgttgcctggtcatcttgtcctacggaagaaggcgaacctgactgccgttggcaagcttgaatcaaagtgggaaggaccatacctcatcaagaacaagtctaggatgggatcctttcgactggcgacactggaaggagaagagttcgaccattcctggaacgctgcctctcttaaacgtttctatgtctagaacaggtggcacccaaatcgccaatttgtaaaaacgtatatatcgttatgtaagcccttcggcactatgtaagcctttcggcaaagaaaaaaaagaaaaaaaaagaggaaaatgaaaaaagacaaaaaaaatggatgtagggctattatccatcacggaggcccgaaccagtataaaacctctgtgtcctccgccttctttttatttacttgtgtgattgataatttgtggaaaaactccaaggcaaacgcctgatcagcgaaaaaggccagggggcgaaacgaatcggccgaagcatcgctcgccgaatgttgaaaccgcaacagcttgtttcgggaaacaactaaccgaacaccgttacactcgatcaaaaggaaagcaccaacgcttcctacaacatagaacaaaacggatcgaaatcggaagccgaaagctgaaaagtcaaaacctatttcgctaatatacgcaaaggggccgacacgttccgacccaacgaaagcacgcgaagtgacaatgcaaaaatagcgaaaaggagataaaacacatctttattgattttaaagaaaaatatatcaaagagtacaaacccatcaacatggtgcaagtaaaaggagcaatggcttcacagcccaacttacagataaattacatctccgtccccacaatcactctctctctaaggaatgatcaggcgaactaggttcgtcatcactactaatatcatacacgaccctaagaggagaagggggcgaaacacagactagactataacgacgctggaagattaactcccgccgatcagttctttgatgatttcgccaaaagcgaaccatatcctccagacgtcttgtacgaacaagatcgtagtcttctagggttcgcctggggtgcgctcttagccagccggcaaccttaaaaaccttatagctgcggccgtttatcaccatttcgcgataaacaggccgaaatgggcattgcaccctcggcaaacccttcaacgccacgaacttctcgttgttgtttcgccatttttcagcgggaggtcgaacacatacctttcggccgcaagcctgctagcaaagcacaaaaaaaaggagaagtgcaaaaaaggagggaaatatagacgaagatcagttccgctttcaaacagaacaattaaataagcgaaagggttatactttgccagtagaacaaagactatattgaatacaaggcgaaggcggcttaaagctgaacaaacaaaaagcttatatacaaaaacttaggctacaagaaagcccgaaagggccgaaggaaaaaataaaataaaaagacacgagggcgaagggtctcacacctcagggtggtcttggcctccgtcaccttcgtcctcgtgcccgagggaccgttccgacggcccgggatcctttttggagttgacagcggcggcctcctcgttcctcgctatcctttcaaggttctcgcggagtcgaatcttcgcacagtcccggccgccatcctcccaaaaccgtcccggccgccatcctcccaaaaccccttccgaaaggcccttagcgcagccccggagcactgcgtattgctaggccattcctccttcacgaaatcaggaaaattcccgatgtggtcgcagccgtgtgtgtgcaagaggctgagaacgaatcccgccgaaacacgagcgcaacagtccccataggcgcctgccacttcgacaaccgagccggccgcctcctgcgtccattcggaaaaatcgagcacagtcccgccttcgcccggagcaccttttgcccgagccccaaggtcgttaagggccagctggagagtgtaacaggcctccttggcagactccgtggctggtaccagggtcgcggcggcatctttggcggacacaagacgggcttcgaggcatttaatattctccttagccgaagcaagttgtcggtcctgttcggcgtcctgcttgcgtgctgcttcaaggtcagagcggagagacctattttcagcattcgccttcttcaaagtctccgccacaacgcgtctttcgtcttccttgtggcgaagatcttcttcggatttgcgaaggcgaaggcggtacccatccagtcgctctaaggcggacttcttggcacttaggtgcgcggcaaggccctggtaaaaaaaattacgtcagggaactggcgaaagagcaaaattcgacgcttaacaataaaaatcatacccgcacaaataggctttccacagccgcgcagctttcgctgaactcgttcagtttggtgaagagcccaaggccttcggttggggctatgacctggcacacaccgtccacgaacggagtgatctctggccgcgtggcgaagtcagcggggacaaaatgtggggcggtaagcgtcacgtccgaaacgctcgcttcaaccgccggggcctttccctctcgttgacgaacaggtgaaggaactgcatcaacccgttcgtccttagcaacatttgccccagcggccggggctgagacactcccacccgtcgccgcttcggcatcgctagcaggtggcggagacatgcgcctaccacgggaagctgcgcgccgtaaaaccggcgaagtaggagtcccgtcggacccctcgttgtccgaaaagccattgccgacctgcacaaccttccctttcttcttccttctagcggtcatcaccggtttcgcggctgtgctggagatcgccaagagggtgttcgccacgacaatatcttgcggccgtgtaggcgcaacatgagagcccgccctagatttcgcaggagtaggactggggtataaccatgagagccgtcatccttagaaccagcctccacatcttcctcttcctcctcatccccatcactttcgacggcaaccttcacgctgcggcgagttcgaacttggtcgcctttcacgaccgcacgcttgtgcttcttcgaagtgccaacttcatcatcaccggcccgagagggtttcgattggcttggaaattcgccggtataaacatggttcacccggccgtcggcttggcgctgtagcaagcgggcgaactcggccgtggttagagctctgatcatcttcgatgcctctatttcggcgtcttccaaagcccgcactgcgaaaagataggaacacaaccgtttagtctaaaaagcgcctccataaaggaaatatgcggcctagagcaaaaacaaaaatcttactttcaaccccggcagggagaacaaggcggggaagcccaagaacttcttcgccctcgatcacggaaacgtcccacacacgagcgagaggggaaatccgaagcagacaaaactcctcacaaaggtcccgggtgcttagccgccgggcaaccttacgaaggagtatgagccgggactcgagagtcccattgatttccatgtttggcttcgcgttgatggaaacggcagaacgctaaaaaaggagccagttcgcctgggcatcttctgcgaagtagggactgctgacgtagaaccatttctgcatccagttcctgtcccacttcgccatcgatgcaggtactagccaagcatctgaacgctccggccgcagcatgaaattcacacagccgaaaacggttttcctcggacccgccggcgtctgcacgtctttggtcgaggcgcatgcagtaaacagagcggcaaatagctcagcggtagggacgaacccacaggttcggcacatccaagcgaaaaccgccagcttcaggaacaccgacgggctaagctggggaagcctaacctcatacgtcgagagcatcgaaggcaagaagttgtcgcatgtgaggcgaagcccagcggcgaagaatgcgcgcgaagacaaccgttcgcccatccccaagcgagggaacaacggcttcgcccccgcatgatccttggccctccgtgagagaaccggatgataccagttcgcccaagtcggcctctttgacaagtgatttgccaaggaagcacgaccatccttcgccaaggttgccaggatcttcgccagttgacccggccttggtaggcttgcgaggagccatcgggctcgtagctcaggaaagaaagggaaagagccgataggctaggggcacgatgatggcgaaaagctaaaaagcaagagaatgaagagagcacgaagcgtgtcaaacggtaaaaaagggagaacgtggggggagtgaaaaaatagcaggccagcttgggggtatatataaccccgtcgcgagaccgttcgcctgccaaccaatcgagccctgacacgtgtccaaggacagacgaaacggtaaattcccattgggacggagccaaacagtaaaaagcccgattacggagaaggaaaagtccatggggcccattactattcatagtaataaaagagactaaatagcccccttcgacgctttgcaacggatgcgaagaggagattttctcaagaaatttttctaagcataaaaacaaaacaaactttactagcaggaacaatataggtttcggcaggagcaccgatcgaaagggggcgccacataccataccacatagtttgcacggtctcggccgaagctcctatcttactcttgctcgtgaggggcttgttggcgatatggcatgaggcccttcgaccaaacttgccgaatccagtaagaatttatgcccgaaacgtcaaggttagtcagggcgaagatccctccctccctagcgaagactaggaagcaaggatggcgagaggcagggaatcgtgcgggtacctcgccaagccagaggcctcctgggcgaaggatgtagggcgaagagtatatgccgaagggggacgacttcgccatagcaagattcggccccgggaggaccgtagaagccatcctggcccatcaagtctaagggctaattgggtcgacaatcgcctgacggcccgttaagggcccatgaaccacaattacactgtgtacccatgtaaatgtccctttcataagggcaaccatgtaaattcccttgtataaccaaaaccctagtagtaaaaacctgtaatggggctataaatagccccatagggccatgtaatagggggatcccaagaaaaattctcaatttaatacactttacttctttcccaactactgttgagtgaccacgtctttcgacgtatgcggttgtcgttttgacaacaaccggtttaaccgggttggatccaacctgtgaacaacctgagttcaagtaccaaactcgtttgtactcatatatgatttccacccctttttttctacttggctaagaactagcgcaatcgctaaaaagcgatcagtcgcgcgcctcccctcccgcacggcgcggccacgtggcacgcgcggagaggggggccgcagtggaatggcgcgggagcgccacgtgcacacgtttctccttttttctttcccttttttcctttcggtttttcttttcggtttttctggttttttttccctgatttggcgtttctctttttttttttctttcagtttttttctttttttctggttttttccctggtttctttcggttttaaacttatatgtatataaattttgttttcgtacgtatataaagtttgtatacatacgaatacaaagtttgtatatgtggtgtttttttgttttttttcttggttttcggttttttaaatatgtatgtatttacgtatacaaagtttgtatgcacgtatataaagtttgtatatgtggtgtttttttttcttggtttttggttttttcaatatgtatgtatttacgtatataaagtttttatacgcatatacaaacacaaagttcgtatacaacagtgtagtagtagtactagtagtatagtactagggcctgtttggtacagctccaactcctaaatttagctccaggagttgagtctggagtggagttgtggagctgactaaacccaactccacaactctagttcattttgtgagatagctccacccaactccactcccagttttggtggagctgaaactgtttggctgagcttcagcttcaggagggctggaggtgtgccaaacaggctcatagtaacagtgtagtcgtactactagtagtagtatatgagcagcagtagtagtagtaggtggtatatgagtagtagtagtaggtggtactagtagtatatatagtactgaccgtgcggacggcgggtgcccaatcgtccattagcagtccccaagatctagccctcaagacagaacccactagcaaaacgttttatacttaacctcaatttaccaatatttttgtaccgtgtaaggtattcccgtttggactcggatcgtcacagaacggaaagtctattttcgccttaaaagaaaagaaattgatgtctatttgggcctcaggatactgggcctacatggcccatatactaaaaacatccagcacgcggaaaaagtacactgaaggtccctcaacttgtcatcgagttacaaaatcgtcctccaaccacagaaccagatatccggcgtcccttaactaaccaaaaccagtcacaatagatccttcggtggttttaaccctggttttatcctacgtgacgactgagtcagcatgggacccacatgtcagaccgccacgtcatttctctccccacctcttctctccctttctcggttcctcctctctctcagtctaaatgcctgtaggccggtcggcgggagagaaggagggcggcaccacgacggcggctgctccgcccgcggagacgacgcggtggtcgtccctggcagccacgaccgcgagcctcgtggcgatcggcctcggcggcgccgcgctgctggtgtggtgggtgctcgcgttccacccggcgaacgcacgcctctggatggtgcctgcggggctcgtcctcctcggcacgcccatcctcgcatggctctccctttgcctgtacgccggcccgtgcactgccgtccgcgacgcgccggtgcacgtgtaggatcccccgcgcgagtctcgcgcgcgcgcattttttgctgcttccagctgctccatttcgggatcagatgtacatacatgttcagtgttcactgctaactagtcatactatacttctttctttgatttcttgctgattcatttcgggatcagatgcacctgcacatacatgttcactactattttgatttctttgtgaattcagctgcgagctgcagcgtgttgatgctagagggagagggacatgttgcattgatatggacatatggtatatatgacctggtgtacacagttgctttccaagattacttcctccgtgtgtgtgatatggtgaatgcgaacttggccacctcctgcgcgaagtgctccgcctcgtgcgccgctagcgccggcgggctccatgagccgcactcgaacctctccagcgacgccagccgtgacacgctgctccgccgcggccaccggtgtgtgacacgctgctccaccgctgcatcgccctcgtcgtcgtgcggcaccatggacctcccctcggcgcaggatgcgctacgtgccagcgcgggggcggcagcgcccggcgcggcgacgtagtgggcaagcgcgaccgagtgttgccgcgcgagggcgcgcatcgcctccatggctttggcggtgggctcttccctttcctcgtcaaggatgggaggctagcgctgacgaagttgggctgccggagtggcggcagcatcggcgacgaccgcaccaccacctccctgcgtgcaaataccggcgaggcggacgacgaggcgaacccccggcggcggcgaattgagagagagagagaggaggaagggagagaagaggggaaagagagaggatgtcgtatcgtcgccgccatgtcgcctgcctcctcctcctctcccgccttgcccagcggcctcctccccagccgcacgctgctcctcgccgcctgcgcgccgtccctcgccgtcgcccgccctgcagctccttcccccaccgccgccacgttgcccgccatcaccgccgccatgtcgcccgtcgccggccgccgacgccttcctcctcccgccggctaagtcagagaagggaaagtgagacgaggaagggagagaagagggggagagagagagagaggaggctgacgtgacagcacaacgctgactcagccgccacgtaagataaaaccgacgtaaaaactaccaaaggatttattgtgaccggttttagttagttaagggacgtcggatatctggttttacggttgggggacgattttgtaactcgatgacaagttgagggaccttcggtgtactttttcctccagcacgctgatgaaaattcataactgaacatccataattggacctcctgaccgtcctgggcttcagtctcgccttctgtccaccaccaatcaacaggcataaaggcctactcgtgtgagctgcagttaattttgaattctaaaacttaatttgaaggtttcattttgacgttctcttttttaaccttagattttgaattactgtacaaaaaagaataactctaaaattgccttttgttactttggtcaagtatcctccgtttacagcatataaaaaatgcatcccaagccggctgataaagtggcgccccacctggcgagcgaactaatcgaacatcacacccttcgctcgtagtagtagaaactacggaatacgtatcgatgcctgtcgtgttgaacgagctaattaattaaccaatggcacttaccgttattggaccgcgttgacatacgtacgtactcctacaggagtaatattgtagtgtgcgcccctgctaacttgtccttttcgttgttttgttactacggtcgggcttgccacgatcacgtgccggtgggataatgaccatgtgatagttaaaagttaatccatcaagtggtgaacgataattaataactgtatcgaatcatctccggtctaactaaacaataaattcccttaatttacttccgatagaaattaacatggtatttttgcctatggtctgaaaaagaatgatatgtactcccttaatatgttacatcgttgatattttagatacgtttgatcatttattttattcaaaatattttatacaattatctattgtgacttgatttgtagttagctattctttaaacatgacttaattttttctgtttataaaaataattaaataaaataaatgctgtcatatattagaaacggagatggtatttgttaaccgttaatctggacgaatacgtacactgtagttaagtgcaaaattacttgaacgggaatgagtaaactacgtgtgacaaggtattttaatttgcacagaggatgcaacggattccatgtaatttgcttaattacaatagaaacaacgcatttttgcaattgatctatatatatatatatatatatatatatatatatatatatatatgtgtgtgtgtgtgtgtgtgtgtgtgtgtgtgttaataagtatagccgtggatatccatgcccaacgtttgaccgtccgtcttatttgaaaaagttgtgaaaaaattaaaaatatttagtcacatataaagtactatccatgttttattatctaatagtaatagaaatactaatcataaaaaaagttcaaataagacgaacggtcaaacgttgaatgtgaatagtgcaaaactgcactaaaatctccccactaattttaggacggagggagtagactaaatgtgacgacgcagtacataggagacatcggacattctgatgctcatgatgtatacaatctgataagactaagtacaatgacacactacatactccatccgttccaaaaaaaaggcaaactgtgagttcccgtaccaacgtttgactgcccgtcttatataaatttttttataattagtattttcattgttgttatatgataaaacatgattaatactttatgcgtgacttatcattttaatttttttatcattttttcaaataagacgcacggccaaacgttggacacggtaaccaggatttgtcttttttagggacggagggagtaagaggcaacggcaatcccatgagacaacgtgcaatgacgcaatgcaatccgacgttaatctggttagttttaacaaggtactaccatattttaatgtatgacgccgttgactttttacccaacgtttgaccattcgtcttattcaaaaaattatgtaactattatttattttattgtgacttgattcattatcaaatattctttaagcatgacataaatatttttatatttgtacaaaattttttgaataaaacgaatggtcaaacgttggtcgaaaagttaacggtgtcatacattaaaatacggagggagtacaatctaatgagactgggtacaatggcacaatataatccattgaacgtgacaacagtaacccaatgagttctaataacaactcgcccatgcttgacaaggtaaaaggctactttcactctcaggggcggatccagcgtaggtgctgggaggactaggtctcctctaccctactggatcaccattcatagaaggagagagtataaaactcaggtgtatgcaggaaagcgtcacggtggacgcagggtttcgtgttgattcacaatacgcaaaaacgtgctgagtttacagatatatatgcatgcagatgtgttggttcggtgatcctaattacaagggattagagtcctatcctctatctatccgaaccaacatgtatccgtgcatatccatacagagaatgataagatatgataagatctaacactcctcctcagtcctaactctttctaggttaaaattgttcttgaacatctccatttgtcttactggtatagcttttgtaaaaccatctgcaacctgatctttagtagatatatatgcaatttcaagcaactttctagctaccctttctctcacaaaatgaaagtcaacttctatatgctttgtacgagcatgaaagattggattagcagaaagatacttagctccaagattatcacaccatagcttggctgctcgaggcgattctactcccagttcttgcaacaaaatctgtacccacataatttctgctgttgcattagccagagctttatactcagcttcagtactagaccttgatactgtagcttgttttctagcactccatgatacaagatttgggcctaaaaacactgcaaaacctcctgttgatcttctgtcatctggagatcctgcctaatctgcatctgaaaaaccactaacaagcagagagggattcctacagaacttaagacctgtatcaactgtatatttaacatatcttaagatcctttttacagctgcccaatgagttgtagttggagcatgtaagaactgacacaccttatttatcgaaaaagaaatatctggtcttgtcaaagttaaatactgtaaagcaccaactacactcttatactgagtagaatcctgaggtccaagcaatgttccctcatttactgataatttttctgaggttgacagaggagtactgaccggtttacactcatacataccaacccgtcgtagaagatccgatgcatacttctcttgactaagcatgagaccatccttcactttatggacctcgattcccaacaagtagtgcagatcaccaaggtccttaagagcaaagtccttgcttagttcctgcagaagtgttgaagttgcatctggtacagaactggccacaataatatcatcaacatatatcagaagaaatatagaaacctgtcctttcttatagaagaacagtgatgtgtctgcctttgaaggtacaaagcctaactcacttaacttagtacttaacctggagtaccaagctcgaggcgcctgtttaagtccataaagagctttatctaatttacagacatagttaggcatagacttcttttcataccctggtggttgcttcatatagacctcttcttctaggactccatgtaggaaggcatttttaacatccaattgtctaagactccaacctctagagacagcaagagacaaaactattctgatagtagcagctttaacaaccggactaaaagtatcctcataatcaatgccatacctttgcttgaatccttttgcaaccaaccgtgctttatacctgtctagactgccatctgctttccttttgaccttatacacccatttacaatctatgacatttcttcctttctgaggaggaaccaaatgccatgtcttgttttctatcagtgccatgtattcagcatccatggcctccttccagtgtttattattcactgcttcttccagactctgtggttcaccagaagaagtaaaatttagccatttaacagttccatcagtatataccttttctttcctgatcccgctttggagacgtgtttttggtctgatcggtgcaacagctgcttctggcatggcctgatcagtttgatcagactgatcagtagtcacatcatcatgcacgccagccgatgatgcaacagatggcgatgtggacgacgctgtttgtggggacgcttgcaccaggtgctcctcctggattggattgccatgctgctcagctgccgacgccgtcgcatcatctgtcacaggcgaagagtgctccggcgacgcatcatatgccacaccatgcacgtcgtcctgtgcaccaccatttgctgctgctgctgcattttcatctgctgctgctgctgcatttttttcaccgtttgctacaatttcttcaccgatttctgcattttcttcaccaaactgatcagtaacattaggcggataattaagcacatggttatctgtttctccccctaatgaaagaaagatgcggaaccaaggatggtgaaaggaaagatatttccgctctaaggcgtgcgccggcatttgagtggagttcggagaaaggaaaaatgctttcatcaaaggttacatccctggagacatagactctgcctgtggcaatttctagacacttgaaccctttatgtaggttactatagcctagaaaaacacatctcttggaacggaaagctaatttgtgtttattgtaaggccgaaggttgggccaaacagcacacccgaatattctcaatgctgtatagtttggtttttccttgaacaattgttctaaaggacatgcaaagttgataaccttgctaggagtgcggttaataaggtatgccgcagcaagaacagcttcgtcccaaaatttaattggcatagatgcatgtgctagtaatgtgagtgcaacctcaatgagatgtctatgttttcgttcagctgaaccattctgttggtgagcataaggacaggaaacatgatgagagatacctatcttagcaaagaaggtgttgagtttttgatactctccccccccccccaatctgtttgaacagcaagaattttgtgaccaaaaaatctctcaacaagagtttgaaactcctgaaacttttggaatacttccgacttatgcttaagaaggtaaacccaagtaaatttactataatcatcaataaaactgacataaaacttctttccaccaacagaaataggagcagggccccagacatcagaaaaaataagttctagaggttgacttgacacacttgaagacttaggatagggaagctgatgactcttgcccttttgacaggcatcacaaattgagtctttatttgctacggtagaacaaggtaaattattcttgctaagaactctagtgactatgggcacggctgggtgtcccaaacgactatgccatcgggagaaggaaggagttgtggcggcatggacttgcttggcaggtgatgtaggaagggagtagaggcgacggcggcatctccccttaagaatcgtgttcctcgtgactcgatcctttatcaaaaaataattggaatgaacctcaaggaaagcaaaattatccatagctaaacgatgagcagagataaggttctttttcgcttgaggaacatgtaaaatatttttgagatgtaattcacgagtaggggtatgaatgacagaatcaccaatgtgcttaatttccatacctgcaccgcttgcggtgtgaatcttgtctcctcccttgtacttctcccgaacatctaacttgtcgagttcgttggtgatgtggtcggttgcccctgtgtcgaggtaccaattggtgtcgatgccatatgcagctgctgcagccgcactcctttcatcagggacataggtctcatcgtacctatgccaacactctgcagcgacgtgccccctcttcaggcacacttggcagatggggcggtcattaccaccccgagtctgatttcctccagtgccgcgcccacgtcctggagcagcaggattgctgcgcccacgtgtgccacggccgccgccgcgaccacgctgaaaaacaccacggcagcgtgcggccgcgttcaccgaagcatgagcttgccgaagagcttgcctgttctcaaagttaagaagctgagagtacacttccgccattgtggtcgactcattgcgtgccacaatagcagatacaacaggttcaaaatcatcatctagcccattcagaacataagcgactaaatcttcctcatcaaggggtttccctgaactagcgatttcatttgctagtgctttcatcttgccacaatactcagatatactcatgttacctttctgggtattggtgagagtaagccggacgttgagcgaccgggctttggtttgtgcagtgaacatggcgcacacctgctgccatgcctgcgccgccgtggatgccgtcgccacttgggtgagaatgtctcttgacagcgtggagagaaggaagcctaggacctgttggtccgaggcaaaccactcctggtaggcggggttgacgatcttctccgtcgtcttgtcgctcgccgtcttctcgatctccatggatggagcggcggtggcgccggtgatgtggccatcaagacgggcgccgcgtatcgcggccagaacttgcgccgaccagagcgcatagtttcctttggtcagtttctttgaaacttgaacgccaaagagaggattggtggaggcagtgcttgacgaggaacctgccatcacgccggacttgcagatcacgccggactttgaggctctgataccatataaaactcaggtgtatgcaggaaagcgtcacggtggacgcagggtttcgtgttgattcacaatacgcaaaaacgtgctgagtttacagatatatatatgcatgcagatgtgttggttcggtgatcctaattacaagggattagagtcctatcctctatctatccgaaccaacatgcatccgtgcatatccatacagagaatgataagatatgataagatctaacagagagaagggaaaaaaaaggaggggaggggaggggaggggagggggggagtgaaggaggaagaaggagattagttcccatataatgttttttctggaactgtccctattcacatcaattgctcaactggctaggtgagcacttatctttttaaagtagctcactcttttagaactagcaaaggtgttattaaaagtttgcatgcatgtatctcatgggttgggattttaatattctcatagaaattattctctacataggtcttggatcacataataattaattccaccagttaagcctctaatcgttttagactgcacggacccccggccggactcgacgcgcgtgccaaagtgcgtactacggcgacacgttcgagctgttgagcaccgcgaggagatcgatcgattgatgctcctctccgaagtgaagtactgacgttgatatatcgatcactctcgatacatacgtatatgatcaccgcacacaaaactaaacgtgcgcgcgctagctcgatcgtttcagtgagtgtggtacgcgtactgtcaatcaattatgcatgcatggcgcgccgatcccacatccccgaaggccgtacgcaagtcggtacgtggtcaagttgcccacctgagatcaaatcgcatctcatcccatcgcatcccatcgcatggtgccctgctgccgaaggcaaagccatgcaacttcatcccaagcccccaccccccgcgcgcgcgcgcgtgcccgcgcacatttacctcgccaccgcgtctgatcgatctcgcgcgcgcggttgccggagaaatccggcgtgtgtgcgcgcacatgcatgcggtcgacgggcaggtaggattttccttggcgtgtgggaacaccgcgcactgtatcgtggcgcctgaacctactgagatgtggagaggcacatacgagagtattctgcagctcgattgctactccctcctactagtactagataggtataggcgctattagccaaagctagtggctgagaccgcgaggaggccggctgggctcgtgacttccgcgcgcgccaagctaaggccgtaagctaagctaggcgtcgtcgttggcatgtggaacccagccgaaccggagcctcaaattcccatggaagcatccacgaaccttctcatcgcacacctcgctcgatctcatatccccgaaagacagtatgtgtgatgcgtgctttggggcactttgggcttacgcgagggatcacgagctagtacagtggtccatcaccatcgatcacatgcgtggtggtcgtcacgctaaggtagtttgtagtgtaagactgccggtgccagttgacaagtatactcctatgtcaaccacaattgcatatcgtgccgtctttaggcaaatatcgaagttggatttatgctgatatgggagagaaaatgggcaaaaagatagctttataagtattgaccatcgtgcattatcgaagaaataagatgggagggacgacgatctttctctgcagatgttcgataaaattgaaatggtacatactgatatatgtctaaaactgaagggatgacgtgcacaggtcgaaaaatagtcttttttttacccggcgaaaaattcttgcctagatcgagaagatacaacaagctcatcattataaagcatatagtacatatcgatctcttcatgaattaattagtaatatttcaactaatagtctctgctattattttcatcaaaagaaatattatcctctgttatatgcatgtgtttattgtatttgtaattatatttgcacaatattaattggtgttatttgacaagcaagctgctgctacgcaacccgctgattaccatattgtttgtgctggctgcggcgcagccacaacccatgcagtcgaacaactccatcgctagcaagccttaaaaagatagcacatgctatgctatcctttattgtatgacatggcacatatatatgataaaacaaaaccaattaattaagcatggttaagcagctaactgtgacaacccgcaatgcatggtagctagactttttttttctttttaagtgacaccttactatttacagacgataattaagagaccgctactccctccatcttagaaaacccaactttcccagaagttgtttttttcctaggacggggtgaatacaaatctacaactgcacaatctatgttgaatgcaaaaccgacgatttgatatgtggatgcgtatagctatgaatctatatatttatatacatctggataattgcgtacaatcagttttgctcacctgcccgaggagacaaaaactataaaagtacgtatcaccattcaagggaggcaaaataattccaaaataaacagaaaaacggtggggttttggttgttatcagctgatgatttatccatagtctgactagctatctatagctatagtaactggaatacttaaaaaagctttcacgttgatcagaaaaatctgatgttggttagatatgttgtgttaccaaaaatccatagatcacataaaaatcagtgttaaataaaatatactgttgaaaatagcaaagactcattagtttcgttcctataatttagtaatttataaatttgaaatttataaatatgaagtttctttgtattcattttaaagtctcggcttagtttttcgttgtttagtctcaaattaaaaaatactaattattaagttgtagtaattgatatggactcatttttaatgaccacaaaatagttcctaaaacaactaatgtattcaaatacattaaaattttaattaataattaaattttcttatgttcacaatctggcacaccaacaatattgtccttgcaaaaataagatccaactctcacgagtttacgagtagtactgttaaacacatacatagtatacctataactacttttctttctttttttttttgggggggggggtacctagctagctacttttctcatgttcaacctggcacacacgaaagaaaagggcatatagtacatatatatctggccaatggataaatggataataccatacatccataaggcaattttaaggtaagcgatatgcgcgagtacaacgtgccactttgactagttgcagcagcttctgggctctagctgtggcaacgaaagagaaattcgtgatcaggagatccacaacgacgcaataaggtgcaacttgccccatgaattgtcgatttcacaacctcacagcgactttgcactgattcgttgcggacaagcattggactttccgtttcctgcgcctttctgaagtcttttagtttgagggggtacggggtggagaccccctttctcttgataggcataatgcacttttttgttggtggaaattgatgatgcccatagttgctcaggcacagagagatagagaagaaagaactcagctataggtaggatgacccagcccaattcagagaaaatctaatctagatgattgtgaaatgtatggtgcgaaaacactagccctattgacatgtaagttcatacatatcgggtgctagcttaggtctcagttagttcatttatattaattagcagcacaaataacaccgagtgacagcgattagatggataagatcatgcatgctctttatttagtgctttacatgattggaatggctgaaaaattgagagatctccgcgttcttttaacccacaataatatcaggtagtacactttctgctctcctgatgtcattaattagcaatttactaggtaacacgcgctagtgacagtgagtagtggctaatgtaatgtgtgcaccactaaagtgaacaagctaggcaaacagcgatttcctaattaattaatcagcacattcttcttggctcattttaatcacctgtcagcgcactagcaacggggtgaaatgcataagctaggccagaaagattgatgccctggcatggcctgttttgacttttaacttccctagatgaacaaaaagtctaaacaaagagatttgtctccaaatcttgcctacaacaatctccccctctttttctataaaggggcaggagacctacgcataatctacagcaatctcctgtggtatttgattagggctaatgcgatagctttcgtttcctttctttattactgttagagttgtatggcaaagatctgattcttatgctatggtataggattgtttgaaattgagtaatttgtgctgatcacctattcctaccaaagttttaatttaggcccatcttaaaagtattattttcactttgggctaagtaattctgacaaaagttgaagtttataccaagtaacctacatgtcatgcattgtgattaaccatatatgttactgtccatgtatcaattacatgtggaccacttggttcaaagcgcaacatttactaacaatacctaatcaaagtgaaaaaaaaacacgtcaaagataatccaaagtaaaactttgaaaaatatatagtaaaaaacgtaatttattcaaacatcatctctatgattatttgagatcagtcaaccagtcgaatatttgtgaaactctcaatacaattattttgtgtactattacagttgtctactctctccatccctaaatataagagattttggtttgatatgacacatcctagtacaacgtatctagacatctaaatctagatgagacaaatagtatttcttgatcgtcgaaaatatgtacaagcaccggtgattatagcaacagagcctacacaaccacctgactagctttggagttacctccttcattgtttatggtaccaatcgaccttcccttatgtagactctagacaccttaagttatattcgtaagtacgtttttcaaactattaaatgatacatttaattaagaaacttcaaataaatatatttaattatgaagttataattgttaatacataataattatgtactaatcacccacgtcgtgttattcgtggcatagttaagctaaacctagcatggtgctgagttattatctctactttcccaactaacttcactcgttttttgcacgtacgttttttaaactgctaaacgatgcattttttataaaaattttctatacaaaagttactttgaaaaatcatattaatctatttttcaaatttattttagctaatacttaattaatcatacactaaacactgtttcattttgcgtgctgggacacccgagacactgcattgctcaaaacgtttcgaaatggacgatgtcgtacatatatgcgtctccaaagtccaaacccaatcccatctctattcaagaaacagtaccacagtacagtacaatggtacgggtgctagtgctagtgctagactgcccctagccagccgctgcgcgtgcagaagcagaacagaacggacatgtgcagcttgcgacttccgtcgtcgacgaaacggacagacagagtgctagacgggcagtgtcccagtaggaactagaaaagcaaagccaaacccagggaaaaaggtagaggaaaaccctcggctcggtcggccgctctactgctactgggtgtgaagcctcgcaagcggaaaagcgcgcgcggcgagggagatcggcagcacgagcacgaggaggattgaaccgaactacgtctcgctctcgcgcgccgagtcgagtccgcccgcgttgacccgtccgaacccgcccttgacctgctgacgtgtgtggcgcgggcgctggcaccgccgccgcgtctcgttgctcgccagactgtctttaatttgccgggggccacaccgccccccgcggcggcggcggtgcatcgcgttgcgtcgcgtcgcgcggatcttctgctccgcccacgacgatctccgcatgctccgactgcgtctgcgtgtgctccctaaaccgcacgcaccgtgtgaattgtgatagtctgattagtgatttagatagctcgatcagtgagcatccaacttggcacttggtaatcttacaataataattctccttccagaatgaaaagaaaaaaaaatgaaggggtcattttatacgatttgcgaaaattgacttgctggtactgacacgtcaggctcaggccccacatgcctgaaattccacgtcgctggggccagtgacaatgtccacattggtactacgtggtacgtgattatgcgggaagaaatttccatgcaacgcttccatatttgtctgtcaacaattggctcgccgctcgctgtcttgtgcttgggagttcacagtgagcgtgagagcatgcaaaatgcaacacctactcatgccggcccggcgcctgcgttgagtgcaatcacgcatagcgcggttagtaccgtctagttacagcaacaatctactactcgctatacgtacctgcatgatcactggtcttttgtgaaaaaagaactccatgatcactgatcactagttaagcagtcaggaaagttctaatatgtactctccgttccaaaataattaacttttatacgcaaatttagacacagactatatctagattcatgtgtaaaagttgactttgtttttgatagagggagtacttacataaatattttcaaagaaattatatatacacatgttgatattttaataagggcatctttggagaaaactttaacaagtgtagctagacattttctcgctcccctgaatagtctagatatttcgacttctgagtagatagctacataatccattaaatgattggtgatctaaagttggccaacttatctaggttctcatcaattgtgtattcgctgagtgcttctcgcggaatccagctctccaaatttgagtaaatgaatgtctagatgacatgatttctcaatttaagtactactccttatatctctcaaaatataaggacttttgtcaattttatgaccaattaagcagtgagataaaagttcattatgtcccttattaaacaattaggaattggtggctgaatgttgggactaatccatcctggagtataaattaggggtttaaatctgattgcacatgttatataaattatatccaaatactactatatatatcactaagattgtaggacccaaggtataagttaattatttaagggcggggcttgttgaatttccaaagttcttttataagtaacataaatgatcagtccctaaacttgtgggggtggtgtcatttaggtccgtgaaattgaaaattatacatttagatccgtgaactttgtttaatttaccactcccggtccaatcgctctttgacacagctaactgcttaggtgacgtgccacgcaggcaatacttttgcgcttagacccctccgcatcacagtgcgccacatataccctctttagctacaatgacacccgaatccccctaaaaatatccccaaatccttcctccctctcattcctctccttgcacatacagaaaatgatgccctaattaataatcgtcattgttgtgcactccacaatggtcctcttcttgcacaacgagcactttatcaacggtaccttcttctggcgactataagacgaggacgagtttggagaagccatggggatggcaagtgtgcaagcggcactaccccgcctccccccactaattgatccacactgcgctacctcccgttgctaacctcgtcgtcaaaaccctagccgattcagagatatttgggaggttctgtttggaatgcactgataagggcaaattatgtaagaaaatatatacaaagggggataaagtgcaaaaatgttgtctacgtagcgcgtcatgctggcggtcagccgcggtcaaaaggcgattgaaccgagggtgatacactaaaccaatttcatggatctacacgcgtaatttttaagctcatggatctaagtgacaccactccacacgtttagggaccagtcatgtattttgacatgaagagagtaaaaaaacgatgcaaacaactttgaatttttcaaggttttgttagaaattaattcaattcccgccaaactcctctgaaaattctccattccaaagaactgcttagtcggcagatgaggcacacacttcgccatcaaaattgggttacagccatcattccgttgctggcccaatgataatcatttcccgttccgttttaccagttcaacaatcagcgactagtgtgcttcctttttcttttttggaccaattggcgtgctaattcagagatagatagagaaagagaggagaaaaatatcagcgaatcaacaccgagaaaaccttctcatggaagctgacagttcgcgagtggtgcttaggtcggcccagccacgacaatcgcgcgggggctcttttctcaggttttccacttttccttttccgcttcttaattaatacaagtgtgaaactacgaagaggaaaatgtggctagcttccatgatttattttaaaatattttggttcttttttaaacattttttaggtatacccttagaaaaaattattgtagtaatggatcacttctgacgctagtcaggttagtgccatggaagtggatcagtgatgaatctagaatgaaatttaagtatgtgctcatatttatgtaaattattttagcggcaaagtaaatatatatatgcctatcattttttaaactcaattaattaatacataaacaaaacaaagaaaataatgaattgtataataaaatcatgattcgaaactgttggtgtggtccatggccatgtcaatagtttaactgtatggccaaattactttattggtttttgaaacattaaaaataattcaaccaaaattgacaaattggtattctcaacgtttactaattggcacatcaggtacaatctcagaatctgctcatcaattatgtgataaggattaacaagctaacaagaaatttggttgattaatctcacaacttttaagttttcaccattctcattggctcttagtaatcagtattgcattcttgcttgcagtggctgataggttggagggcagatctggcccttaagccccaactatgaatccgcccgttgagagggccagggggggaggggggttgggttcgatataatgccgttggcggagccattggatctcggtgctaatgaggttggtacctaaaaatgattcatttgttaatacgttttttccctacaatctattcataaaaaggtttttaaaaagatcaagatgtaaacaattcacgctagctccccttttattcttttagagaacacacactctcgctctccattttcactcccttttaattcccttttccttatctgtgttttgaggtgatgcatgcaacgccgcttggctggctgggcccacagctcagtcgcatgcaagagtgtcgtagtgagcgtagtagcagcaagcagtagcagtagagctcactcgctcgccatgcgcgtgccgtgcggatggtttttagnnnnnnnnnnnnnnnnnnnnnnnngctcgacatccacttgggtttcagggctttcagagctgatcactcctgctctgctaatgctaacgttaatcgtcactctcacccctcccctcgtctcgtctaaattatctgaacctgacgaggtgatgagttgcgaaaacaacgtgtgtagtgtcacgcagaaggccacgcggatcatcacatctggggagagcgagccgtgtcgatcgatcgatccgatgtaacagcgcacgcgatcgatctgcaccgaattctcgcggtagaaaacatccgtgtcggcataaacaaatcgaagcgatctctcgcaaaacgctcgctcgcggtcgcgatcagcgtaatgataaccaagccagccactgcaacaaaaaacacagaaaaaaagggagaaggatcgagtgcgcgaggatcacaattagcggcgagaaatgggccggggatattgtgtactagtgtaccactcggctcgacactggagcatgcaaagtgtagtaattaatcaagacttgacgtcggagctttgcttttattaccggtttctagaagtgtacagtaatcctgtcaatcctacagagttcagctcgtacatacagtagtggcagtactgtatttactcaaaaagaatgagtaaaatttaacggacaaactttagtaacagcagcatcaacactagtataacggctacactttaacttctttttttttaccctaggaagtaaaaaaggagaaagaaacggaaaagaactggagttagaatagtctgggagctaggagtccaaaaatggcatcgtgaggcgattaatcttgttctaatcccccagatagcttctctccttcttctaatccgcttctccgctccgctacgcgtccccggcggttgtgcacccgcgggtgtcgcgcgcgcgcgcgctcgctcgccgcggcggattcccatggcggccgtgctgacttttcacacggcggcctgggtggggcaccacagctggtcgtcctccatgctcgtccagaagctatcgacgtcgaagccgccgatctcgaagtccgcgacggcgaggtcggggaaggtgaggccaggcagcgacgactcggacgtcgtccacgtctgcccgccctggcacggcggctgggccagctccagctccgtgtcgcgcatggccacgccgccggtggcgctggaggcgtcgcaggcggtggtgaaccactcggcgccgtcggcctgcgtgggccagctgggctgcgccccggcgccggagtccgtggacagcgacgacgacccggccgtggtgctcgacagctccggtgcaggcgtgccgcccgactgcgcgccgccggccgccgcgcagtactcggctggccagcagctggcatcgggcgccgggagctccggcgactcgtagagcccgtcggagccgccgtgctgccacgacaggggcggcgtgtcggtgccgccttcctgctgctgctgctgcccggcggcggcggcctggatgcgctcgacgaggcggggcatccagaggtagcgcatgacgtccttgaactgctggctgttgacgtcgcacttgagctgcttggcgtgcttctgcacccgcgtgcgccagtagttcttgatctcgttgtcggtgcgtcccgggaggtgctgcgcgatcttggaccagcggtttccccaccgcgagtgcagctccaggatgagcagctgctcctgcggcgtgatgttgcctcgccggaggtcggggcggaggtagttcagccaccggagccggcagctcttgcctgtgcgtttcagccctgcatgacaacaaccaaaaaccaagattaatttttctcttcacgtcacatcaaaatattcacatgtagtacaccattgctaaaacatagtatgcagcaactaatcaattatatactaatgcagttatacgcatacgacgacggcaggatggatgatgtaacgggggagggatgagcaactaaaaatatccctatgaacaatgctagctacgctgctaaccactaaaaattctctcccctttccctctcactcactatagcttctagcttagctggttggctgctagagaactcagggtagactcgtagctatctgtgtttccagaaatcagcatgtagatgcaagagcgactggtactttgcgtcctataattgctcatcaggctaagcatgtacggacactcagctcatggaattgatcgatgtgtgcgtgcatgtaatttatggtggaattgggagctcgatcgatcgagatcgcgatcctacctgctgatcgggcgagcgagttccagcggccctcgccgtgcgcggcgatgtagttgacgagcaggaggtcctcctccaccgtccacggcccgcgacgcaggtcgccgcccatcacctcctcctcgctgctcgcgtccctctcgtgcgccatgtccatcgtcgaccgatccggatcaaaatccctccctttcgagtctcgatcgatcctcgcgggccagtcgattgatcggatagatcaagctagtagctagatcgagctcaggagattctggttgttgtgctttggtagaggggtactatatatgcgccgttgctgtgctctctggatagatggatggatggatggatgtgtgctgcgatgaaactggcgggagacggggagggaggtgtcggggtttatatagacgggaggagcgcgaggaggaagaagaagaaagaagaaagaggcgggtaggctgggctggacgacttggaaagaaaggaccatgtgggggagaacgccgcaaccggggagattagtttacgccttttttgaagtttttttttcccttcttcttctttaaaagccaaaagtttaggcgattaacccccatcgtggttaattagggataatcatgcgattaggattaattaaccacgccgctaatttaatcgcccgcgtacgtacgtacacgggttggagagactcgggggacttttgcggtgggtttgacccgttgactcgtccagctgtacaggcgtacagctcactcgcgcgcgctacacgcgctcgcgccgtctgcctacgcgggcctctgccgctggggcccacctgggtccatttctgtcagccagttgggagctacctcagcttctagttccggtgggaaaagagatacggagtaactacgtataccttatagccatggaatacacaactgatgatggtacagatatactgccactagcgtatactactacttactactactagcagtattggagcatctgtggcaaatgggcacaataattgctgctgcacaaatcacaaatactagtacgtatactatcggtagtgtagtacaccggtacggacaagtagtggtattatcgcaaacatgcgtgtacacctctagtacagtgcgtctgtgcatcaccatggttctacactccagtcgtaggtggtagctggagtatattataaaatatcagggcatccacaatagttatctatagactctctataagatatccatatcagtatattttcctacttgaaagagattaaatgaagagagagagagtaaaactatctaataacttggagatagtctatagagaaaaacgaggtaatggatgagagagctatagatatccatgtagacatactattgggatgatttactattagtctagtctattgttgagatgtatatattttatagagagcaccttactttaccattgcgggtgctctcaggttatatatagggttcacataaccgcttgtgaaacttggaggtttcaaagatggatagagttgatgatccgcttagtaagccaacagaagttaataaaattaaaccaaaatttaaactatctgacaattttttgaatttatgtggttttgaaaggactccgtgtgcgaaagggcttgtagcctaatggttacaagagcctcagtagcacctgaggtcctgggttcgactctccatgagagcgaattttccaggattcaacagcgttgtgctttcagtggtaggcgatgtttgtaaacctggttataagtcctatcctatccgaggtgtttggagctagcacataaacttcagctgacaccataagaggtgtatgagattatgtactattttcagtcaagaatatttgatgttaacgttgttatattagtggcactactgtcaaattttatcgactaaataaattactatcttattaaaaatatcgtattaattggataaagaatttgttggattatagtgagtcatgattaaattaattgtgttacatacgtacatctctctaagagttatataccaaatcggattctacacttaaatttagcatagctcaatattgcacacaaaaacaagctacttacttcctccgtaaaaaaaaaagacaaaccatgaattcccgtgtcaacgtttgactgtccgtcttatatgaaatttttttataattagtattttcattgttgttagatgataaaacatgattaatactttatgtgtgacttatctttttaatttttttcatattttttccaaataagacggacggtcaaacgttagacatggaaaccagagtttgtctttttttttttttatgggacggagggattatgtgtgatgtctgaaagaagccagaaacttcagctgccaacccagtagatgagattgcttgtacatattgagcagcaaaattgacttgatcagtctcagaatttcgactattccaaccaggagatcattgttggtggccgaaacgttcggcaaatgttcatctcagagccaccgcctcttcgccgagctttccccgtatgagctccccaggtcccctctgcgccgcgccgccgccttatctatccatcaggaagaagaatatcccgaaagatcttcgcatgatttgcgacgatcgagacgaacaagatcgcctcacctctccagacgcgtgcagctgcagcaaaagcctagctggctggctatagccgctgcatgctacggctaaactgatcgatcgatatcgacagcgatctgtaattcccctgcacacacacacaacaccccctcacgcgtcaattaatacacatcgtccagacgacgttacgtacgtacatatacgcgtttgtcacactagggcggcagcaatgcatttccgctcgatcgatcgatcgatcgattcaactttcgcggtgcaacagtgtgaaaattgctgtacaacagcaggcagcagctaaagttgatatacacagcgccccccgctgcactgtttccaccgtacatcgcgcgcgcgaggaggaggatttttgacccattttgctcggattttagctccgacaaaccgatcgatcgattgacaccgcgagcgatgcgagaaccagcggttttttttgtcaagacgtggaagacaaactccacacatgcggtttgttttttcaaaacaagataattgaaaggtactagtaaatcggtacaagtgttctagtattaattgggcggagtcgtccttgactatttaggctgcgttcgttgtgatgagttatgggggattgggtgagaaaaggacatcgtattccgcgtgcacgcttcccaaactactaaacggtgtattttttgcaaaaattttctataggaaagttgctttaaaaaatcatattaatccatttttaaaatttaaaatagttaatactcaattaatcatgtgctaatggctcacctcgttttgcgtatcttcccaatcttctcaatccccctctcctcaaactcacccttagtactactagtatagagatgatgggagagtcaaccccaactggcaagagtcatattctctcattgatctgccggggtctgtgtgaaacaaatttaaaagtcccaagttgcagctttgtatacgcaggaaaaaaacggatgctgagaagaagagatcggtgtggtcggattccacaccggggttgaaaactttggcagcttgaattggattcttatgtgccgttttttcaacacatggaggtgctgtttttttaaatttattttccaactctctgtttctattttatcccctgttttttcaacacaaatcagtttcaggatggtacacttgctcacttgcttgagaatccggtttgttttttaagctttgacaggctgctgcagcggtagagtagtatagtattgtttttatttcgaacggtcagcagtatagtattgttggtttggattttgtccatgcacttggcgacttgtaaatttgtaattttaaacgagaaaccggaccaaatctgccaatcagatggcgtccacggtttgattcccctgccagcttggcctagtctgttttgtatttgcagagctatgctgattgctgtagttctagtagttgtagtagctcgcaaataaaggtcaaagtgtttgctgagttggactggcgtgctcgttgacccccaactacggccaaggcaaagccacttgtggttaatatattcataatatttctgttcttatgcgagaggtcgatcgatctaatctatgtcgatcactgtcttcatgtgacctgcagcaacgcatatgcgtacaacagttcgtgtccgtgatggtcagtacatcgaacattgctctcgttttggctcttcacgcacattctcatgtgcgtttttttttaaatgttggagtgtacaagtaaatactcgtcctatcttaaaataaaggaaaaaaagttcggataatcttctagaataatcgtggaagtatgaattatccttctcaatttttcatacaggacgaattacccctcctctcactctacagtggttttgattctacatggcacacacacacatagtagtccagtcaacataaaaataaaaaatggtgaggcccacttatcggttatgtcttttctctcgatcaccacatgtgggtcctaccttttttatattttcatattgactggactgctacgtgtcactattacaaaaacagtcaaataaggtgttggttgggaaccggctataggtgtcggttttccaaccgttacctattggccggcatctatgcgaatcatatagttgccggtttaaaggtgccggttctttattttttaaactgtgggaggtcggaaaaggttaataggcgtcggttttaaataaatcgacacctataaaccagtccctatgagggtttttgtagtagtgtgtgtcacgtagaatcaaaactgctctggagtttgttgaggattaatacatctggtataaaaaaaaattcgagagtaaagaatgatttttttaattgaggggggtaattcgtattgccacaatagttgaggggtaattcagaattttttaaaaatataagaatcaagatgtatagattcgtatataaaagttgatttttttccataacaaaggaagtagggcagtttagtagatacggtcaagttgtgtaatgcaacgagatttcaaactttttgttgcacggaattggactctaccttgaaattttctagtattccaaatatagacaaaatatccacactaccgaaccctatggatttattttactgtagcttatattggataatatacaacttttgggattgatattgtgatcatagtgagaaggcttgttgcttagggtaaaaaaaatatttaaaaaggatattacccaggtgtacagcataaccacttctgaccatgatttttccttccaagaacttctagatctgtagtacctccggttcctaaccaaaaaacaaacaaacaaatttgtagccacttgatcagagtttataaacaaatttgtaaccgcaaaattaattaatatcgatcacatcgtacttgccttgaactctcaatctaataattttctaaagttaaaatagtaataaccagcaaattataaactcaaagtggactcactattaataaacataaaatttaatatggtgtgaggtcttaattttattttatttcttaataaaatgatttctatattaaaaatattaaatataaaattgcacttggcttgagtcttgattttagtttaaatttggtaatttcaaaagtcagaatctattatatgaaattgtacatttcttggactataattttagtatgatagtaccaatttaattccaaaattcagtattaatgggcaaactgtaattgagatgattaaattattcttcttttattctaactgtatattttcgaaggtacaaaagccagcgacgaatccttaaccttactgaatccctgctaaatacgcaccctcatcaagtcatctgtgcattgtttgtaccaaccaggatttaatccatcttatataaatgaggtttgtcatgcatatgcatcctttataaatgatccaattaaaatggatgttcaaatttattttctgtttctccgatcaatatgtgattgtgctcgagatttccagttgatatacttcctccatccaactgtccatcttttattatgtatttttataatattttaaaagatgatatattaattaccaaagtgctttgcatgccacatataaccatccttacttttactggataaaaaaacaaatttatttcaactaaaaagatacgcggcgagatttttttagttgatcttatcaagtcgtttcctttcaactttcttttttgcagatgggaaaatgacgagtcgcctgagttgaggaggataagctgctgtggcagcctggcaggaggccggcatcacgtatacaggcacgaccacatgcagaggacaacagtggaacgttgattccgaccacccattttgatgacacgtggaaaatctgcatgcatggggactaataaaaaataaaataatgcatagatatgcactgggggcgatctcagccacaataatcttttcggtgcctaaattatgtaaaaccccccgtttttctcatcaatatcgtttcgcttttcggcgcccagtgcttctttatggactatggtacttgtgatcattgatcgaccactcgccgttagaagaatgttgatgaagtggaaatccggtccatttccccctttttatatatatcgtaatgttttatccactaatgcggcgcattccaacggaaattaaagaaaaaaaattcatagttaccattcttaatattaatctaagaattcatatccatgttggaattttatatcttctcctcatgctactgtagttgaaataaatattcaccgtttgatggttatatgtaggagatagtggtggtagctagctatggtaggagatgataattcatcattcaccattaccacttatctctcccttcgaaaatataatcatttttagatttcgacacggtcttcgagatactactttgaccaataatatgtatagaagtaaaatattttaaataaaaagagttgcatattatgataatttgtttaataataaatctagtaatatcaattttacatgatagatcttttctatttttttacttttaatagtcaaagttaaaaatatttgacttggcactatactaaaatacttatattttgggacggagagagtaagtcttttcaaggagtacaaatttttctagtttatgctttatcgtccatcaaatatttacagaagtggttaaaaaataatgtatatgtagcaatgataatcgaaattcctatctctcaacgctgataaagtgaaggatgatgtaatgtagggtgaaatttatttattttttcttttgtagaggtggggaggacaacgacgacatgggtgagctcgtgatctacctcttctcgaacgtggtatggtcgtgggaaggagaagataagacgataacgttactatttatgcacaaatcttgatgcagtttacaaaatcaagtgaaaatttgcggtatttttgggtgaaactagacagtaaaaaaaaaaaaacttatactgctacgcgctactacctacaggatgattccaagtttgtcgccccattttaatgatcaataacacacagtgagtccgctagtttcttagccttaaactaaggaaagtatcatgtatggcctgtcttttgtgcaacctatagctagctcgtgtgttccattggcaaggcgacagctccggtctcaaaagagccctccaaggacaaggagagccggccgcaatggcgatcgaatagtaccgtccattattgtagagtatacatgtactatctcctaaactactattgctacttccatagctgaagttaaagtgaagccacaattagtttttttttttcatggcaatcgtaacccacgttttcgaatcccagaactaaaaaaaaagtacaatataatctcgctgaaaaactaatcgtcgtggcctcatataaatcaggcacgattgcgtcggcgacgagtaaattaaaataaagagtgcagagacagagagagagagatgcatggctagctcgtgcttagctttttcgtcagtgttatgttgcagctagctataatatatatatatatatatatatatatatatatatatatatatatatatatatatatatatatatatatatagacatacacaagtatgtaacggctaatggcttagtgggagacacataagattagcagcgtgttgttagtggaaaagcgatcgagagctcatgcataattaattagtgacaaacgtgttaatgttcgatccaggaagcactagtttgtgggtcagtatttgtaggcttcaaagggctcaggggtacaaaagctgcaagtataataacctgtttcaggtagtttcggccgagcactttacgtgttccaatccaggaggcggctgcacatcatcgacaaagtcgtagtagaattaacctgggaagtgttctgttgatcagcttataatatagatcacatgcatatctctactggttttaattttgtcttaatatacgcatgacaagttattgccagttctggtgctagcaaaacagcatatatatatatatatatatatatatatatatatatatatatatatatatggtgaaatgttcgtttagaatctcaattcatgggcgttaactaggagatatggaacgaaaggaaccggagaactttccaacacaaggagttgccggcgctaactctgctagccaagataaaggaggaagcaaaaacatgggggttggcgggcgcaaaaaatctcgccgcctggttgacaatgtaactgcctatagttagggccacggccctaggttttttgttttctgtactttatccttgtttgtacagttttcgtctcctctattcaatgaaattgacggcctcgtcgattcgttcaaaaaaaaattcatgggtagatgctacaaattaaacaaaataaaatgcaacagatagtgtcccaaaaggggcactacatgtataggagccattttatatatagatgctgaaaataaggtgttaaaaaatgaaaagaaatccgggatgaaaggaacatccctaagcttaagaacaggctcaagaatatgtcccttaaagcaagcaccacttgtttgatatgcttagcatcaagtaggacaacaattttttttataaaaagtttctatgtaggcacatcatcttggctagctattccttccattttttttctcctactgatgtactgaaacaccaacaaattaaagttgctcatatccttttccaacccttttcctttttcttgtttttgttttcttgcttactccttgattcgagcattttatatcattgcattgaaactaaccaaccgcgtcctacgcgtctgcttgctagtatatgcaaaaaaaaaaaactttgatgaaatctagaagttgcgtttcaaattaagccacagagaacatattccaaactttacacacttctgctttaatgatgtggaaactaaataacaacttgagctctgttttggaccctgcctgagcatatataatcatctgtgtagaacttgacttcttaatgcaatgtgtcagtatcagcacagcatcagctaaaaaaattactaatcagaatgaagaataaaaacatggtgcactgacttttatgcttgcttgcctactcaatgctccatgaagccaacttttttaactattggtgtacaaagctgaagggaactttgcatttgcattgtacatactggtcctccttttcagcaccagtactcctaccactgttggttccaatggtaaagcaagcatataaactggtgcctcccatgatgactaagtttagataaaacatgaaaagctttttacaacatgtgattggatttgtctaaatactctggatgaagcatctgatctgaggatgttctgagggccgggactcctatttcggagttaaaaagcttccaggagagtacaataattggggattctgttttaaccttatcaacattaacatcaaaaagaaaagttttggaggtatacaaaatattatcattattttagctggtactaataatgtggatgatcttttaataaaaatttgtatgtaaaggtctacgaattgcggcagatttagaaagtatatgggacattcttatgctgcaagttagcaagtatgcgcaaaaaaaaaaggtagtatgattaaagaagcccaattgggacaaaactttgtgtcattaggctccatcaagaccgtacattacaatacttgtatatttgcatgaactacgatcgatatggcaacatatgcgtacatgcgaaaatatatttatagacgcaatgacaagtgtctgcacacaatagaatacttggattagaggagtggccactagcatagtgacaaaaagctttagaaagttcttccaaattaaataaatgttgtgtgaactattaattagtttacattatcatgtagatgagagcatacatattcaaaaactggcggaatgccatctacttatcattctgaaaataaaatgcaccaaaacgattttacatcattacggtgcaacggaattcttgcaagcatcattgctgaaagatcagcgagcaaatgcacggtaaatttctttattatgctatagctatatatgtgggattcccctaacctggtgaattaaaatggatcagagagccctcgtagccatatgccataggaaaaggatatcaccaagataaaggacacttatccacacgacatgaagctttcattcataatgatgattctggctgcaaatatatatgacaaattgcagccgttcgtgtatgacagtaaccaacgatatttgcatccttctccctccaattgcacatggatatgtatatttttaggagtcgacgtcgacgtaattagctcagcaaagactcctacatggtagtttttaccaacctactcgagatctcctatcatgagtcgccattaatctagctgatgatcatgactagctccctttgcattttaaaggatgctctctctcaaatctctctctgccaatgctaatggctgccacggcattaaccagcagttcagctgctacttagcacaccttttttcctccttatattactggctctatatatctgatcacacattcacaccaagtgttcgctaatggctagtgttatatggacatatggtccccctcctgccttaattatccattcttttcgagtgattaagcagcaactggaagtaagttaattaagctatataattgcgcaacgagaagagaagaggtctatgtgcgttctagaaccgcactattctcatggtgcgcgcgcgtgcgcgaggcggacagcgacgatcacgcgcgcgcgtcgaacgcgtgagcgcgcactgctcgctctcgccggtgtccggacccgccgggccgtctggccgccgcctccgcctccgccggcggcccgtatgaacgctccggcctttacatttatcgtgttgaacctgtcaaacttgcattcacgcctcccgcaaggcggcgaggcagtcgtagcaacctactgtcccgtcttaaaatagaagtatttttagcatagtgtcaaattaaatatttttaactattaatataaaaaactcaatcatgtaaaattggtgttactagatttgtcattgaacaaactatcataatatgtaactttttttaaaacatattacttttaataaatattattggttaaaatagcatctcgaagactgtgtcggagttaaaaatatttatattttgaggccccacatgtcagcctcctttaggtcgtctctttttatatcctatacgtgttggaaccggccggctacggatgcgatgcacgactgttccactagtataatctagcgtttgtattagtgcatagttaacggtggctagtgactaatgtactgtacagtacgtgtggtctgctaattgctcatcgctaagctagctcgaccctgacacgattatattgagccgaattagcgtctttgactcgaactgctttcttctacagttctgctgctacacgtatacgtactggtgctggctgccagtctgccacgatcggacgtacactacatttgttttatctgcaaaccattaaaaaatgcgtacaaagtcagtacaagtcgccagcttaattagtttagcttaaccgtagtttaatacttactccggccgtcacgtgccgacctgacgttagtagcttttggactggagatgggtcccacacgtttgactgacggacccgacccgggtcgagtcgatgcgtggcgtcagatttctttactccaagcgacctctggtcaaaatgctgagtagtattatccaaacgtgcaggataattaattagggtgtcaaaactaattgttccatgtttggaagcttttgcccatggcgacaaatggttagggctgcaaagagtgtgcaagtggggatcaagtgacgatcatgcattttggtacaggacaatgcctttgaccttctggggcgttaggtgccaactgatgatgatgcatcctgcaaaaaaaaaaagggagggggactttagtttgttcgatcgatcgtagtgtgccgaattatatttatttagggtttttaagttgtgttgatgtcaatgcaaggtggttacaaaaatgaggacttgttgggagcactcatttggcttctagaagagattttggtagggttagttggtgattttctgatcaaatttgtgcagaaaaggaattaaactgatcgatcgtccgatttaattagttttttttgtgaggattcaactagttagtttgaagcttgaaaatgttcacatctttcgaataaaagaaactagtctgagaattaattatttatgtttacacactgctatatattgatatatatcgacggcactgattaaatatgcagccacaaattttcctcaaaacaagtatgctgccacaagttaagtatatatacttccttttgaaacctcacaagttaatactaaatccactcagaacatgtagtgcttacccattactgatgttcctgtgaatgtatatgttgatctacagactggtcactgtaactgctgaagaaattagatgtactgggattgcatatatgccagccgagaagcgagaatgtattgatcacacgcagcatttcttttgtcaggtagggttacatatataaggctcattggttcgagttgctcaagagtaatgaagaatttttgtgtgtgccactataggacatatagtacatatgtaatatccggagataacaccatttctcttgtttaaactttgaataaaccaagcgtgcaatgaatatactactacagaagtcaaatagtgttgagtatgcaaagaaggatgccactagattgaactggtttgactcaaaacaaattttgttattttatttttacttaaggacaaaattgagtaggtgcatcagggagggagtactaaagttgtgtgatgtggacgaagtaaagtgtgtgcatgattctcccacttagattaaaatcttgtttgtcacagttacacacataaatgtagtatctttagaattttagtgagacctacggaaattatttttcggctccaatcttaagtgtgtgttaaaagtaacatattcatgcatatgctccgtgtgcattttttaatgtgatcgaaaaaaaaaaggtatagcagtttaaaaatatatagtccctccatttagactcatcactattatgatttgattttcttttctttcattgagggggacggagagagtaggggaaaaggtataaacattcttttttttagaactggtataaacattctagaatgttccttatcagcaagcaggtcctagaaaattatagtaccatattttctttggagaatatagttctgtgtttagttgtttaggaaaaaaaatttgacgtatacggacacatgtttaaagtattaagcgtagactaataacaaaataaattatagattgcacctgtaaactgcgagacgaatctattaagtctaactaatccgtcattagcaattatttactgtagcagcacattgtcaaattatggcataattaggctcaaaagatttgtgtcgcaatttacatgcaaactgtgtaattggtttttttattcacatttaatgcttcatatatgtatacgaatatttgatgtgacggaaaagttgaaactttaaagggaactaaacgctccagtactattggttgcaaactttgataaatttagtggtttagagagaaggctagaggagatcctttgactggagcatcgtcatcgtggtcaaactcgacaatgcatacaacaagctatagtaactgattagctagctactactatatatagtacgtactgataggcaatatcagaagttaacaagattatcatggagataagaactaagggattttctttgaccgcatataagtaaacagactgttgggatgcatttggaatgttggatcgatttccatacggttaccatgagaatttcaccccaaaaaaaatcggtttttgctatatatgtgtcgacaaattattttgccaaaatctattgaattttcagccaataatttggcgtggagattagtgtgtgtgactgattagcttggtagtattagtactggattttttttcttgctaactgctgcatgcagtttctcattgtcttagactgtgtttagttccacgctaaaattaaaagtttgaagaaattaaaacgataagacggaaaagttgaaagtctgtgtgtgtaggaaaattcgatgtgacggagaagtttgaaattcgaagaaaaaaagttgaaatctaagcatggccttagcgtaaatttattagactttgtatgtggatttgatcccgtacactcacatcacgtgcacacgcctctccccctaaattttaggtgtttttatgtatttacatgatacttgcatactaattacatatgcaattttgaaacttatatcgtaaatacactaaaattcaataagtaaattagtaacttacagtgtaaatatatcctgactattttcatgaaaaatatgccgtcataaatattggtagtcccaacaaaatctccaattcaaacagaaggttagttcaaagagtgtttttcggtccttgaggagattataccacattttatactaaaagtttttatctctctcaaagaccataaagttcctcatataggattgaatagggatttgagcattttctgtttcgatgatacatggagaaagattagcaaagtcgattaggaccacaaatttaacagtagaagatatgattcgttctttctaatacatgtaaaatacattaattattattttgtgatgagacgtttgtatattggttttgatatttggttagatttaatcgcgaagtgatgctctctggatgcggttggtcagatcggtttgtacactatagtcagatcggacaaatgacgtgaatagtgttttttgttttttcagtgaactagagtttggttgtgcgatcagaccgagctgagtgcgccggtcagaccggccacctgacggtctgactggctagcttctgattggaatcggttttgagttgtttctttgattctcaggattactttatgtttattacctctagataatttatgtatatatgttatactgttggtgtgctaatgttgagttaattaagttgaaaaagaacttgtgctcgagtatggtttctcatctatttatgtatagatgtattttaatgcctcgggagagtgttgcctgtgatggattaggagtcgacttagaaaaagttgatgtccgaatgataagaagattatacgagatgcttaggctaaagagaaaacgcatgattttgaaggttccatatggcatacaagagggattttgtgcatatgggatgagaagtcaaatttggaaggagtccaaattttgggaaattatagtttgtattgtaaaggaacaagttgtatactatttattcaagatggattatggcttttgtgtagccaccttagggtacaaatagaagagtggttaaaacctctcggtattgattttgagagagaatagttttgagaaaagtataaacttaacctacagttcgagtttagtcaaaaattgagaggggagtgtcgttggtgtactttgtaaacataattagaaacaataaagttgttatacttccaaagagttattcgatttgtatttttctttgtttcggcgatcaaactagcaaaggtacggtcgtcagaccggtgactacacgatggtcagaccgatgacacctgggcagttagatcagtgacatctggcaattacggctagaaggacaattgaccagagctacaccttcggtcaaacatcgacatcgacactattaggcccgacgtatacacatcggtcaaaccgatttccatctggtttaaatgtatcatttattttgtgaaaacatttgttttttttggtgttatgccattcaacctcatattccaaccctcttaatatttggggaatgctaggggacgtgataccgttccccaacaggatgctcctcctccgcaaacgcgattctcacccatgcgacgtggccgaagccatcaatgcgcgcccgtcccccaccgtcaccacgcccgtcccccaccgccgccgtcaacgtccctcgccgccgcgcccgtcccccgccgccgccatccccatcccctgccgccgccaccacacccgcacccaccgccgccgtcgccgtccctcgccaccgccgccgcgcccgtcccctgccgccgccgttgccgtcgccgtcctcatctacaggggacggctgcaggtggccggccgcgcgtcgggatgctcctcccccaacgggatgcacagttatatctactaggaatcacctgatacctcgtaagtatcatctgatacctcgtaagtatcacgcgatacatagtagaaattgtctgatacctaacatgatacctcgcgagtatcacgcgatacgtggtagaaatcgtctgataccttacaggtatcacatgatactttgcaagtatcacctgaaacgtgtgtagaatcgtctgatacctgataggtatcacacctgatacctactcgggatcatcccgttcgaaaacgggattccgttatataacaaccccctaatatatagtcatacttatactaattggacactctgagagagctgctacgttaattagaaatatttagccgttgatttgatcgaccatgtacgttgagagttgacggtaaataaatcacgcagttgaaaacataatggactttgatttaataattctgaaattcctatttaataaatgtgatattgcatccatcttacattctcaatttattgttatttatttatgctcaaattcaaaatcagtaattaacatattgtaattggtgtggactcttcatttaataagcatctatataatttcaaaaggtaaccaacatgtttatcataacattagaatttcaatatttataccaccattaataatatatagctcgtgtaacacttagagattggctactagtagtaatagtaaaaatggctaaaaatttgaagctgtacattatttttcctatatacgcggacctagcctgcgattatggaagagatcgaactgtcagtttaactgatgcaaattgcataaaggatgttaattgttatccctatttcagtattattaggaggccaatcatctcttatgctagtgcccaaggttaggctgaacaaatatttttcagaatccattaagagactgacttaaggaagcatcccatcagacacgccactagcgtcgtggatcgtatacgttccatgatgagtttactccgatattatccggccccgtacagagctagatcctccgaattaatcaaaagcacgtcatttgagatgtctaattgatcactgcattggaagacgacgaacgatcattgacaggcccttcaatgatcagccacacgagccactagctagcaaccgctagtgtcacccgatcgaacaagctaatgcgatatcttattatgggtattatacagttacggtcactaatcgagatattttggcttgcgctttacgaacagttgctcctgccggatacgcttggatcccttcaaatctatccttgctcgatcgactgaaacgcatcatattgcagaaatatctgaatccttacgaagtggcggcacagtaggacgacgggcaactgaacactaagctagctgctactactatatatgatcatcatcatcgatccgatcggtttgccggcactcatgcatgacaccatagtaaattcatttctcacaaacaagcagctattaagatgaatgaataccaatggcatcggtccatgcagatgagagacaagggacctatatctatcgatctatcagtgtactatctacctatctacctactaaaatggcgatcgagctgaagccactgatggatcgatcgatcgatacatatgatcaatccacattaagaagcagtgtgcgagaagaagtagaaaggggggaaggaacgaacaataatgcgtgcatgcagggagagaggaaagggaggcaatggtgcgtagcaccattgggcgcggctgcgtgtgcccggccgacgcaggcatcgccatggacagcgctgatccgagacggatccggccgcgcgcggacttagccatccgtcccactcggacaggacgcgcgcgcgcgtgtcgtgctcgccgctgtcgcgccacgcgctaggcgagtagcagctagctaggcgtgtgtggctataggccttttgtgccagagcgaggcgtgacggcttggggctccggcaccggctagctgggctgggcgctgggcatggccgcgtcgtggagcagtgcacttaggcgtcactcgcagcgctttccgggggcagaaaagtggcaggggcacctcgccctgtccatcgttcctgcccatatcttgctgcaccaccactaagccgtctccgtccatgatcacgcactgtgtcgtctcggagtcggatcatcatgcaagccgtgcctggagctgtcaaagactagctactgctatgttggatatagctaggcgagtagctagctagctagctgctagtatacgaactattggtctatggctataagccgtttaatttggacgcatgctcgtacgcacgcacgcaacgagaatggtggcgagcgatcatgcatcagtgcgcgggtgcacgcacccacgtacgcaagcaagcaagcacggcacggacgacgggcagggcaccgtgtcctcctccgttttgctcgtgtcactctcgtgcgccatgcactatagtgcgaggcgcgcgagcactaactagcagctggggtagtaacgcgcgcttggctagcgctaattaagctgccgggttcgctcgccgatcgatcgaatctttttggcgcggatcgcccacgacgaggcgagccaatccatctcgtcgatcgacgacgacgacccaacgtacactgaactttcgtcgcgcgcccgtgttgcgccgcgcggcgcggcgcggcgcccatcgatcgatcgtacgtacgcccgcagctctcacgatcaacgtacgatccggccgtgtggtggcccgtgcgcgcgcgcggtgcatggtggcgcgtggcgcgatcgagatcgtgcgtgctgatcgggaaagccacggattggttgctgcgcgcgcgcgcctcgcgctcgcgctggggacgactcaactcgatctcggacggaggtcaacgcgatcgggttagatagaaaggagcaacatggcggcattgttggtgctctcgacgtacgtgcttgctgtttcaatttgatcgtcatcgatctcatcacactagctcaccggaaatggtttgcagaatacggataccccggcccgtttttgcttcagattatgatagctaagtctagcaactaagtttaaaagaagcggttaaactcttttttgaggacgttcagaatttctatttctgtaccgagttcgcctgcatatatactcttgttaatgttttaaaatcctgatcagatcttatcataaacattaaatatctataaccgaaaagatgacatggcgtctacttgtttcctccgtcttgaaatataaagaattatacccttcaaatttatcgtataatataaaagattttataattttgagacaatactttataccttatcaaccattttttactagtttattccccactcactatcttttatactggtttattttttcatctatcattttttactactttattcttctaaccatcatatttattattttactattttctgaaattttataaaaaaatataaacccttatatctgtggacaggactggaggagaacggcactatatcaccgcatattgatacggccagaaataccgagagacgaattgaccggctgtccggcctcgatcgtggtgctcatctcggggcgaaatgtgttaccgtatattcgcgcatatatgtacgcctctgcacctgtactgatctgtacctgttagtgggggcagaaagccatggacgccttcgacggcgacccgtccatccgtcgggcccgggcctcgctgtctgtagcgtgcgctcgctgtttgacattcgagttcaaaagtgtgacacaaaattttcccccggaaagaaattcttgcaggtcgatcgacgactcgtacgtcggcgcctccctctcgacacgaacacgtactggtactggattagtactcctaattgtctaggtgcacgctgtgctgtacaattcggcagctggactgactcctgcgtccccaaatcctgcagcctttgcctttttgaactcctgatcgacgatctacttacgcagcaggcaagctagctagctagcattagcgtgcatgctgaaatggagagaggaaaaacaatactctctccgtttcaaaatgtttgataccgttgactttttagcacatgtcgttcgtcttattaaaaaaatttgtgaaatatgtaaaactatatgtgtacatgaaaacatatttaacaatgaaacaaatgatatgaaaaaaataaataattacttaaaatttttaataagacgaatggttaaacacatacttaaaaaatcaaaaaattaacggtgttaaacattttgaaacggagggagtataagattggtgagaagaaagtgatcaaatagcaactgaaaagtgtgtgcctttcttttttattgttttctgaggagtaaaaaagtctgcggctgattacttgcatagactgtatgacccgtatcgttctctgtatgcgtatgttgtgcaatgggacctaatccctcttcggttcctggatgatcaacgtactcaccgtttgtctaatgctaattatcgagcaggctatcatgcaggcaagcagagcagtggcctagctaagctaagctaaactatagctacactgtgcgtggtcaaactaaacaccagccaaagccaagccaattagccatcgctagtgagtagtgacccctggggatgcacagggccgagccaatagcttagctttgtgactgatcgacacggccaggcaagtacacacttgcacggcggctttgagctgacagctactacgatccacacgacgacattgccacgcacggagaaagccccgggccggcctcgtctctccgttgctgcctgcatgatctcgtcgccgtcgccgtcgatcggcctcatcttgcgcggcaagttgcaggcgagagaaggtggtacgtggcttatcctgaattccaacccccactcacgcacgggccggcggatgcgcgccggggggggggggggggggcggcggagacgtacgactgatcggtcgatcgacgacgcgtcggcgggcgacggacggaccgacgacgtgagagcgagcgtgcgtgaacagtaggtccacctgaagatgccattaccggggggaaagcacttgatcagaatcagagagctcaaaactggattgattaatctgcagtggagacaagggcttagaaaaaacgcgccttgggaaagtgactgacaccaccagcagcggctagctcatccatgcttgctgctactggattttttttttatgttttggttttttgaaaatttatttccctacgacaaaacttattttaaaaatggatcctgttttctcaacatcaaggtccaatatcttagcaccgataccctagctctctggatatctaagtcgctaatgtgatgggtgttggaaccgaggacttatttgtaaaaaaagttttcaaaaaggttcaaatgtaaatatttttatagtctctctgtactagcttttttacgtcgagaacctaattataataaaagtatttatgttttgaccattttaaaagatcattgtacaaataggttcacaacactaaagagattagtgttatcccctatatcttggctatagggggcgagggtgttgacaccagcgtcattggtgtcgaggcattggaccactggcgtcaaaaaaggattaatttctaaaataagtttctcatagggccgtatgtaaaataagttttaaaaaagagccaaaacataaaaagttcagcttgctgctatctgtttcagagtttggtagctctcctggtttggtttggttcaggacgcgtgattgagcgtaattgacacaatgacggtatgacacacaccgtacccaagttgatcaaaccggatagatcagtactactgagcatggaggcgaagacgtacgtcaaatcccttttttgagaaagcggatggttaagcagagttgacatgcattttctgtgtggctggccggcttgatagatagctatgctgctgctgtgaggagaagaaaaaacaatttgatgtttggtacgtgagagtgaaaatagtggatggcgctttcagtgaaacttgtcaggtttggcagcttgatatgtttgaacaaattaaagggcgagggtttgcacacacaagcaaacggtttttaagcggttttaaatagtttctgttcctgtgccatgaaaaggaagggtttatccaatgtcaacctgcgaagttacaaaagcgatcgagtttggttctctctttgctttaatttatggtcctctctttggtgaaacagcattgcccttttgtggacacctgggatgacaacgtgctgctgggattgtagccaactaaaacaagtctcctatccctttttcacctgtagggattaacaccagaccgtcttctacaaccaggcgtagcaggcaaacttggcttgtgttgatggcttccgtgaactacttgctgtttgaactttacacaggttacctacccgaaaactggtctacgttgcaaatctctccactgtttgctctccattttgagcagaaatagacgcctaatccagaaaaggctatagtgcaggaaatagagatgctgaactgaaagtccaactacaattgggcctttgggaggcctttctgcaagtgttggacaactttacaacagggaagcaacatccatttctttcagtaactttactttcatacacattgattgatacaagcacagatcgaagatgggaaatggttggaatacaataggtcttcttcatgccttttagatcgtgggaaaatgagttgatgagctaccatcacagctttctactcagacgtaatcttcctattgaagctattcatctgtggtttgcccttctcccgagccctcagaaggtgtgtctgatgataatggccctaagatgccctctgaactgagagttaatccactctgtgaagagatacagggagaaacaatttaattcagccaaatgttactgcagtggcttatgaataatgtcagataaatttcattttgcagcctcaataaaatgatgatggcagtacctcaggctggaatcttaacatatcagcacgagccattgcctctgcttgagctatcctctgcctgaatatctgagccatctcatcagcctgttttgagacagagaaaacagtatgtcagtttgtatacattccagatggaccagatcaaggaatattgctttcaaacttaccttctcaaaaacaagctttggattgcgaatcatgtcaccaggtgtcggctcaagctttttagtagaaagactaacacggcctctttcacggtcatggcttagaatcataacctaatagcatttaaaaaaaatactctggccttagctctataaactttagatagtatacttttctcaagtacgaatgcaaaaaataccttgagcgtatctcctggttgcagaactgtcgagatgtccgcaacacggtcatgactaatctggctgacatggagaaggccattgattccaccaatgtcgataaatgcaccataaggtttcaggctctcgacagttcccaagacaactgaaccaataccaagctgagcttgactatctgccattgccttgcggttactgaggacaagcctgccttgttcctcatcgacctccacaaacttcagaggtagttctttgtcaagcagttcttcagcagttgatttctgatcaaggtcaagaagtggtttgtaaaatagtgggcagctagtgtttacaatgtgattgagaactaagcattggaaactaggatcaaatgttcagttatctgcataacaactttgacctgcagatgaaaggcagctcatgccatgcacatgcacatacacctaaaaccataggatgcaagaaagttttgtagtaactaataagattgagaaccaaccgatgacacttgtgaaaatggaacaaatcccttaaggccctccacaagagctaccacacctcctttgtttccaccaattacctgcggggcaacattgccaaatgaacaagtcaggtaaccgcagactaatacattacagcaaattcatcccaataaaactaagcatacaatcatataagctcttgcaaaaggattttttgatatgttgttacaaagtgactggtctagacttcaggagttcattgctagttgcacaggaacaaaccaacaaaatcacaatagtccaataaaaacaaaaaatttctggtcattgtcgcatctatagacgatctcagtacctgatcagtaagctctaccaagtaaacagcagcacaaatatagaaattatgaaatcatgggttggatgtcataaagtatgtacaccataaattaccacttgaataatttcttttcattaaaggacaatggctgctgctgtgagggatagattcaaggacaaagcctgattgttagaaccgaaacggtgggcaagaagaagtagtgcttaacaaacatttggttacaagtttaacaacagcaagctattaaaggagtagtgaagaacaatagtaatagcacagaaatatttccttctgcaagtatttttactcactttacccgtgacaacaacatcttctgcttgaagctgtctgcacctttcccaggcaaggtcttgctgaattgcttgtaagctcaaaatcaaagtttcatcaccaggattctcgtcaataatcatgaactcttctaccaaacctgcacggatccctgcctcttctatatggttgacatcgagaaggcatgcctcatccaaaggcaagaaagcagtagacttcgattggatatcaacatatgcaccatttgaagtggtcatgaacactgttcctttaatctgtagagattgcaagaacatgatagtttttagatgttaaggatagagtaatacatcgtttcaaaaaaaaaggatagaataatacaatatatgagaaactatacaaaatttgcaatatgaacagtatcttataataccaacatagcacaaaatattgcagcaaagataacagtactgcatgcccaaaaggagatactaacagcagaatcattgctaacagagcaaaattctaaggatcaatgcaaatctggcagctggacaaaatgagtttttgtgtccatgtgcatttgtaacgtataagagatgtatagctgattattgagtataatattggttgataaatagtaagcaattcttatttaaatagacataaataattacagtcaagacaagcagcaatcggtcagtaactgaaatctcatcgagtttggggttaccatggtcagctagttactacagggaatggatcaatggatcaactccagcttactttaactatcatttaatgtgaatttggctttgttttttttttaaaaaaaaggagaaaataactatataaagaagaaaaacagaccccacctgtatgacatttcaaggacatttctatcttttgaaggggaaacccctttttgatggaaattacatgtacatgaacatcctacatgtgctttggaccttatgcatattcatgcttcaaagaaatatctatgccctgatggattggtgaccggtgtgaggccatgagggtgaggtaggcatatgtatgatgttcgtataacttggtacacgtgcggaagcaatcaaagagaggatgtagcaaacacaaataaaaaccacacgcttttggtagatcaaactcttgctccaagcctccaataaggtatcatccccaaggaggtaaaaaagggaattcgccgttcaagtctaattcaccagaattgaatcaaaagtcaagcttaatttaaagtacatcaaattaatatgaactactctagcttacactgaatacatagctatcgtataaatctccagcctatagaggaatatgatatggccatgtattgctcttatttgaagtatcagacctacatatatatttttttagtaaacattattgaaaaaacaactaaattatttagatgaagccacacaattgcgtgagttctagcgttcaactagtttcacaaaaggcaaaacataacaggtaagggctaatgaaactactattcctgattatcactatacctgctaccactatgagcaggtcagaaaatggaagaggtacttgtagtaaactgaacattctttcgcttgtaccttaggggagtaacacattatagacgaatcatgatgcgcagagcacattccaagcaagcaaacaatagaattctagttgggtaactttcagtaaccaatcaccttgttgttgatagcctaaaacaactagcaaaccgaaatgtaacaactagtgacatatacagggcaagtgactccaatctcccgcaagccgtatccaattgagcacaaggtaagactcaagtgacttgcaggaaaacgaggcatcacctactgaaagttaagcctgtttttaagcaccaattgctactatctgtttcacatcatacgagcgagcaaggacgattgagaagaacaggaggaaggttgcggggggtggattacgagtgagccgatatcggtgtcgatgtcggtggactcgacggcggagtcgaggtcctcgggcgagaaggagacgccctccatgggcgcggtgcggcagcgctcggaggcctcgtcgaacagctggcacatccgctcccgctcccgctcctccttggtgagcgcgtacgtcccgcacaccagcgccgacggccgcgtgggcgccgcggggcggcgccgcggcgcgccggagagcggcgggctcgccagccccgcgacgtgctgcgccagggacgccattcgcgctctcggcctacccgctgtggtgtgttgtggttgtggtgtggtgcttcggggcgacgagacgaggcgacggcagcttttcgggttgagggagggtggctgtgttatccggtggccgtgggggtttagccgtttaggataggcgatgggtggttttgggccagcccaggtaagaattccctcgcaaactgtgtgtgttagtattccgtctcggttaattcagctattaatgaggaaaggaccggtctagggtgtgttaggataatagaaaatagaagtaggattgagattagaaaataaacgaagggttaggattaaatagaaaagagggaatgaatggttagaacttaacgatgtcttttagtaggtgaaaaattatttcctattcctattagccaaacactgcctagggagtgacggattcggattaatagaatttgcgcatggccacttaataataacgagaggaaactactgatcaagtggtttcatcgaggatagttataactctaatatattgtaatcatatgaattaagaaaaagcgattatcagtgtttcaaggatgtaggcttcgactagacgccgttcataaatatcatgcttagtgtcttttatgctatatcataaagtagtcgatgaacagtacgaagtatatattcaactgttgtgacggtgtatggacggatgttttatcagtaacaacagaaaaaaaattgcattggtagtatataaactttttcaatgggtgttatctagtgcataaacttgcgaaacgcttgttttggtacacaatatttcttatgcgtgcaaacaaaggttaaaaggacacaaatggcggaatgggtgatcttactgatttaagtgttaattaggatgctatgtaataaacatataggtgagaaggatttgtttttttaataatggattttcattaatccggcctatgtatccacaaaggatacacagccaaaaagatacaagaggacttagactcacgccttaaaaagaggagagcacaaaaccaaaagaaaaacaaacgacctcggcacatcattgcttcctggcattctatcctgaaacatcgagattcggcaagtggaattcgtctagtcaccgccgcccttagtgcttcatcgtggcgagcctccaatgatgccatctccaagcgcttcaaatgagttgatgccacacgtcgccggtttagcccaccttcatccgtcgatgttcagcaagaactagccgaccaaacatgagctaacaagatccacttccactcgcttcgtggattcctagacctttgccgcccctagagccgctgtcatcttcaggatcttcttgcccctcctggactcctagctcaccaccgcccctagggccgtcagctccgccagagtcctctgcagtcacagtcgaggaaatcctctttcacccgaattcccaggcatctgccgctcctaggtccgccgccgccgaggggatccgccttctcctcaccttgaaccttgcaccagcactcaagccaccgccgtctcgggccgcctctgcccctagggttgccactgccgccactagagaagtcttccgccggacttataagccattgctgctagtcaccgctgcgaacaagaccaccttcaccaaatcctgccatgtccttgccaaggatacgccgacgatgcttaggccgccgccatcctctgcccgaagggatgccgccgacgacacctagtcgctacccgccgccctcccaaccacctccactgctgacactaggtcgcgcagctagacgtgggcttggtcgccaccgcaacgcctctgcctctcccagctttcggccgcctcctacgccgccaaaacaagggcgagaaccctagccccaacgcccccccccccccccccctccattcaatagggagccaggcccccgccgaggaagccccgccgcctccttcctcgcggcctgctcgggcaacgacaaggcactggagaagacgaaaggtcgggagtggagggcttcggatggagaagacgaagggtcgggagccatataggtgagaaggatgtcacgtaaacatatatatactagataataccccacgcgttgcagcgggatatttgaataactttcagtgattagtacatttgcatggaagttgtaagttatatatagtcttccagaaacactacatactgaaaagagaacgcaagtaatgattattgaagaactgatttagctaaggaacactcttgttaaccgctcatggtaatgaaaatgcgatgtgaaatactatgatagaagtacttgatcacatatgggtataacatgcaaagagccatagcatatacatttcgttacttatagggatagtagcttcagttgtgctatgtaaaagtccaaccgtttctacgttgactactgaagctagctaagagcaggtatagactattagctagctataaacatattttaataagataaacgataagagagaagagcatacgggctacagatctgtagccagctgcagcacggactcccaaacacgatgtgtgtatgacatgtgggaccatatattaatagtatagtaagcggctattatatgaattggctattagattgattataaatgaattggagccggtagtgacctatactattaaacttgctctaattagttttctccaccaatcaatgcatcatgattgaggatagaaaaaattgaacatcgattaacttgtttgtagctactggccaagtgagtgtgttccattttccatttaatagtctactctgttcacagcaacaatgagcatgcatgcgaacaaaacgaaatctgcattttcagtacaacacaaatgtcaatgcaggtaatactcgaaagaatgaattaattgtgttatgcacagaaaaaacaggaagctgaaccttgaaattctagattttatatattcctaggatgagtggaagaccccagtgcttttacgaacttagaaatcagctttctgtgattccggcaacaaatgcactgggggcttagaaaccaaacaaaagtaatgtatatgaggtacgaagtacctgcgaggttaaaagatgaactacctggaacaaccattttaattcttcgttttcagttgctccgttctataacagcttagcaacgaatcttcagatgaagtctgggtttctatttgcaacaacctttgattggaactaattaaaatgataatacgcccagaaattaagatatgctaccatgatttattaggcaccatccaaagaaaaacaatagggaggattaaaaatgggcaagtgaaatatttttcaatacacgaaatagatcaaaaccctatagagcataaacagaacataaatacagatacatcacatgatagagttcccacatagtgaggcacatagtaaatcttgcccatggagtcagaatagcacggagaaaaggcatgagctgaaacaataaaacttaaggccaatttaagcactaatatcgagcaagataaatcggtggaaccttgttttgtttccaatgacttccaaatcggacttgctggaataatgggcaaggagttcacttgcaaggtgaaagaactggtcaatgtagttgccatgagacagcgagaatgcccgatattgctttgttcagactttagagggtcttgtatagaattaaggtgagaaatgaacagactcaataagatggaaagccagtagaagataagtcggtcattacaaaggagaaagaacgtcaaggaagtgaaggaactgctgaggaggaggtcgaacgacaatggcagcaggaatctcaggggacaacatgcagatggaaggaaaactgatctgacggctctccttttgaaagtgacgtggtgcaccaggaagcaggaaaataacttagtggggatgaattgtataggtatatataggatatgtttaatacaaggtataataagacatgtgaatatgtgattgcacaaagaaagaaagaaaaataattgagtacgatgcaagggtggaaaaaagatgggtaaagcaaaagcaagtttacaaatatagcatatctcatacccacttcaggtgtgcaattcacgtcaaatacgtccagattaataaaattggtcttgccatgtcattttggttttagttcacacacgtcaaataaatctgtgtataaaaatgtatgttttataagtttattcactaagtcacacctattagataaatttatacaccaccaatacctattagaactataatataatgtcattattgtttttcctagcaaccaaagtctgcgattcagagaacaataatagaatactattatgtacatacttctatcgtcttttggttggttgaaggatgaataataccaaatatctttttttggttgaaggatgaattatatcaaatattgccgtaatgttagtacgggtatattactagttttgttaaggtgctcacgatctgttgtccaagtaaagatcgttgttgtatttgatctgcttcggaatataacgctgcagtccaacaaggcaacacattcctggcacggccggcccaaattggtgcagcccaataagccctcgcgtccggccctactcgaggcagcgtgttcttggacttaatccgaagtattgccagcccaactcagatttgtggacttgatccaaagttttgccctctcaagcagtggtgccctcggcctcggcgagccccgaaatcgatttctccttgcacgcgcggcaatactgcgaaagtgcgaatagttcagatcgttattaacttaccacgaaatcacaatcatggtctggaaccacgaaaagaatgtccgagtttacctcgcgacccgcgttgcgataaagatcaaggaaaaacttccgtgagcccatccaaatttccgatctgccgcggacgtcgatggatcgctccgtcattgttgccgcttgtaaggtgacacgtcccgatccccagacagacggacgcgcctacgtagtagtagtacgaggcgaccgaccacaaactccggggccttacatcggtcgccacgaagcacacggccacgtcgccgtgagagcaaaaaatcgcgccggccatacggggtcacagctagcatctccccgtggagtcgtacgtggcggcacgtacgtaccggcgggactcccccgcccccgcgcggccgacacgggctcgccattcgccgagtgctgccagccaagcaggcggtgctgcgcgtacgcgtacagtaccggtacacgtcgcctcggcccggtcgcgagctcacgattcggcgcgactcgagacgaggccatgacgccatgtacgtacgccccgtcgcctcgtagtcgtagcacggtagcagcgagcggccccggcacgagagagatcgtcaggttcagtggatcaccgaccaaccgccaacgggatatttcgcgcggatgaaccgttgcccgccgcgaatttcggtcacggatttgttggggttcggttgcaatttgcaagcacggtaatgcactcgtggtgaccgcctatgaccttttggtccccgttactgaaaatctgaaggtaagtattatcgtatgataatctaattaagtattattatgcttatttattatgttatataggagtacttgcctatgtcaaatacacaaataaaattgtctaaaaatgtgaactttatttcttaaaaagtataaattagcagagtgaatgcagctcaattggttaatttccttatagtgaaaccaaccaatccaagtaaatcgtagaattgatatggtgctcttatttatggtaaattattcttttaatgttagattataaagttacatcaacaacaaggcacctatgcgtcagcctaatattttggaggtcttagcaagaatatgatattggggaaatatcatgtgaaaatgaattaagtgtttaaaactcgtgaaaattatacctaaaatttttgtaaattcatgaaaaaaaattactagagatatgtgtagatatgaaatatattctcaccaaataacaagtcatcaacttcatttgagaggaaaagaaaaaaaagaaaaaattcaggtgaatagtaacatttagccaattttcaccacatatgtcctctatggtattataagcccacctcggtattagaagcccacctcttggttgtcatcgttcgatcacttccttttccactaagtgattgcttagggaccttagcgtacgatctgtgctgtttccctcatgatcaaattagactagtttcatttcgtggattcaaacatgagggagtatattgtatccactttggtccaatgagttctaggcttccaactgaggcctcacattggctcatttcaaagtaagttgagaccacctgattcttacctagataatatttagagcatgtttggtcaatcctcgtgagggagatattagaaggaatttatttcacacctattggggtgtaaaattattctctcgatcccctctaatcctcttcaatctcctccaaaccgaacaagatcttatctaacttaaaacattctcaattggacttttacaaattcaactagataaaataatatgtttttctttccaattggaaaaatgagggaggtggtacactattagtattatgttacatttgaatcttaaggtcacacttgacttagatggtggtcaattggttatggttgaaaatgagcttgtaataattatttgaaagtacaaatgaatgaccgttaggagattgggaaataaacatattataattcctcagacaactaagtaaacctctcaaaacttggtttatttgaacaagagagatgtatttgtgcgctttgtttctttctgttaatttgagtagaaactttgaaagtttgaagtcacaagtcaaaagtttttttagttttatttgagagttttagactttgaattgaaaggtttactgtataagtttcttaagttctagttggatgttttagatttttaattg

SEQ ID NO: 9333 - DNA, 79405 bp, Oryza sativa
gtagaagtcgaatttgaacttgcatgtttgtgaagtgatatattacatattaacctatcttgtattttttttaaagttttcataactatttagatgacatgcaagaaaagggtaaacgtccacccgagtgtttaaaacagttccccggcctcgtcctccttggccaaacatgaaaagagaccgtgcgattaatgaaacaaccctgatttgggcgttgttacgtggaggcagtgagacgctagagatcagttcgaattgagaaagaggagacgacgagatcgagtcggaaaagcatgggacgggacagacaggaaaggacgaggcgaagctgacggatcaacgtgcacgcctgaaaggaccttgatgtcgcctagaggggggggtgaatagtcggttttaaaaataaatgcggaagctaaaacaaaatagggtcggattgtctgatatcaggtcggatagtcctatgtgatcagatagtctgaactgagatcagactatctgacctgcacaacaacaatacaaacaagagaacaacctaagagatctagattcaatccacaagcaaagaggagagctcgaccaacaacaatattagcatagcacaaagcaatggaacaagaaggtaaagagagtgaggatatcaccgaggtttatccgccgatgtatttcccggagttcaaatccttgaggggattctagtctccgttgaggggctcgcaaagagccggatctttttcaaccctatcctcgtgaggttgcacaaatgcactcctccttccactaagggtatctctttccttgcggaggcaagatccggccttcacaaacttctcttggccaaccacacgtagatcggtggcccaagaacgacacctagccgtctaggagtcctcaacctccaagagtaataaacaccacacaactcttggacaaatcctagtgctcaagattaagagaaacacacactaggctcccaaactccaaattcacacacaaagatccaagtcataaagaacaagggggatttgagatagagagggagagagctcaaaaatccaaagcacttagcacaaagctcaacccaaagcaagataggaatgtaatcagtttgggcagccctagaaaagggttggtggggggtttatatagatccccaaaatgtgaccgttggaggggaatctttcagcccacgtcggatagtccgatacgagatcggatagtccgatattttaaacctccaaggcaacgagaaatagagaatgaagttccatgaaatttcggactttccgagacatcggactatctgatgttaaatcggagtatgtgatattttagaagcaaaaacttcgtcctcaaacagagactcaagttctatgaaatttcggagtctctgtatcatcggactatctgatccaacatcggatactccgacacttagaaaaactcactcgaaaggatttttcaaacaaagacagagagtgaagttctgtgaaaaatcggatagtctgatgttgctcaagtaaaaatgcaataactttttactccgaactccgatttcgaagatcttggactctatggaaagctagtttcatgggctatcaaacccaacataaaacatggtccaaaacctttaagagattatgaaaaacttgcaaagaaacccggtgtaagtgttgtgataagtgaaacaactcggaattgaaattttggcttagtttttcaactcacacaaagatgaagcattttgagcactagtgttcaaccaattatatgcatgtggtatccctcttaatagtacggcatcctaaactcaaatttaaaaagcaaagttaaaccaataggagtaccttcacaccatattgtttcttcacttggagggttaccaacgtcaaggtcaattgattatcgggaagatctcatcttcttgatctttgacatttcatctttcatttctcaaatgattgatgcggataatccatggcttcaaatggcctcgcacggttcatcacgacacagtcttcactcacccttcaccaccggtttcggttcgtcggccccaagccccttgcttgcccttcaccaccgcatggtccatcgcagctgagcgtcacttgcgcttcaccgtcttgccataggtagtcacttcatacccgcatcttcaatattttctctttaattctcatccatctataagtccatttcctagcttcttcatcggactaatcatttgcttatacactcaataagcgcattagtcccttaatcgcttgtcatcaattaaccaaaacccactaagggcatagatgctctttcaatctccccctttttggtgattaatgacaacacgattaaagcttacaaaagattgataataaatgattttgaatccaaaggttagtttgagctcccctaaatgtgtgcatacaagtttatgaagtgaacacacatgcacatatttttgaaaatgtgagagctccccctaactctttgcatccgtggggtgtattgtgtgtgaaggagataccaaaattaaaacaacacacacaactcaaattcttggcaccaattcaaaatgtatcaaatgaaattattgatgccaattgcaaaaacttgattctatgccaattgattccggtaccgattgagaaagcatgagtaatcaagttttgtagacaatttcaagtatcaaaagataatcttaattgcatgtggcatggtgatcaaataataagcattcacaccaattgataaacactttcaaatattctctccccctttctcatttactctttggcatctttaaagcattcattttgataatttctcacaaatatctcaccctttgatcaatattttctttatcccctttagtatacttctccccctttgacatctaacaccaaaaagggcataagtagggaaagaaaagcaaagggatccttgatgagggatcatcgagtacttacctctcaattttatatttcatcacttgtgattaggaaatgaagcaatttcacataaagatcacaagaaaatcaataagcattgagatacaaattttgcgcatagaaagctcacatgcaaagggtttaaagcatagatgaaaaagaatctcacctaagattttcacaaaacatttcacaaatgagtttcgcatgtatgaatctcatagtttgtgctaagaccaaaaattcacataaacattgattcacttagaacaactttgtgattaatactcgcttaatgactaaacaagcatgtcgtcacaacattttgcaaattaggctaattagcaagaaatgaaacttggcctagatgcccagacaaggcaagtgatccaatcataccaatttaaataacaagctatggatcatcaagttaccttccttgtcgatttttgagatgcccattcaataaaattgatatcttgaacccaatttgaatttggcaccttgatgggcttgatgaaatctcttccttgatttgcttgattccaatcccgagaaagaacttaagcttttccatcatgaacatgtttaactccttgatcacagtctacgtcctgatagtgcttgtgctcttcttgtaaggccatgacccgatccggtttagcatttgcaccatcttccttctaatagtccaaatacaacaagagagagtaacattcacaaatttgcagattgagaatgaatagctactccctttttgtatatcatcgaggatattgtggagatgatctcgttgaatgatgtggtgaattcttggatggtacaccgatgggacttgagcttgtatggtgtaactttgctcttgagttgcccttggtatcaatcccatccatttgtgccggaaacatgtcttcatgttcttcatagacaattgcggtaggttgacttgagttgattgaggttgatcaagtagtccaccttggtcatcatggacttattgtggtctcaccttccaaactatcttcgaagatgtttttgatctcctatgagactaatcacaaaaatacacttgataacaagttagtctcaaaaacacaaaacataggatatactccccctaaatgtgtgcttcaaagtatttgaattacttgtagaaatgcatgtgtttaatgaaaaacaaatggggagtgtagcctatattttggagaaaggcacatcttcccggagtctccggggtatgtacccagagcctccgggctcgaatgcatggtgatagatgagcttgattgcaaaccgagcggtcttaccgaagcctttggttccactataaaatctgcaataaatcttgtagataggtcatagaacattgcatatttttcattttgggagttttacccaattctcaaacaattagaagccacaaaaaaacacaaaaatttagaaaactgaaagtttcaggattttcagaatttggaactcaaaaagagcttggaaagggcatcataaaaatattcaaatgactatagaaaaatccaagtaaatttagatgtgaagtccaaccatagaggaacaaaagtcattatataaactcattccagtttgcaacctattttgagatgtaaaaatcacaaatcagtcaaaaaccatgaattttctgaaaatttcagcaacttgagcaaggtgagaaaaagtcaaattctttccaatttaaatcgaaaccttgcagaaatgatcttttcacttaatagaaaattttccaaaaagaatttctcaaaaaagatttttctttcaagagaaatgtcaaagagagttttgtaggccattcaagtcaataaatctcaaccaaagtgtcaaatcacatccaaataagatttttatgaagtttgacatttggaaagccttagatgggttagagatactaattcatgccattattcacaaagaattttggctcaaattgttcaacccaccatatgcaagttttggccaaatatggtcaaatcaagatttttgatgaactttgtaaggctgcaacattagaatggttggtcttttacaaaagctttgaactaaagatatgtttgaaatgaccaaccctaaaagttttaaataggcaactttttcaaaaactcaatagatttagatttgaggtaaaatctcacttttagcaaaaacaagattgcaagtaggcggttttaaaaataaatgcggaagctaaaacaaaacagggtcggattgtctgatatcaggtcggatagtcctatgtgatcagatagtctaaactgagatcagactatctgacctgcacaacaacaatacaaacaagagaacaacctaagagatctagattcaatccacaagcaaagaggagagctcgaccaacaacaatattagcatagcacaaagcaatggaacaagaaggtaaagaaagtgaggatatcaccgaggtttatgctccgatgtatttcccggagttcaaatccttgaggggattctagtctccgttgaggggctcgcaaagagccgggtctttttcaaccctatcctcgtgaggttgcacaaatgcactcctccttccactaagggtatctctttccttgcggaggtgagatccggccttcacaaacttctcttggccaaccacacgtagatcggtggcccaagaacgacacctagccgtctaggagttctcaacctccaagagtaataaacaccacacaactcttggacaaatcctagtgctcaagattaagagaaacacatactaggctcccaaactccaaattcacacacaaagatccaagtcacaaagaacaagggagatttgagatagagagggagagagctcaaaaatccaaagcacttagcacaaagctcaacgctcttaatagtacggcttcctaaactcaaatttaaaaagcaaagttaaaccaataggagtaccttcacatcatattgtttcttcacttggagggttaccaacgtcaaggccatttgatcatcgggaagatctcatcttcttgatctttgacatttcatcttctatttctcaaatgattgatgcggataatccatggcttcaaatggcctcgcacggttcatcacgacacagtcttcactcgcccttcaccaccggtttcggttcatcggccccaagccccttgcttgcccttcaccaccgcatggtccatcgcagctgagcgtcacttgcgcttcaccgtcttgccataggtagtcacttcatacccgcatcttcaatatcttctctttaattctcatccatctataagtacatttcctagcttcttcatcggactaatcatttgcttatacactcaataagcgcattagtcccttaatcgcttgtcatcaatttaccaaaacccactaagggcatagatgctctttcaatgcctatcgaccggccgaacctacgaaacaccaaactcctgaatcctgatccaatctggacacacaatgactgacgaaaaactacggcaaaaacatcttaaacttttataatagtagagataagtccattttacaccctctaagtctttagtttgtctaaaacacacctcacaactttaaaaccggacatctgacccctacaacttttaataccgtgcaaaaaaccacctggtgtggttttctacactgtttttgtgcactaggatgccacctgtatagattagctagccccacatgtcagtccggttctccttctttctcctccccactctctccccccttcggcatgcgcgcatggattatccctctgcctagcgaggaccgccgcacacccatcgacaagctcgctgcgacggtcctatctcatcccttgcggagctgcaaattcgccgcctgcaaacaccgtcctccaatgcccattccaccaccgtggaggataacagccgcaaccaaatcgagctccaacacacaatgacttaatcctgatccaatctgaacacacaatgactgatgaaaaactacggcaaaaacatcttaaacttttataatagtagagataagtctattttacaccctctaagtctttagtttgtctaaaacacacctcacaattttaaaaccggacatctgaccccctacaacttttaataccgtgcaaaagaccacctggtgtggttttctacactgtttttgtgcactaggatgccacctgtatagattagctagccccacatgtcagtccggttctccttctccctcctccccatactctctctccccttcggcatgcgcgcatggcttatccctctgcctagcgaggaccgccacacacccatcgacaaactcgctgcgacggtacagagctgcagattcgccgcctgcaaacaccgtcctctaatgcccattccaccgccacagaggatgacagccgcaaccaaatcgagctccagcacctacggcggtggtggtggaggcggcaatgggggcggcgttctccagcgaaggcagaggcgcagggacgaagtagctccgagtggagaggtggagctcgccgaagatacatgcgcggggatgagctcgagcgccatgaccaccgcgagtttggcgcacccatccgctgagcttggcggaagcaagctcaagctttactcaatgagcagcgggctcgcctccatcagactgtggtcggtgcgaccggcgtctacgagctagctctgtcatcgttggccgcctagctcctcctctgcgagctccgttctgttgccgcagaccggtccgttctctggctcagtcgagtactacccctgctcctgctcgtgcttgtgctaatccgtcgtctcctgctcagaggcgtggaggccgaagagctttagccttgggattgacatgctaatgactgcaaagatgggcagctagcagcacaaagtactagcttgccgagattagtaaggcagcgtttgtttggagtacattgagggagaaagcaccccgttttcggcacgcacgcttcctaaactactaaacggtgcgtttttaaaaaaaatttctataggaaagttgctttaaaaaatcatattaatccatttttaaaatttaaaatatttaatactcaattaatcatgagctaatgactcacctcgttttgcgtatcttcccaatctcctcaatccccctctccttaaacacaccctaatagtagtatgagtagttgtgatagacaggagaggaaataatttaaaaatatacgtttttttccgtggaatttgcatgaaaatgctgaatataagacgatttacaaaagagtactgttacacgtactaaaattttcttacaaaacttttactaataaatttctcaaccgtttgatttaactagatgaaagttgtaagaaatctagatttactcatagcttgacaaatcagagtttgtaaacattttgtaagaaaaatttagtacgtatagacttttcctttataaaaatataccactgtcgcggtttggtttagcgagaacgcggcgtcgcacgggggatgtgcgagaacgagagcggtatcgctgtttagataagcgaggacgaagtgccggcggtctcgcggcttggagtaacgagagcgtcagcactctcgcagtatgcgttagcgagtgcgatggggccagcgttgctaccagtttcgcggcgccgaaacgtgagagcggcggcggtctcgcgcctgggaagtgcgagagcgagcgggtgccgcgggcctatgaaagcaacgacgggacgcgcgttctcgcacgaaggtaatgcgaaagcgccgcgcagtctcgcgcggtgggaatgcgatagcgccacgcggcggtctcgcggaatgggaatgcgatagtgcacagcacaggctcgcccctgcgccgaacacgagcgatgtgacagcgctgtcgcttgtctgatttgcgagaccgcgcttcgctttccaaattagccagacggaatcagtaatgtactgattattaagttaattacaattttatatttgcatgaattaacaacatgtgataataacatttgttttaaggctcgttagtaaatatatatgagaaaccttctgtatatgtactagaaatataactaccattatttaaacttttcatttgttagacacaacattggccatctatataaaataaaaaatcacatgagctacaaattaattgtaacttacaattagtacaaattaattgtaactttaatttaattttttttaccatataaattaattatgtctatctaatttttaaacccgaaccgactctaacccatataacagaaactacctctgttattattatcctacttaataataatatactatacattattaatattttatatttattaatttcatattttatatttgttgtttgccctaaggaccatgtagctttgcttcacggaagaggccgttgtcttgttcaaaatataaaatttaccggtctcgcaattctaacaagcgatcgagatcgctggctccacgcgcgttgttgcattgctaatgtgcgaaaccgtgccggactaagcaccaaccagaaaatcaccatgggacccactccacagtggctctcgtgctacgaaagcgcggtgccgaggccgctctcgcgcttcaggcatgcgagaccatgggtctcacgcacatctctcgcgcgccagtaatgccacaccacgggccccacaacgctactcctctcgcgcattgaaaaagcgataccgatcccggtctcgcgagggcaatcagcgagaccgttgggtccattcctgctctctctcccaaatcgcaagaccggattaggtcatctctacgtggtgctctcgctcaagggaaaagcgatactgcatcggtatcgcttacccaataagcgataccggagctgacgtcacgctttcgcttattgatattgtgataccgtgtcggtatctctcaatcctcttgcgaacctcggtatcgcgctttcctcccgcgatttcaatagtatatttgtgtaagtcgaccaacatctggtatatttatgaaaaaaatatttatgaacagtatattttcaaatttttttcagacaggagaagcatacacacaggtcacaagagacaggtcgaggtctatatcgtgcttgtgtcggagcagcttcttccctgctccctgcttagccatatatgcgggtcgtgcgcggcttccgccgatgaccgcgcgcagcggcttggatatgctactttcctgcgacaccttctccgccgacgaccgcagctgcttgtcggagatacgcggcactgaccgctcaaccctgccttcgcagtgcctctaccgccgccgctcctgaaaattaaggtcaaaacaaccaagcaatatgggcttgccccatataatcatatgcgctgacgtggcgaagggttgatgtggcatccaacgtatcatccacgtgtgcaaaaaccatcataaacagcccaagggggtcaaatatcaaatattgacagttcagagggtgtattatacccggtttcgtagttcaggggtatattttagacaagttaaaagttcgagggtgtaaaatggactttccccaattttatatactaaaactttatatctggttctaattcgaatcaagtgattttacatataatagtttcataaagtttctacttgtaggtttatatgtataaagtttcggcttgtaaagtttacagtatatacattgagtttgggttcataaacttaaaaatgaaaaagaaaccacgcaaatgcaaaaatggaaaacgagtgcttcgtaggggttaggcgcacgaacatccacgcgttaaacctacccgttattagctacacaaacgacattcatcaacggatccacggaaacgtatcttttgaagggcttgtgcgtgtacgcccgcgtggacaccctcctacttcaattttcatgtgcatgatgtctgatttatagataaagctttatacataaaaattagggcatttacaaatctgccactatttttttttaattttacaaggatgctacttaaatgaaagttatagtgatatttttgcaatttcgtagtggtcgtattatgataacgatttaaattagtggcaaatttacaattgccccccaaaaatacatgtataaagtttctacatataaagttgttgaaagcatgtcacgagggccttcgaccgaggctgccgaaaccagatgggcttgggtgaaacgccagctgagaagactaaggttttcgcctcgaacgtcttcgccactgaaccaaagaagttataaggcttaaaatggcctttcgccacttgagggcccatagtgaagcccattaaggggcccaaggcaaaatagatattagacactagttaccctcataaatgttcatgtacacattaactctaggactaggatgcatgagcttctactaagactataaataaccccctaggggcatgaaatggaggatcccaataattttcatcattaatacatattgttgtcgaaacgacaaccgcatacgtcgaaagacgtggttactcaacagtggttggaaaacagtaaagtgtattaaattaagaatttttctcgggatccccctattacatggccctagggggctatttatagccccattacagattcccactactagggtttaggttatacaggggaatttacatggttacccttatgatagggacattatgaagggcacattgtgtcctttacacacacacgggcccctactgggcctaaacagctcggcctatctatcttgcgaaatcccccgagggcatagcggcccgccaagtctcccgttaacgggttttggtgctatggcgaaacctgtgcccgtgtgccgaggctttcgccacatcatcttcgctcgttccgccttctgtcgagaactccacttgacgaaggtggtgttacccacaatcacggctttcgcccatatggcttcgctcttgtcctttggtgtgagcctgatacttgaacttttcggtttcggcaggttcggccgaaggccttccatggcaagcctccaacacatatgctttacttttccactgtgtgaaccacgtccttcgacatgagcagttgtaattcgacaacaaagttcatatgaataattgagatgtgtataaacttgataaaaaaaatcatgtggatgcaaataaggaaaacgagtgttcaacagaccaaacgcgtgaacattcacgtgttagacccagggtttacgattccgagatggctttccgttttaggctctagtggaatgacggttttcgcgaaatctggtggagagccgataaattccgaacaaatttcataaaccaaaatttaaatataaattccctgattttaccgataagctcacaaaaaccggtcggctttgacaaaattctgagcgaaatcatcaaaatttcaatcggtaactagaaaaagaggtaaactgaaattgttttccttttttaattcattattcttttctttcctattgtaaatttcagtaaatacacgaaatacattaatttttttcaaaaatttatatcccaataggttctatgaatatcatactatttattagtttttttatttttttttcttttttatcaattcaaatttgaatttggatgaaacttatcgaaatctcaaacggcttttattttcgagccttgtcgaaacctttaaatttcgcagaattcgactggttttcgtcagagttgtgaaccctacttagacatacctgttagtaggggtgaaaacggtacagaaacggacggaaaccatctttatcgttttcgttttcatattttattcggaatcggaatcggaaaccccggatacgaaaatggaatcgaatattatcgaaactgaaaacggagcgaaaacaaaccggcgcgaatacggtaacgaaaatttatcggaataaaaactccctcaaactgataaatccaattgaataaattatgtatgtttaaaagagtaatgttgttgataaatccccatgtaggacaaaaaaatattcttatgtaattttagtttgcataacaaatatttttttaaaaaaaatagccaaacaccatggtattcactattcagtgcttaaaaaaagaatccagggtatttctttcacaaaatttctggtaattccgagaaaatttccgaccgattccgagttccgacagaaactgcccttatcatttccgattccgtttccgagaaaatatttccgaatttatttccgtttccgaaaaaattccgaccgacatattccgttttcgaaaaataggttcgaatccggaaagtttccgtaccgttttcacccctacctgttagatgttgcataatcgaaagctacggatggatccataggctaagccagaatcatttcaagtatctcacactctcacgcgcgtgcatgatctagacgcgcgaacgcccgtccgttaaacccactcaccgccatgtgcggcatatgcctgagtgcgaagcatagtcgcatgacgacctacagggctacaactcccagtcccagcactttgccgagaaaaaaaagaaaagacccaaaccgcccatgaccccgcgtctccgccacatcgtgacaccggacaccggtgctatgcaccacgagagcacgagaagagacgcgcgggtacaactacattccacacgcgactactagctaatagcaaagcagcagtaagtaacacgttacaccggcatccccccaggccccaacccgtcaaagcataagcccacacagcgggagaaacactcggcggcgaccggccgtcgcggcctcgccgggaagagcaggttaattagcggccgctcgatcgacgatatggggggcagcctggtgtccatgctgcggtggccgccggacctcggcgtgccgagcctggcggcgctgctgccgtcgtcggcggccggccactacgcgggcgcgccggccctccgcgggtggcactggcagcactggtggccggagcggctcggctcggcggtgcggcggtggccggagctcgtgcaggacttttcccccgtcgtggacgccgtgctctggggcctcgtcaccgccatcgagtccgtcgcgctcttctccatggtgtgctgcttcttcctcttctgcggctgcacgctatgatcggtgccactcccccaccatatagggcgcgcgtacgtacgtacgtatgcataattgtatatgatcgcttcctagctctgctctgaatctcccaactgtttttgattgattttttttttcagatgattctccattttgttgtcggttattcactgtgttcatgcttcatggcaaattaatttagatgccgctaattgtattgtactggtgcttagtgcgtagatttgttactggattttgcttgtctgatgtatgtgcagagcagtgaggcagaagaacagcaagcaccattgatagttttgggtgatgaaatgtttggggagagggattgagtgagattcggttggactagttggtgcgggtgcgcggtcggaacgggggtgagtccaaccctcgaaatatcttatgattttcttaatcgtggcgagtccatgaaactactatttcctacctgattatactcgtcataaaaatataacaaaataacttcgaccactatattttttattataatatataaaaatattaataactgtattaaaatatcaataactgtattatgattttatggaagtaatttttaatcatcatattttataaatattttagatgttatttatagtcaaagtttttaaagtttaacaatagtctgatatgacaaatattattaactgaggaatatataaaattctttttttactcccttgtctcatataagtgcacttactcactccgtcacttaagaaaactaacctaccggaagtaacacatatttttagattaatagtatcataacatgtcacatccaattatatatttgttatttaagattgaaggaatattataggatatgattgaattgttcagatttatagtacacacgtagtactagggtattggaagtttggaactgaaggtgtagttaataccagtaggcagtagctgttgtagacagtgcactgatgagtcgctgattgcatgtcacgtttcggtgttgtcgttctgtcctaggacctcgtgaagcgccactgttgcagtcaggaccatttacaggttaaaaccatgatccgatgactgaccaaaatccggcttcattcctactaacacggcccttttgttcagagagctgtgatgctttcggacgtcgcataacacggcctggcttcaacaggcaatttggcggcatcaacgtgtgtataactgtatatgctcataaaagattatctacgctttgaaatttatttcgactgttaccgtagagtgttcgaatgaaatggtgtctttctgaagctaatgagcgaaccgccacaatttaagatgacaaattttactataggaaatcgtcggttttagctaaactcgtcggacgaagcgtcgccttcctctgctgcccacgcgctgcttcccatcgacggcgatgacccccatggcaccaacggacgggatagagagagaaaagagatgaaagaactgacatgtggatccagggggtaattttaagagtaattttaatatttcaagtgatttttcgctcctctccaaccagaaattattattttaataggtgcgatgtccactgtcaaattaccacgtttatagagtatttactcctaaaagtcactttgtgttgtgttttacaattaaaatcgtgaagtaacgatatactgtagaaaaatttaccatttgagatagcttcgacacttgatgtgtcgagtatccccgcaagattacataattctcttttattactagtattttataaacagactcctaatatcttctctggataacgaaatcctttttattaagtaggtattttaaacagcctcctaatatcttctgtggatatctgctgctcgcaatggcaacgtttattaatgagattgagggcatgtttactttgatgaaaaaaaccttattaaattttagtaattttggcataattgcctgccaaaattttggcaatttgacagcaaactaaatatatccacttttttaataaatttatcaaaatttgataatgttgaaaatgacattaaaatgaaaaggcctgagtaagcgagagctcaacaactgaacagcagacagacgttagcccccattgccccacgtgtagcagcaccaaagcgcgccagtagagagtcgccccggctctcgtccacacaatgatacaaacaaaactaaaaacgacccgtccgctcgacacctcgtgctgcgcggacgaaaaacaacggagcccgtcggtcccggtcagccatcttattttgagcggctgacgcgtgggtcctacagtttgtgatctttatatacgaataacccacgttagagggcagtagtacatgagaacagataaactcatatcccctttaattcaaagaaaatttataggaattcagaggattttattcttatagaaaattttccaacatagccctttgaatcgaagtaatgaaccctatgaaatcgtatggaattcctatggaatgccacttctatacgagttttgaaggaaatttaacgtgaggtaggacctcatgaaaataatcccttgagtttttatctcttctcaaattcttatggtttttcctacatccaaatcaaacggtcattcctatatttttgtgttacaataatttgttttacacttgcatttatgttagaatcctatttttttatttctctttttttattcctgtgatttaaagggttgagaatattatgttagaatcctatttttttttatttttttttcctgtgattcgaagggttcttattattctcaggtgggagagtgtgacgtggtcgctcttgtctctcacgtgccaggattgtaagctgcagcgccggagccggagcttaacgccatttggttggttggtccggtcgcgagaagaatttaccgcgcgcggtgttccgtccgtgccgtgcaccacgaatccgttctcagcgagggtcggataaggacgagcatcccgggcttccttctttctttgagcgtctacggttaaaactcctctactcgaagggtcactgtcgcctgttattgccttgcaaacgtaaccacgtttttcggacgaatcaaaactcagcagaatatgatatgcggtctcaatttcgtagcctgctcgatgcaaaggcgaatgctgcattaatgaagactgtagcaaggccacttgcgattgaaaaagacaggcgagcaagatttatcctgcttctgattttattccgaaacacgcatggcacaaattccacggatgcattttgcgtgcatccaaaagcctttcaatcagcacagctgaattagcgtaaccggaagttgttaaaggtcaggacacaattcggtgttcaccctcagctttgaagattttcgcccgttattcttcctgtcctggtaaaaaatttggggggattaccgagttccggaacgggtgctcactcgatcttaaatccagattttagatcaaccacctcttcgatatttctagccaaaaattctgcctctccgatataagaatgtggtgttagcttcagaagcgacgatcgtgccgcctctggcaagtctagatcttcaatgaattgccgtatgctgtccttggtgacagcctgccctctggtcatttccttcagcttctcataaggttcagggattccataccttcgcatcacctacaaagatgatataataatgtatgatatgcatctgagcttgaaagacgacagacaaatgatgatgaatacagttgatgtatctggtgaaaatgccaataggtgaaattacccccaatatcaaacttataagttctgagaaattttcaaaatattgtacgatgtaggagaatatgtcgttttcgaaccaaacaaaagcaattaaactaaccattctcagtatcaaaattcaccatgaatacacctggctaaaaacgtaaaaatcctacctaacaaagcattaagggcaatgcaaaatcacaaaacaagcatccaaaagacactttcgacaatttgaaagcatctgaagaggcgcacaaatttctaggacaaaccaatacaactcctccatggaagcataccattgtgaaaacaaccagaaaccatatagaggacaaaaagaatggtcttactgtctgtattggctctgcaaggacctcccatgtttgatccaagtcttcagataaccgggattcattcacctaacaacaggcaaaattcagcataaatacaacgaagtgtcatagttacattttggctagtaaacttaacaaagttaaggtcaattacaaaacagactaaatgtctaaaattccaatagtccgaaaatgaaattatgtgtagtgcacaaaggaatatcttgtttctagtacgacagataccctgactgaggtccttcctgtgcatattgagtagatacaaataatagttggggtaagacctagccacatccatcactttatagttcacttagtccaaaaacataaagtgtgggtgggtggatgtgcatgcttgggcatcaaccattcagcatcacagcatgcatagaaagacttcaaatacaaaatatgctagttcaatacttggacaatgataaaattatctatacaagaataattcaagaaacaaccaaatcaaacaagaggaggattgtggccacctacctgaaccttattgattcctcgcaatgtagctttgtaagccaagagtgaatgccctaatccaacacccaaatttctcaaaacagtcgagtctgtgagatcacgctgacagagagacatggttgctcattagttcaatcttaagtaaatagttaggcatgtctgactgcttgctgtattttacatcagtggcaagctacaatttttgcatgcacattggttgaccaaaattgcggttgcattgaaaaatgaggtaagaaagcattaaattgtgcagaggtaagaaagtgtagcgtgtgccacgagttcgacagaaatccatggactatagcctaataaagccaaacttaagaacaccatttgtggcaagttaggcgtctgttcttgcatgtgcatcaacaatggatgatgtactacccctttttcacaactggagatagtaaaagtggaaattgaagagtacagacagtattatacctgcatccgagaaattggtagcttcatgcttaaagaagacaatgtaccattggctatagtcaaattgccgtcactattttcgaaatcaatgggattgactttgtgaggcattgtggaagatccaacttcaccagcctttactatctggaacaacatttggaaggatgcagtaagttcaaacagaatctaaaactgtagaccactaagtttttcccactatgtactaaacgaattcaaccaaaccttaaagaacagtccttgcatgttagtattacctgcttgaagtagcctagtgatatataggtccacatgtctctatcgaaatcagtcaagacattgttaaactgaacaaatagattgaagagcttcgagatatagtcatgtggctcaatctgtaaaaaaaagttaaaactgcgtcagaccaaagagtatcatatgactttagaatttacagcgcagttagataaatggaaagtgtattaataggaaattctccacaccaccatagttcaagaataataactccaataaagcactgaactgggaatacaaatgaaacaactggatatcaaaataatgaatataaaccacctgggtaacataaggattgaactccaagcccaacgatttgacaaaatcttctgcaaccttaggccagtcaacttctggatatgcaacaacatcagcgttgtaatttccgacagctccagcgaatttccctagtatcttgacctcagaaaaactatttcctatgcttgacaatctggccgcaaaattcgccatctcttttcccagagttgttggcgatgctggctacaagcaggaaagtggaaatctaagctagcgttataacttctaagcatatagcatcgattacagtgactctgtgtacatatgtacgacagtacaagcatatattactgagtatacttcagaggtggttctcgtacctgtccatgagttcgcgacagcatagggatggttgaattttgtgttgccaaggagcacattgctttgcatatgtccatcataacagggaacataactgtatttaccccctcttttagagctaatgcatgtgacaagttgttgatatcttcagaagtacatccaaaatggaagaactccaacacctggggacaaagatacactcaacagctagcaacgaagtaatagtatgttcaggtattggttcacacagaaggctgacatacctttgcaatctctggatttgagctgcatttttgcttgagaaagtactcaacagccttcacatcatggttggttgttttctcaatctttttcacttcttttgcatcagcaacactgaaatcctggataatcgcatccaggaataactgggcctccttgctgaatggaggcacctcattgatctcagggatttgggagagtttcagtagccactttacctacagagccagaagtcacttcagataagcaacattgattataacactagcatcatgccccagtttctgtatttaacacatgaatcaagcatcctagtttatgtgaggaaatgatgaaatacactacaaatgatacgagtgcaaaggaatccaaataaatgatacctcaacgatgacccggtatctgatgaggccgaactcactgaagaagggtttcaggtccctggtaaagcgctcgtaccgcccatccagcggcgaaagccccatcaggcagaaagagtcgaagtcctctgcccgctgcatctcctccagcgacctcgtcgcccaatccatcggagcacgcacctaaccaaacagacccccccccccccccccgtaaggaacgacaactactcaagcgggagttcagagtttgcacgggaagagtctctgctcacctcgacggcggcggcgcctgatgcagagcagcgcaagcgtcgcggcgggacgcgggacgcaccggacggggcggcggcggcggccgtagcgcggtgggccgcggccgccgcgacgagggaggcggcggcggcggccggagccttcagcaacggcggcgccgacatgcttggggggttgtcgtgtgggaaaaccctagagcgagaaggacgcgcgcggcggctttgctgggtggctgcaggtgggccgtgcggcgcgcggccggagaagaaaggagggcggaggagatggataggaaatgattcgtagggtttaaggggagggggaaatttttccgggggagatggacggcgaagtggcgaaccgatagattccaacacccccaacaagtgggcgatgccaccgcgccaccatgaccgttcttttcttccaaggcacatttcccttctgtcccggactttctcagcccagcccaatcaccttgcctgagcccaatcaccagcccaatcattcttttagggaataagttcaccagggggtccctcaacttaacagcgagattttttgtgatcccttaaccacaaaaccagaaatgtgtacccctaaactccctcaaaccgttcaccggaggtccctcggcagtatttttgcccggttttgctgacgtggcatcctagtcagcaaaaaaaaattaaaaagtacatgggacccacatgtatgtcagctgcacattttcttttctcgttttcttcagtgaggcggccgggcagatgagggcgtggcgacaggcggcggtgcgggcacagcggcgcgcggggaagaagcgagagaggggagaggaagtgggcgcggcggcgggcggcgtggagcgagtgcgccagcggtggcgggagagggggagagaggcggctgggacggcgggagcggcgggcagggcagcgggtgagagtggcagcggagcggcggcgctcgtcatgctccagctcttcaccgccggtgtcgtcgtcgtgttggttgacctccacgagcgcggtagacggagcagcggtgggcggagggcagcgggcgattacgacggagcggggggcctggtcggcgagcggcggggagggggggcaagtgtggctgcggagcggcggcaggcggtcggcggcgacctcttcgccgatgcggagcgccaccccctctcccgctggcctcatctccgcccttgaagacgaggttgatgggctcctcatcgtcgtcgccgtccccgggtgggagcggcggcgcagggggctcgtaatcgtcgtcgtcgggcagggcggccttggcgctcttctcgccagagaggagagagagccggccgagcttcactcgcgagcttgtcggcggcaatggcgtccctccgcgcacgagagaagaaaggccaaaagcccgtgaacgcatgcatgatagctatgggttctcaagtgagggatacatgcatgcaatagagagaaaaagaccaaagcaaaagcagcttgtgattgatttgcaggctgcacgggttgaaagtgtatatgtatatattcatgaatgaatgcatatatgcatgtaactctaggcctcgcccacggcgacgacgacggtggagagacgacgacgagggcggccacggcgcgcggctgctccgctccgccgccgcgctccgctgcctctgcttcgccgccggacggccgcgccgcgtagcctcgctcacggcgacaacgacggtggagagccgacgacgacggcggccacggcgcgcggctgctcctcctccgcccacagcctgaaggagaagaggagagaagaagaaaagagaagaaaaaaatgtggagccccacgtgtttttttaatttttttttgctgactaggatgccacgtcagcaaaatcaggcgaaaatactgccgagggacctccggtgaatggtttgagtgagtttaggggtagacatttctggttttgtggttaagggacctcgaaaaatcttgctgttgagttgagggacctccggtgaacttattccttcttttagggcattcacgatttcaaaagtacaaatgacctcctatagtatttaatccggacacatggcgcccccttcctgttctcaagcggttttggcactgaagtagcaatccagtcaaacaacatttttaaaaaatggtgggactaaattgtaagtgcctttccctttctcagctccaacgcctagctcaccgggcactccatgaccagcgatccacgttagttgtttttgcccttgttgagccagccagccacaaccatgcatctcctcttggtatccatgtgctaggcagccagcgatatctaagctcgagatgaggtgagggagggagataagataaagggggaagaagtcgatgtcacttcatcctccacctcactagaccctgcctagagctccacattcgcccacactgccactagctctaattgatccgcaccctaccgctccagtcaaaaagggagaaagagaagaggtgatgagatgctgcggtgctaaagctcctagaaacacacatggtggagatggatctctgcagaggaggcggatgcggtgttggagctcgagctcgcctttgctactgctcgtgggcagtggagaggaggcaaattcgccggtggttggcagatgggagagaagtgacgaagagaggaagagtgcatcaagatgaggcgaccattgacacgtgggttcaaccatttttttaatttgtttttttgatggggttgcctcttgtatgtcaagtaggacaaaaatattgttcctcgctaggttaaggcggtattttgtctagtttgaaaaattgagaatataaaatgtatggtattggagttaagagggataatttgtgcttttataatagttgagggggtgggaggtaaattggatttaaccttacttgaaaaagttcatctctcacaatacaagtggcttcaagtgtccacctcagaagttttttttttaattttagcccttgtatatttcaatctacatgtaaattaaaaaatacactaaaatcaaataaaacaaaaaaataatataaaaaacgtagcgtaacctaatccaacatttattccccaccacccacaccggcaaaacaaatgaagacgggtggcaaggacactgccggagtctaagaaaaataagtagagaaggtggtgagggcgctagttgtaatggtcgaggaggaggtagattacagtgactgctgctgcatcatgcatgaacagctctagttgcacgaaggttgtcgttagccgaatctccttcctcccctaccaccatcaccatgcctcccttcctattgttcgttcccgtcctccttgccaccactgcaaatccaacgtcccgttcctgtcctcctccttgctaccgcttcaaatatgatggtttggatggtgcatgtggttaaagtgcaacctcggtggcactgcttagaacaaacggtctcaacgaaaattttgtatgtagtgatggtttgcgtggcccatggtggtgaagaccctaacaacgacaacagagcagcttgacgtgctaatgagggaccgttgcagtatgtagcgaggtgacaagatcaaccaatgcggctccccttgagtggctctacatagcaggagccttttctaggtgaggcactcattccttgcaaaggggcacaagcttcatgtggaagccactcgcctccactcctctctccttaggctgtgtttggtactctattttcctaactctcctctctcattttttgcgcgcacgtttttcaaactactaaatggtgagtttttttcaaaaagtttatatacgaaagttgcttagaaaaatcatattgatccgtttttgaaaaaaatagttaatactcaattaatcacgtgctaatgaaccgctccgttttccgtgcataggagatgggttcccaacccccacctccgaacacatcattaactacttaagtgcactgtgaatgttttcagtagttcatttctttgggatgagcccacaagcctagataatgttcaagttaggtagtttatcattgtcctacatttacttcttttttgctgttctttatcccaagattaaatctttattattctttataaggatctaaatcacttctttaaatgtcacggatcaatgtactggttttttatggacgacatagtggaaattattgtaacatttttgtgagctgtggttcaatatgtcatattaatttgtgtacctcattgtgtatatcaagattagaaatgtaccttttcatggtcagattaatttgtatcttcgtatacccaatggataaacactaaagcatctggaagtaaacaactacatttataaagtgagaaatggttctctatatatatcccatataactcttgtatctcatttcgtatatcaaagatttatgtgtatattttcataaatggtttagttattcatatcttcatctacattgagtaacatctatctctacgtaaacgactacatttatcaagtgcccttttgtataactttgactctagatagcagtcattgataaacataagcatatctgaacataaatgactacattaaatgactacacttattaagtgacaaatcgttctctctctccaaattaatccgcgtatcatttgtacataaaaacttatgcatatcttttttcataaatgaattaattatgcatatcttcgtcttcatcatgagtaactgcaatctatatggacataaatggctacatttatcaagcgcccttttttaaactatagccacagattacagatagcagtcattcaatatcataaaagaatgcaactcattattctcatgaaggaataattacacaatgacaatattttctttctcaccattttaccttggctttaatcctactttcagtcgatcaatccttctccaggttatagaatagcgtgtaccaaaagcacgaatctaatcacggattataatggtgcatttacaataaaacaatataatcgttgtttccattcaagtttcggcacgaaaaatacttataatgttttacatgaggagttatgatatttgtggcacgaaaagcaggactatactatgatactattaacttctctcgctacaatcaatttttttatagtagcactatctagcacatacataagaatatggtgagctaaaatcgacccatactactatcttagaagtttaaaaaactacaaccatcctagagtagcaattttgttgagataggacctattcggtgacaccaacagtgccgtatgcaggagtatactttcttcgtacttataaagagagtcgtttatgacagcgacacggtctccaaaacataactttgacttcttgtttatataaaaatatttattaaaaagtgatatatgtatacttttatgaaagcatttttcaagacaaatctattcatataatttttatattttcaaactcaacatcttgagagttattcatgatttatattttcaaggtttgacttaaacattgtcctaaacaattttctttatgagtacggagggagtagtctgcagccggcttgcagaatagttccataaacatcattttttttttgtcagcagctgttgccgtttgtacccatgccgggtcacgcgtaccctacgccccctaccggtgctccaccacgtcagcggctcgcgctcgccccccctccacccatcgcacacggcaaacacagcgcaaaacccccgtgtccgttggcaccaccaacccccgctatataaacccccccgtctcctgtcgttgccacaccgtcttctctcttctcctccgccctgcctcgactcttttctcccccattttccccttcccaactccccccaatacacaacctctcaactcaaaaccccctcgaggcctcgagcctttttttttctgcctcgaaacaactgaaaacgcggggggttctctcgacgtccccccggccgcggccaacaccaccgcgcgcggcgacgcggaccggcgtggcctcgccggccccgggcaatgtcccgcagcagccgcggcggcaggcagtcggcctcgtcggccacccggatggcgtccagggcccgaccgggtttccccgtggcgccaccaccacccatgggcccgccgccgcccccgccgatgcccccggtcccggtgatgtatctccggggggtcccgccgcccccgccgtggctcccgcagcacctgatcatctgcgggctcgatcccgcggccgccgagcggactgacgctttccggagcaaatccctcctcaacgtgagcaccgggggcgtttaagcttcgtacgcttcatcgtatggtcctatggtgtttgatctcgtggctaattttggggggatcttcttgtttttttttacgaggtttagttcatttctcgtacgggggttttgccctcgccggaggaggagttgaagaggcaagtggtggtgcgggagctcgataaggtaatgatcgttcgggtttcggagcttaaaggttaaagtttgcgatgctgactggtctgagagccttgatccgatggtggtttttgcagatagtgatgggttgggcgaagagggtggcgtacgaccagagggaacaatattggaacacaacagctacggtgttgacctttgggtcgtatgctttgggggtaaacaagaaatgttcgatttgtgcacaatttctgggattttttttttgtgttgatgcaatgtccgattgattttatagtgtatactgttggagtgatataattattttgcaatgcatttagttatctgtcatatgttgtgctcattttgaacctaaaagtgttaccattaattcgtcaattgcccagtcattttcagccactgctcttggttatgagcattttagagctgctacaggagaagccacgagctagacatagctcgttgttttaatatttggaattacatgtatgccatgttaattttagcagagcatgtttatttgtgagctcaaacaatctttcaatcatttttttgagtggaaacaatttactgctctagtttttgtgtgctaaagaagatgaccagaacctgagagagagagagagaaaaaaaaggagaaacttggttctttggcttgctcattgttctttttctaagcctcttggtgacttaatgatttattctggattgatgagccagaatatgccatagtgactagtgagtgtaagcgaataaagtttctgaatggatagatcatatgttcttagttgtgcttgtgcatagtcaacttaatgtggtgtttgttgatttgacataagattatatggttaaggaatacatagaaagattaaatcttgacatctgttcccatggacaatattctacatgtaaataacatgtaagatgtttaaatccatgcttgaaagactgatggtaggcaaatcagggaattagagaactcactaaatatccatttgtattgttgacattgtgcagagttttaaggatggaaatatacttatgcatacaatcttggctcggttaatcttttattacatgttgataaaatagactgggttaatagtagtattttaactttgttttgcttgtctataacattgcctcgtaactaggaattcccctttgagatttttaatatatcttattgtgacaagcgttgcctaaaatgttctgctttgaaggcatatggacctgaatctgatatagacgcagtctgtgttggcccttgtattgcatcgttacaggtgaatatctctttcagttttccctttgtccactagcttggagctttcgaaattaactcagtgtgtatgtgtgttattgtatagcaccattttttcattgtcttgcgacaaatgcttgaagagaggccagaagtatcagacctgcattctattgaaaatgctaaggttccattgatgcgctttaaatttaacgggatgttagttgatttcccatatgtccaattgccagttatcaatgctgcagaggcaagtaccttatgtcttatgattgttttgattacatgactatagttacatgctatcataattagtgttctgtactaccttatatatgtgttataattgtcccatgattaattgttgattcagtcaagttttcttaaaacaacacctttcactgaagatatagaacctgctggtgatgtcctggagctaatttgcaggctttattttttaacttccttcaatattttaccatgatatggtttcattttttgcagaattgcattcaatcatgcataatatttttcgaaagcattgcatgctaccttgttaagtacctattaatggattagatccccccagaaaaaaatgaaatgaattcgaggtcatgtgttattgtggggctccagtatcactggctttgattcaacggcgatactggagtcccaccactgctgttgcaggcttagtttgaatgtaatagtcaatgttcaccataacaccatgacttcatttcaataactgagttgtacatttacttgtgctctgtttgatgagtttaaatggcagagcatttataaggaatgacgccttcactgtctttatgtgtatatatagatgtatatatttaattggtttatggaatgtattttttgaaaataatgtattttatatgcctattaatggattaggtttcccccaccattttttcaggcagtagctttagtttgccatttgactgtctacatttgttttagaatgctcttggcctctgcaattaaaatcagttaaaacacgatacataatcaactagtccattcttaggcctccctggtttgacatgtgttgttcattatcaattaaggctaactgtgaaccattttgtcacacacagattgttaaacacaatattgtggtggttaattcaagttctcacaagttgtttggtgatgcaggcaatacatgcatttgaccctcgcttgctagcggcggttaatgaaccaagctggagatgtctatctggagttcgtgttaatagacaaatcatgcaattgcttccaaatataaaggtcgaacactagcctcgcttgattaatttatatgccattctcatattttctcatggtagttgtattttatttcatattttcgcacctttgtttcactttcttattcctggttattttttgttaatgcaacaataatgcattacggttcccttattctatgttgaatcttttatctgctgagctctctaaatttttcttgctaatagtctttttcttttttttaactgcttcctttttctgacgtttaatgcagaagtttcaaattcttttgcggtgccttaaactatgggcgagaaaaagagggcttcattgccatgtatgtggcttacgttttctttatcaatgacagcttatggttttgtcttcttttttggtcttacagtgttatacttaattttatggtgttattttcagctacttggcttctttgctgggatccatttggcgattcttgcagcatttgtttgtatcatgcatccacatgctactctcagctctttgttcaactcattctttgatatattttctcactggcattggcctcttccagtgagtttacttgatcagccaactccttggagacctcattgctgctctttcatgcccatagtgatgccctgttctccaccagaattttgtgcctctagtataacaagaagtacctttaacaaaatcaaagaagaacttcagcgtggttttgctttgaccaaggtatgttgaattgcttattctttatcaactactatttagctaataacccattgtactctctcactttccgttcagaaaaagaaaatgagtaactagtcttagtgcaactagtatatggtcagtccttcctcttttgtttttgctgaactgttatatttgaataatttgttacttgaatcttcagttaactctattttaagcatttaatatccagtctccttttatgcagtagtcagagcacctaccgtttcttttttaaaaagcattgaatattcaaatgaaacaaattgacccacaaattttgttttctttgtttttattattgctatgccatttttatcttttttttaaaaaaacagaagtatttgaagacttaccaaaaaactttgaagctcgtaactgtagcactgctctacacctcactgaaaaataattaaggtccaatttatctgtatacttcatctgctttgggtagtgagatccctctattagtcaactgttgcaaattatgtaatttgctgaggaagacctatttttaacttatgtcaattatataggtggatctattcatgggtatgttttttaactaagcagacagctaggaagtggtgcttttgccttacatggtcttttgctaacgctagaatcctcgataatgttcttgtcagtcatctgcactttggtggactttagggtgacatttgctttcatcgttgaaatttctgctgctaacatctagcttggtgtttgcactgttgaacagggtgataggaatggtgatattaattggactgagctttttgcaccttttccgtatactgtgagatacaaacattttctccgtatagttctttctgctccagtggctgaagaattacgtgattgggttggatgggtgaaatcacgatttcgcaaccttcttctcaaggtttttttttcatcacctgcccattgtttcttcacatttatagctgcaagttctgattgtaacatatccaaactgatgttctgcagttagaaagcattggtgttgattgtgatccagatccctcagaacaagccgatcatagcatgattgagcctaatgtcgtatttttctggggtctcatgtatagaacgagtacaaacatctgcatcgactctgtgaaagaagacttcatgaagagtgtcaccaacgacatctatggaaaggagaagtgcacccattcagacataacgatgtccattgtctggccaacccatttgcccaaatgtgtgtatgctcactcagtttactcacagaatcgacagaatccgcggcaatttatgatgggcaaccaactgatgaatcaggactgcaatgcagtgcgttaggactccattattatctgaaatttgttcggcatctgcggatacctgtttgagaatagttagagatctgatactcaggctgttgagtacgctaacatcatcagatactccgaatctcttctgttttttggaccgaggcttgggatgcttctgtcacaaggactatggagggttttttttctttgttggagctggccggcgagagctgggtttttcgtgtcgagcttctagggcaaagtaagctcaatcgagctacttattgctgttctgagttttgtgcaggtacatgtatattcatgtacacagcatagggggattggtatacatgtaacagaggtatagcgcataaaaagttttataaactgtaggtccaatgtctgtcccagcagcaaaattgtgtaaatcgccacctgtggttagaactgttgttgggtccagattcagaggtcgatatgatagtgtttactgtttaggatggatgtcagtcattcttactgttgtaggctgcaaaactgttgcatgtactgccgaaaaattcttatgtggcaagtcatccagagaaagaaaaaaacattgccattgtgtactcaacattgtcatgcattctctcgggctctgttcaacatagttttgagttatatccctgcttctctgattacctgcactgattatttacctgtttgagactttaaagctggctagctggggcttataaattccaatttcttacatttcttgcttccttggatgggaaatgggatgccagcttactgtttattgagtgtcatgtttccgcttcagtaacatttgtcattgtttctgtaaaagtattatggaaagtcttggttttgaacttcagactatttgaatactcatctaaccttttccttttctaactccattttcccttttgtgaggtgccgtaactttctagtgtctgttgaaggacaaatattccagatacaccaaaacacaattagtgcatgattaatcggattttaattattacaaactttttaaaaatagatttatttgatattttaaaacgatttctatataaaagttttcgcataaaacataccgtttgaaaagcatgcaaacggatatcaaggtaaaatatgtatcctaataaaaagaacgcttatatctcactcatcccaatgagacaaccaatatttttattcctctcgttaatatacgtgtggaatgtttaaacttattatattttgaaaagtagggagtagcaagttttagctattagtatagaggtaaaaaaagcttggttgtcttctaggggtaggtgactaggtggcaataagaaagctaagaggtaataggggttgtatatgtggtttaattagtagcaaaagtcacatttcataagtactatgttgttatatttgaacacaatttaaacattaaaagttattgtattttgggatggagggattagtcttttttaaggaccaatatatcgtactaaatatgaaagtaaatatggcaaaacataccatttatcatgcccacacacatcgcacatacccacacaagtgcgggatggacctagatggatgaagtgtcctgttgagggtatctctcgagagtgcgagggcgaccaagaagttacggtaatttcccacatcctgacccctgccccctccaatttcactggtggtttaccactgacgagggctggaagaggcttcctccctgtactaatatagagtagtttaggtcaaaatcctcatgtagtcaggtcatcctgtaactcgacttcatcctatttttgggtctcattggtgaagttgccatgtcaagaaagtgatgttggtagctgtagttgtaggtttgggtgtccctttgcctctaggaagagggttctcatcagtcatcaagctcatcctccccatcaatggtccccgcgatgagtgtggacggatctaggagggtcggcgtgatttgcgttgcgacgagaggtggaggggctagatccgacacaaccggatcttgcttgtcggtcagcctggtgaacggagctagagatggcggatctagggtggtcagcccattctccatggtgatgatggctggaggtggggcaaaatgggtgtgctcggctcctacttgttggtatttaaaaggtagagctggtatagttcgcttgatcctccagcctcaagtactcgtggttctggatgtcaagcgaggtggcctctcaataagttcatcaatttcttcaagtaagtctttggtgggcttattgcttgatgcctggtgtagtgtctggggttcatgggggtgtcacttctggaaacaccattgctcttcgtggtagtggtcatctagcgatctgtagtcgcaaggttagagtggaatgcatggtggggaggcttgatcgaatcatctcttccatcgttgctactgtgttccgctttcgcttaatcgttccaaggcttaagttcagttgctaccattcctaatcattttgtgtttaaggcaggctggggtttgggattgtcttccaattttccttgcaacagtatccaagatgagaactccgtttctggatgagtgcggactgtttgttcgacttttgttgataatattacagttagtgctcctcagatttggtagagaacttcttggcaaaccattgttgagtccgatcaagcctaagaaaaatctacggctcaacattaaaccttgaacaacgaagttctcgtggaggcaactgaaggggtcgccgatctatcgagcggtgtgcacatctttagtagtggcttgtggacgtagtggccttggcaatgccatagctccccatcgatctcatcaattactattgttttgtttagcttggaggacagtcttcttagttcaatcggctttgccttctgtttgaatggtgttgttatgtatattctatctttgttgccaatgtattggggatgttgtttcccttaaactctgtccttgatctatataaataaagttttgagttttaaaaacaaaaactctaacctaagacctatgttggcctatagtgttctgacatgagcccggtatagcacatgatgccacccatcatagtactatggatcgatctagcacgaaatgcatgctcagattcgtattattaaaatatatcacatctcgtactaaatttgtttattttaggatggataaagtacacgataatattttattgtaacacaggagcctgggtctgtccttgcacacacgagtgggtgtgtcttagcatcttttgattacataatattataataatattataatgtatgtttatcctcggttttgaacacaggaaaacaaaacatgagtatatgatcaaataaaaaaaataatatttagattttgagacaactatagcagtgttagaggaacgttctatatgatgttagcatggacgtcactgaatggaccatttctgcctacacgagttctatagctgttgataagatatgccatattgtggcctagttaacttgcaggtatgtcctatatattaaaaaagaaaatgaggaaatgagcgcatctctaaccacgtcactagatagggatacatatggtgtgatgttagcatgggtcgtgccgaatgggtcattcggactattcatatattatatatagagagaattacttatatgccactacaatttgaccagtttctttatatgccacttaaaattggcttctcccttatataccactagttcaagtttttctacccttttatgccactcccaccactataatgttagttgactgttagtcaaaggttagttttttttcgtaaatgaccaatatgccctctcaactaaaaaatgtgtaaacttctttttgagtgaacaaaattttgtcagaaccagtgaaaaatgctctttatattaaaaatattgttggaaaactgcatgtttcatgcttatattgaaaatttatttgtgatggtaatggctaaaattgcatgtgatgcagaaaaaaatcaatttttatatgttgtatccagtagctatattagtactaaaatacctattattggttgtatactaattctcaagggcaaatgcgtatttttacaatgaagttaacggttaactgacggtggactgacggcaatggcataaaagggaggagaaacttgaaccggtggcataaaagggagaagccaatttgaagtggcatataagagagccagttaatttagagtgacatataagggattctctcttatatataatatgtatactagtataatggctaaatgaaaacgctaatcaaaatttggtaaggctatttattataataattattcttaaaccaaacccatgtaatatcaaattatataactgccattgttgttggtaacagaccaaatacaatgctgtcctaccaaccaggctaaccgaaaggttaatttgtagcaacattgcttgattgccaaaattttatcattacaaacttaaattttagttttctataggaaaaggtacaacactaaattttccatgaaagtctaaagattatctctaagcttggaaatctgacacttttcatccctgaactttatttatgtaagtaaacgcggtatcggaaatttaaggatgatcagtttccggttaactaaagtttactgagtttcgttttcgtggctgtgtttagtttttgaaattggggagaagtttaggaaaaattggtagtttggaaaaaaaagttgggagtttatgtgtgtaggaaagttttagatgtgatgtgatgtgatggaaagttgagatttggagaaaagtttggtgtgaactaaatatagcctacgtaaaaatttagggatatgaaacgaccattttgctttcccatagtataaccgtgcagtgcaatacacagtgaatcgccgccgatctgcatatccagccgggaagaagagcaaactcgtgtcacgtgccaaacaactaatcgaaaagccctggacaacggcaggagaggaggaggggggcagtaatgaaaagggagaagaaaagaaaggcggccggcttgattgagtggccctttgaccgggagaagaagcccccgcttgctaccccggtcccggtggccgctgcacgcccccggctaccgccgtgcgtccgaagcgatatcgaggagtagcatagcacgtacgatctctcacctcaatcacgtcgtacgtcgcggctgcatgcagcgcatctcctcactgagcggcctccctgtcggcgtgcggccatcaatcgacgacgacggcggcgggccccgcgggggaggggacgggtcgacctcgactaacctgcgcggctgcgcctagcgccgactacgtgcacggcagcaggagagcccaggagaacccccgaaacccacggggtgtccgcagtgtatgtactccctccgtccaagcattttaagttttttttactgtttgatcactcatcttatttaaaaaatttgtacaaatataaaaaacgaaaagttatgcttaaagtatttttataataaagtaagtcaaaaaataaataataatttaaattttttttaataagacgagtggtcaaatagtgtaagcaaaaactcaaaatccggagtgcaattgtacagtaggggcttgcaatgatccgtatttttgggttcagacgtgtatgaaaaaaaggtaggtgtgaataattagataaatattgtggttaattgagaagaaaaaaaacagtataggagaatgatagtgtttaattgagctgtattttaaaaagaaagatcacgtaacttcctgatgtagatccattttgtttctatgtgattatttacttctactagagtttttagtgaaacaaaactgatctaccactatgcgaaatgtgaaaatcgcttgataatttgttgttgactctccaaagcccccgcctaagtttgaggattcctgtggaacgaaaaaaatataggaatttcttatctttgaaattaccccatttgaaaggaggcatgaacatatctcatggggtgggagctttgcaccatgtgtggtcatgtaacagtagtactgtcataagaattgctctcttggatggctaaaaagaaggtattgacatggtcactctcgagactagaaattttcatattaattgaaatgttatttttttattatgattgtatagaaggtatgattttatctagaaaaaaattaagggctactttggaatggaaaattggaaaaaaaagtaggaatataaaaaaaaaatgcaaaacacaatatgggggaaaacacaaaatctggtaaaagatatgtttagatgcatcatatggacatgctgccttcgactttttgaaggaaatgtaaaacacgacctttgataaattttggaatcctccaagtggatgaatggaagaaatcctattgaaattttggaataccttcctatatatacaattctttgagggctttataggaaatatttttataggatttcaattcttggatgaagttcctaagaaaaatacttggtttcaaaggagtcacaggaaatgtatatgaaatctaataatatttttaaagaaataattgcgtagaaaatacaattgcatcgatgaaaaatataagctaatattatatatcaagtccaatttaaatttaaaatatgttatataaatattagaaaaatatttattgaattaaaagctaagagtatatcacatttcgtatactagttttttgtttaaatctgatatgttctttagtatatcattttctatgaaatgcataaatggcaacaaagttattcacttactcgatcattttcttatcagtcatgcacataaaaccgaaacaacttgttgcagtgagctgtatgcagtgaattataaagtccatagctatgatatcattcatttaagatgagcaccggccccggccgcccgcattgcttttgtcccgataagacgacatactgttcatgacactactatgaagaaacaaagagtcaatcggatttagacgtggagagttttcaaaaaaaaaaaaaaagggtcgtggatcgcgcgagctggtctggtttcatacccactgcagttttgagataaatccgagctggtcgcgaccttatttgctccacggtacacaggagaatatccaatgttccaaaccacgaagcagaacaaggttaattgcgtactacaacatgttatcatgtaggagtagcacaatgcaaaatatactgaaaattccatcacacattccgggggaaaacatttgtccatgaatgtacacatttgttgcggttcgtaaaactacttgttccttatattcatggtaaaaatgaaaaaaaaataaagggtcagcaaaatacaatagaacgcttcaagatgtttcgatgtaaagcattcatgatatgatgacaaagaaaaaggggaagcacttgtcattagtgatgacataggtgcatgactccatccactagtatttaaatcctgctatttgcgaatattaagtacatgcatatgcatatggcacaacaacaaaaacctcacgtagaggctcatttgtagagaatttttaaaatgcctgtaagttttaaagctctatagtctagagacactttttaaagacactctcaaaatcgcctaaaatatttttactttagggacactttagagacatttttaacatactttgttaaatttatcttgtagagccatcttttcggcactttaaaatttgccttatatgtaaaggcattttttccaaatattaatatatatcaagtaactagatataagtaacacaaatcacatacttatatgtaattatatgaggttgagatggttagtgcattgaggaaaaaaatggtaaactcaacaggtcatgagtttaaggattgataagggataattttttttctttttttttcatattgatttgctatagttgccacaacatattaatgcctctacaaagtacctctatttgtataaagacatcttataaaatgcctcttagttcatagatacaattcaccaaaaggcacttatgagacactcttcaaaatgtctctataacactgtaaaggcattttttaaatgtctctatagtattaggaaaatgtctctacaagatatatttgttgaagtatgggtttttaacatgattttaaaatattatgcatatgcaggtagactttcaacaggattgtagtgatataagagatgtgccgctaatttctatctcttagagtgtttgtcaggggggcgcataaagggatgggttcactgaggttaccgtaaacatcataacggaaacataaattcggtcacaagttcaaactgatgttatgcaaggctaatatttgttctttataaataatatatagtattcttttatgcacaccatatattttaaaccatgagacccatgatataaccatgcatcctccaatgttcatttcttaacttttttttatctgcaactgaaaattcttaaagggagcttgacccaaagaaatccttattactattttaagattttaccttaaagcacatgtcgaaccttcttcctttttggattgttgatcttattttagtgttactagggatcatcatgatcaggctctcagatcaattctcatgttgcttctcttgattcgttgttttctggcacttgttttgttaggatctattgcactgcatggtaatcgaaactacgtattgtagtaaactatgtaaagataaaacaagcatattaaatatgtaacaatatcttctcaataggtaagactttagttcgtgcacaaatctgtcaactatgagatcatgccgtccatgagccacgacaaccaacttggtactgtattcaatgctatctctatttttgtttacatgagtttgaccaatttctgggattaaaaaaatactcgccacgataaccatgacatcctccaatgttcatttcttaattttttttatctgcaactgaaaattcttaaagggagcttgacccaaagaaatccttactactattttaagattttaccttaaggcacatgtcgaaccttcttcctttttggattgttgatcctattttagtgttactagggatcatcatgatcaggctctcagatcaattctcatgttgctcctcttgattcgttgttttctggcacttgttttgttaggatctatagcattgcatggtaaacgcaactacatattgtagtaaactatgtaaagataaaactaacatagtaaatatgtaacaatatcttctcaataagtaagactttagttcgtgcacagaaccgtcaactatgagatcatgccgtccaagccacgacaaccaacttggtattgtattcaatgctatctccgtttttgtttacatgagtttgaccaatttccagattaaaaaatactcgccacgacggttacgaatgtgactatctctcttttgcccttcgtgcgtccataagaaagcaaaagtaccacacacgctaggggcattctggtcatgttagacaaaacaactgcatttttcatcagattttttttctttgcacctgaaaaatttcaaataagggactttgacccccacacaaaaacatgtctttgcccttttccttaggttggaagacaagccgagctttctcctttttaaaaaattgcttctcccttctgtacatatccactatcaggcccttccaaagttccaattccattttcaaataatttagaaccggaaccaccggactgaaaggccagggccactctgtgtctgtctcactgttcgaactcgagaagagaagagaggagacactggccgtggcaggcatcgtagtacaagaggacgacgcagcgccctgacccacctaccccaccaccacacattccattcccatttccattagccccaccccaacccaggcccgcgccgaagcgaagcggagaccagatcaccaagagaagtgcgacacacacaccttctcgccatcgttttcaccccctcccttataaatactcctaccgcccgcctcgcctcgtctcgtctcctttcgtttttttttcctccactcctccgcctcttcttccgccgccgcgacgcgccgttgataggtctacgacgatgtcgccgccgacgaacggcgccatctcgctcgcgttcccgcccatggggccgctgccggcggacgcgctgatctacccgttcgacggcctctcctacgacgacttcgtcctccctgtcgccgccgcaccgcagcatccgctccccgtcgccgtcgccgaccccgcgcccctcctcctcctgccgccgccgtcctcctgcacctgcaacggcgccagcagcggcatgggcgccgttgcgccgcgcacgttggctctgggcgccaccaccgacggcagcgtgatgacccccaccagctggggcagcgacggcggcggcggcggctcctcctccgcgcgggccgtgcgctcgccgtcgccggtgctgccgctggtgcagggcaccggccagaggacctcctgctaccgcggcgtgaccaggtaatactactcctactaccactataccacgcgcgtagagatagactagagagagtgataataataagtgcatggttagggagtgtgattaacgactaatcgccacgtgatttttcacacgcgctaatcacgaggaccgcacgtgtggcgcaggcacaggtggacggggcgatacgaggcgcacctgtgggacaacacgtgccggcgagaaggccagaagcgcaagggccgccaaggtaatttactaattaaaattaccgctaatcaccattagtccattaccctttctgtaccgtcatttttctgtcaccgatcgaggaggcctcgccggcggggaggggtatcgacggcggcgaggggacggtgatgagttcgccgtgatgggatgggatgggatggggtgccggcgccgtttcggggggagatcgagagacgggtcgcgtcggccatcgtgtgcatcaagttgaggtgacattagcatctccgttagactcgcaacagttcccggattctctgcggtgccgggccccggtgggtcacccctctttgaccgtgcaaccgtaggtagggggtattgtagccgctgcctagtatacctctgtgttctgtctactactagtagtatctcttttttttttaatctttcttgtggccatttctctgatgcaatagatcggctagagcctaaagcgatttagcaaggcgatttatgttggttaatcttgtaggcgtggagattaactggtcccgtggttggtagagtgacgtcgtgtatctgtatgacagctttgccatggcaggactgctgctgtggtgcatgcagcttttgcttttttcctggttttagtagtagttcatgggtgatgtactgcatgtttagatggttttatttgggtcagtttctttcttccttctattgcaagtctttcttttctccttttttgttttcttctgcattacacacggcgagagtttttgtttctgaaaaatttattacgagtcgcaactttgcaacgctaccagggttgtgtaggggacagctaaggtgtgaccaaaagtggttttggaacgcacgtttgaattttattttatttttgctttgccagttacgactccagtagagttgtttctactgtccgtccttgttgattggcatttggcaacaaacttttgtactttactcgatacgcttgcagagttgcacaggtagacatgcgtgctactggtgtctacgacgtcatgggctcatggcctcgagccaaagcagttccagactactgctgaaatagcaaagcggtctaaagttgcgtcgatcgatagtggagatgtgattattggccatggcggcaattccgcaatagagagtgtccacgatcttgtatgatatggctgcatttcatatattaatgcctactatatgagacacccagaaatcagaattccacggatcaatttactgttggatatatagctacatgtaatggtatattttactgtcagatggtacatatatgctgggatatcagtaaaaaaaaatctatcggttgatccgatcatccgaggatagctactctaaaatcacgtgcatagtgcaaaatgcaatttcatcaagtgaacattgcatattctgctgtttggttttgaactgcattatgtaataagtaatacgtattacacaaataactccttacacatgctgatgcattcatatgtgcagattctatcgttagatttgagccacccttgcctcttttgcatcgtgcaagcaaaactccagttctgaggagaaaaatcattgcatgcaattaaagattccatacatataattgcatttgggaaataatatatattaacaggatgaatcacgtgaatagaaatgttgggggcattctttgttgtgtggagagatacattgctttcgagttatgtaagctagcatcctcttgttgctgtccttttattttggaagatatagttatcttaatttttgaaaaagaaaaaaagaatcatgccttataagttatatgttgataaaggaggagagtttgtgtgagatatgtacaatggggttttggggatcccgtaaacctggggggaaaatgttatcttaatttgcatttgatgtaaatgacatgctattttttttttctgaaccagtgcagtggttccttttttttttttaagaaaggactaccagtggttccatgatagtgatactatgacatgctgcttctttgcattcagtgagtataattttgttaggatatctcaatgtttgaatggaagggacatttgtatacagtgaatgttttctcactgaggaagtcaggaagttgtgtgctaaactgttatccctgtattttttaatatataatcttgtttatttgttggaactaacctggtttataatgtctactctgtatgtgctttttatcctgccaactgcatgggggccttcttcagtttacttgggtatgagcaactaagtcctgtcttatgtatcatttcgtatgccttttcctgggtaagtaaaggtaaataaacatgtggtaaattgcaggtggctatgacatagaagataaggctgctagggcatatgaccttgctgctctgaaatattggggtgctaatgctaccactaacttccctgtaagtgtcacgctttcctgatttcctaaacagccccccatagttactgcaaatatcctactgaggtcatataagcagtttttttgtgcctcctaaaatgtgtgcccttatcccgcacctcatattgtagtgatcttagtgtacttctaatgtcttatttacagttaatccatagccttaaaatttgagatctttgtcaaccttcaactgttcatttggattcatttatgctggttgtggactgagacatactcatgtattcttaatagaaagatacacatcattatcgtcgcaaaagaaaaaaggaaaaaaaaacacatcactatgtgctcacctttatgtggagctgtgtgcttagattggtctctttattttaggatgcattcagaactattatcatgtattgctatagttggtcatgatgcaactgaaatggaacttgttctcttcttagaaagaaagttacgtgaaagagattgaggagatgcaaaagatgagcaagcaggagcttgtagcctcactaaggaggtttgtatttaaaaccacgttcttttgctgtgctacaaccacaggaagttcaggcttatatacgtgtttacaactttctcaattctcatgcaaatctgcaggaagagcagtggcttttctagaggtgcatcgatctacagaggtgtaacaaggtaattttcaactacatgaaccaatcaaccaatggtcatcttctttgtcagttacaatctgctcaacttcctgctattttccccaggcaccaccaacatggccgctggcaggcaagaattggtcgtgttgcaggcaacaaggacttgtatctcggcacctttggtaggagcctgttgttctgatgccccttatatcgaaaaagtagtatgacagtatgctttttttcttaagaaagtatgctcatagtcatatatggacaagtgaccatattatagtcttaagtagttaagttatatggcagaatagtcatagataccttactgtttcttgaagtgctgttaatgctttgttgttccctttcaaataagttactgtcatcttgacacaattattatcatctgtgtaccatttcatttgttactggttttacagataatctacaagctatgcactattcaatctcgctctaattcccttactgtggcgacattcagaaaccactatattttgcactctgtgatgcatactaaaccagcatacttgcacattccttgcagcgaccgaagaagaagcagcggaggcgtatgacgttgcagcgctgaagttcaggggcgccaacgccgtcaccaacttcgagccaagccggtacaacctggaagcgatctctcagagcgacctcccgatcagcgtgtccgggaggcggcacaacagcagcagcaacagcaacaatccagcaccagaagcaggaggccaaatcactctgatgagcagcccgccgatctcccagcagtcgagcagcgcgccaccgtatctcatccacaacctcctgcagttccagccatgtggtcccccatacgcaccaccaccaccaccaccaccaccaccaccaccaccacaggctcttccgctgccaggatcgtacaactttgcagagccagtaggcttctactggccctacggcgatggggaggagcagaaggttcagctcaacagcaacatggttggaatggctagtggtggctttcttcatctggccaatgctgccaactgatcccagcgtctgcaattgctggtgttgtgtggttcttgtggagattccgagggagtgagattttgggtggatataggaagggggtcttttggcttttgctgctgccatggactaacaacctgaacatagataacagctggagtagtgaacttgactatgctcgttacaacaacagtgggtctaagctcaaaatgagcttgtggtatgccccagatatgcttagttgttaattaatggtttattttgaacaaaagtggttcatagctttctaccatgttgtatcctttttaagttcgcgagtaattctgcgacaccggatggcctcgacctgctcatctatgggttcgtggcgcggcaacctatcccgtggctgctgcttcgagcagacctgcttttgttctatcagccggagcctagaacatcaaagctttcatttgcactggctgtaacgagcagcaaatctgagcaacaacgcttcagagcttgccgggacagtactgcagattagaagcacaggaaagacagtgatgggtacaaaagaatcgcacgattttagagcacatcaagcagtccgtagataacagtaaaacgtttgcttttcgtcaccatagattaatacagagaaaaagaaaatgatgtccacagtatcaaatatcacacatttcactgtgtggaagcactcagtttaaacacattctttgtagtgctcggtagaactttattctgcttggaacaaccaagcaaatattgctggcaaagaacacatgaaactaatctatagtctactccacgcagcaaaatggtgcaaatggtagatcttggagagttcacgtctttatggtttcacttgaggaggagactcaccctgcagagcaggatcagatttgacagcatctagtgtcttgaagaactcctcagggagtgcaacaggccgatgctgcggaacatgtttcgggataagtgtgtcatcttcaataacctcgcattcatagtcatcaggaacaccccatgggtcccattctgccatccattaaaacattgtatattaaacaactgaggctgtaaggatttatatcaacaaacagaacaaacatgtccatatacttaaggtaaaagcctaaagcatccccataaaagaaaagttgtgctgtatgcaatatttgcagagttcagacacagacactgtcagagatcttaatcaaggcgttacagttttacttgcttgtcaagccatccttgtgatattttcagaacagacatttaagttgattaaggatgccaatctagtgttatagttttgataatttagcaagctattgataaaaaagacaaatgatagtagacttgcatttgaaaatcatgttttagccaaatggtgcttttctttaaaaaataaaaaccattctggcagttctacaggcaaacatatggatgacagattgaaatgcacaagacaatgtatgcaatgcacatcaaaattgccaaacaaactattcctcataaccaattttgcttctaatattctacacattattcagttgatcgacaaggtctatatgctacaattctctatgtccttcatacgggtgagcttggtcattggaaacaaactgaaccatacatataatgcaacagttcagaatatcacagagcaggctaaacagacttaagaaaaaaatgtttctgcaaagcgcttaactcatgcacccaatctgtatcagttgctaatggcagcaacaggactgatctagacagctatagttgtgcaccttatgtcgtaatcttattagatactcagtgtaaagggtagtggcatggttacgtgaattcttaatcactattaagttgctaatgccatgcaaattataatatacttcctccgtttcagattgtaagtcattctagcatttttcacattcatattgatgttaatgaatctagatagatatatatgtctagattcattaacatcaatatgaatgtgggaaatgctagaatgacttacattgtgaaacggagggagtagttacattcattcatagttctatacaaaaaacaatacactgtattgagatttgagagagcatcgatcagtgagagtgctctggattggtaagatgtgcatgggacatgggtgagtgattatttggttcagcctttttttccccagtcgttcggcatggtatttgtaaagtttatttcaattaggtgtgatgaatagactttagatagaagagaaatgctctacaattacgaagattgtggagcatatttcttcttactcacgcaagtaacatcaccatattcctaattccctctctatgccatatcatgtaaaatggaaacctatgtatttcatttgaattttcacaaaacaaatattacactgactcactgggattctagcaaagaagaaattttaaagcactgaagtaatacaccagtacattactacatgcaatgcatagcaccagcccaacgcctgaactagattccagaccagccagattttacatacatggcactccaccagacatacacaaagcaacagtatggtgaatatggcaatgaacacactctggttaagttacaagcaccagtcagttcacaaaaaatcttaggttagtgaccaaaaggtaaaatggaacatccatgatccttaaataagcgctgaaaaataattaaggcattttactaataggcagcacagcagacaacctaaaaagcattccatccccccccctccccaatcaacaaactggcaaacaccatactgtcaacgctgataatttgccctaccagtgctattaaagggagccaaaagaaaatcaaataccaatcgctacgatgttattgtccacggatcagttgtatatcggatcaaataactggttgaatcaaagaaatgggtagccagtggccacatctacacatcaactaccctgattcttgtcgacagatcagtaggaggaataaggaattaatacaagaagtaactaaataagcgacaggaatggagatggggcgtaggggagggggagaaatgcggaccgatcatcttggcgatgagcttgagctcgtcctgggcctcctcgatgagctcctcgacctggccgcagccgatgcggtcctcgatgcgcttccagtcgtcctcctcctggcagatctggaggcggtggcgggtgaaggactcgacggccttgcggtagccctcgtccttggggacggcctcgatctccttgagggtgcgggtgtagaggccgacgagcacctcccgcgcgttgggcaccacctccagccccacgatccccgtcgtctccttcacggcgcgcgccgcccgcagcgccgccacccctcccccgccgctcaggatccgccgcaggaacatcccgccaccaccgccgtcgtctctctctctacctggtgaggtgcgggaggggtcgcgaccgtgcgaggatgctggtgtggtacgtgcgactgatgagcagcggatggggaattgggggagagaggatggagtgggctgtgggctgtggagtgtgtgtgtggatcatgggctgcagaagcagtaggccgcaatgttgaaatcctgccgagcgaattgcgaattcgagggccgcgcaagagcacccgcaacggtaaagtaatgtgctctttataaaacatgtacatctcagcaatagactgattaatagtaaaccacctcaatagtatgtctacataggtatctatagctctctcatcaattgcctctttttatctatagactatctccaagttagtagatagttttactctctctcttttcatttaatctcttccaagtaggaaaatatgctgacatggatcttttatagaaagcttatagataaccattgcgggtgccctaagggagatttttcaccagaattagaagtttttttaaacagttcaacctatcgttccgattcttagaacctataaaatgaactagaaactcagaaggtagaaaattcagctttttcatattctcagaagctgactactgaccaactggttcttaaaatacctatttattagagttacaacttctaaatttagtttcaaaagttaaatctagagtgaagtagtggagcagcctaaatctagctccacctctttagttcattttgtgagagctttacccaggcacccagctcaactgagtgaagctagctagtctcctttataagagcatctccaagagaatgggtaagtgactctccaagccaaattttagccatagcagagaaaaaatagcctccaacagcatctccatcccactggctaagctatatggttagccaaacactccccccaactagctaaatctagccagccacaaccacatccccaaggctggccaaatgctctccccgctacctcttccgatgcaacggcgaggagtagcagcgttgccatccgttgcagcaccgccgtccctccgagtagcctcactctctctctctttagcactgccctccgccgcctcgaacaggtcgtgcccagcgcccgccgcggtggacgaagtcgacagcggcggcgtcggcggcgtccccataggcgtggacgacgctcgctgctgctgctgcatcggcacgccgtgcgagtggtggaactgctgggacggtgatgagaaggagaagtcttcattcggccgcctctgcaggtcgcaaccgcggcctccgctcggcgtggcccgccccgccgctcgccgcagccgccggcatccgctcggcatagcgcgccgcctccgctcgtcgcaaccgcggcctccgctcgccgctgcctgtcgcctcgccgctgctcgctgaagcccgtcccgcacacccgtcgccgcagcatcagaggcaagtccagtaggaggaggaaggtttatgtatgagtggggaaaatggggtggaagaggaggaagaaggttatagagactgacatatgggtcccattggttatagacttgtaatggagagggtagatagggaggctgttgaagcgagcaacaactttaacttgctaaatcaaatgggtagctggctatatggatgtttggagagtctattttagagaagctgttggagatgctctaagagatggagctaaaactagagttgtgacaaacaaaccctcaagttggctagtctactatgtttaagtttgcatttgtaccatacgatgcacgatagttttcatgcagtagtaatacttcttcagtaactagcaaattacccatgtcatctaatggtataaaaacaaaccggtttgccgtgtttttaagtaggcagttagtttttactctctccgtttcacaatgtatttatattgatgttaatgaatctatatatatatatatatatatatatatatatattcattaacattattattattatgaatatagaaaatgttagaatgacttacattgtgaaacagagggagtagtttctaaaaaacattggctggtttttctagagaaactgttcgttttttttccctggaaggacagggcgaacgatcaattttctagtagcagttacgtgggtgggggaaccactcccttctatgcagagaagagaagataaaccatcgccgccctgcaggttttgtttattcttcttgtagaaaacaaactcgcagataattcttctgctactgcctactggtggagtggtggttctttcccaatctgctaaggtagattgagatccgctaagagcatctttaacagcctccttatcccactttccaagttatattatagcaattttggctcaaatttgcactccaacagcctggctggccaaagtcgctcgcgctggctaaatcgtgggccccacctctattctctctccctcctgtagcctctctcctcctcccaaatccagtgccgcccgtagcattctctccgccgacgccgcccatccgcgccacccctccgccggcgaagagagctccctccctgtgccggcgaagagagctccctccctgcctgccccaccatctgcccagtgccgacgtcgtcgtcctcccggctccgtcgtcgttgtcgccctcacagcgccgccgccgtcgtcctcccagtgtcagccgccctagcgccgccattgtggccttccctcgccgtcgcctcgagcctgccttgcgtgcgcacggatttgccgccaagagcggcaccgacgggtggagcctgagcagcggcggcggcggatggggacacagcccgagcggcggtggggatggggatggggcggcggcggcagatgagagagggaaggggggtttggagagaatgggagaaagatgagggagaaggaggtgtagagactgacatgtgagcccaattgtaataaactcaaaatatagaggacgaatagagtggctgttggagtaaaagacaatttgacttgctaaattaaatggagagttggccaaatagacatttggacagtcaaatttggatagactgttagagatgctctaacctacttatatttaacttatatcattgatatgtggaccctctacccaataaactcacgtatcagtgactcaaagtcagaaggaagaaagtcagagggtcctcttccggctaaggttatatggaactacaaccgaacagatttttagctttccttctctcgccaagaatttgcgatgaactttgggcattgcagctgtaggaaacagaagttcaatatcaagttttatagaatcgtggcatacattgccgacatgagcatacgagattgacccagagaagagtcgatttacagactagcaatcagccacccctactgatatgatattgacaatttcatttccgttttaatcacctggaaagaaacaccaggcatgactaggttctcctaaacaccgtcaagtaaacgctacgttcagtcacctgcaagacaaagtaagaacatcagatggaattaaagaatcttaaaactgaaaaccggctgttaaaacatctacatcttgtcaaaaaaagcaatgcacactcctaaaagaaattttcttgtgcataaccactataggattaatacttctcatcactcagaagctcaactcatatatgctcccatttcaacatgaggtgtctatttaatttctaggagagcttcgaatgcatagagttctctgctcaatctaaagacatgtttcatttccaatagcttgaccagtcaaagagagcggtaaataggctgagtcattcaaaccaaaggtagctagctagctccctgccttctcatcactaaataggctgtattatacactcatttttctttgttatatgcagcatgagttaatttctccttggtcttggtgacaaaagtaataggtctaacacatttggatcgagggagtacttacgttgtatgccaggctctcctatgtgtcatcactcatttgctcctatggcatgaaccgcacctggctcatcccacctgttgggtttaaaacatgtccgtgctgtcagctcctttacaattgacggtttatttaagcctctattatcttatcttattattatagtaccaatatatgaatactgtcacatgtacaatataatctgttttttcaagtgaaaatttcatattgctcagcatcctaccttttttccccctagagttacattgttttgaatgtgatccaggactaaagagatctgacaatgcaaatgatcctacaagatatctacaacgtttaatgctcatgaagttacttgccattttgcatagttttagtttctataattattgaagagatatgaaccttttgactgttgactgatttacattttaattacaggacacccttggaactgtaaatcctttcatctcaaataattttatgtaacgaacaagttggctttgagtgtttcatctacctatatgctttgaggtgatagttgagtgtctttcaagaagagattgttgggttaagcaaaatgctcaaggtagtggacacaaagaacaaaggtgtaatgttagaagataaagcgattgccggcagctactcgaggtctcacgaagacgtgactagagtgacgaatgtagcataatcatggttaattgtttgttattaggatagtattgtttatttcagaacaataaattgtaggcaaattttgctacaggacatcacgattttatggttttagctataggacaccgcacaaacttacttttagggaaaaacactctctaaatgtggttatttgccagtggacaccgcgtccattataataatgtattcgtgctgacgaggcaataggggacccaaaagtttacgcggagtgaccaaactgcccctgcgcgttcaggtgatgtttggcagcagcttcttcccttcctctctctacagctacccaagaacatcttctctcttcctgtctgtttctctctctaagctagctatattcaaatcaaatatcagatttgatccacgataattgatccacaggattgaaaaaaaatcagattcgatcaagtctttcatcctgcagaaaaaaatcacagaggaaaaagaaaaagaaaaagaaatgacgatggagctcgctgccatctccaacacctcatcgtcgctgtcgaatctgctttgcgacatatgcttgcctccgccgcgaggagctcgcctccgccacctttcacttgcttcgccgacgtcccgccggcactctgcgaccagctccactgtagccgttgctcgctccgtcaatcatcgagaacctgcttgctccatcgctactgctgctcccctcgccgacgccctcagtgccgctgctcgctttgctaccgtggcttgtgcgctgggtagggcttggagctgctgtatttggggctgatttgaagctgtgcataccagcggtgcctcctctaactctaggaggcgcgggtggtccggcggcgcccacggcatattcctgcggccgtggcactagatgtcgccgtgctccacctcctccgcctcctcgtcatggtcttgctggaaacggttgaggaggataaagggaggacttcccctcaactaattttactcgagagcaaaaggagcagccggatttggcggtcaagcggcgacgactccgactctgccccgaccagaggtagaagataagcctgacagatggggcccctatcgccaggggtagtttggtcactccgtgtaaaatttttgggccccaatcgccatgtcggcacaaatatattattttaatggccatggtgtccactggcaaataaacacacttagagagtgtttttccccaaaagtgagtacgtgcggtgttctacagctataatcacaaagttgcaatgtcctgtagcaaaatttgcctaaattgtaactacacttcgtaccacatatttgctttataaacctatttacaatattactagaaatcacacatttaaaaattaacaaagatggaggtgatagtcacgcaaaagcacgataaattattagttgtcctgataatactgttaattacaaatcaagataaatttgttaacgttgtagttacacttcctgacaagtatgttctataattgtatatttgcgttgttttgttattgcaaatttaagctaattgctgcaaacatgtaagcatattcaataaagagggaggttatagccacacaaaagaacgactctataggctagttattacatattaagtgcaagaaactatatgtagatgagtgcacaagcttttcatgaggcatggcaatcatccatgtgtatgcaatactattagttgctaaaagactataaattgcaggttcaaatgaataactagatagtaacagcgattaacattcaaagcaaaatgacattcaagtatctggaacagagaaacaccatactcagattaataaatttaatagagctctgcaagtgagtacattagggtaactcagattccagcggagcaatattttaataccttataagccaaaatgctccacttcttcatcttccccttcatcctcatcctcatcctcatcatcctcagaaatcctgaaatcttctaatgccgcctcctcttcctcctcatcagcatcatccatcatatccgtagcacgatttttgtccttcaaaccagtgctgagcacaacagtctgtcctttagagttttccatgtctctttgcaacctttccatgttctccttcctacgctcagcctctaacctctctttttcagcaatcctcttgtcaagatcagccctgaaaagtttttttataacaaccacttatataatttttgctatgcatatatcagtcagagatagcagcactacatcgcaagttaaaacacctgtaattctccatgtattctttggcacttgcttcaatagcttcaaaaaatgaattgactccagcgccagatacggcagatactccaacagaccgcagatttttgtaaaactcatccaggacaagagagaggcttcgggtaaatgtagaggagtatgatgagtcagaatccaaggcggtctgaaacgcctcaaagtcttccatccactgataaaataaacaacataatctctggttacagaagatgtagggaaaaaaacagataagacaattaactaacaggcccaatcaaatttgagcaaatatcaatcaagtgcaacagtttcaacttgattaaataccaaagagagtcgttgcataatgccgataccgcattactgaaatgcaacacttatggtgtccagaatcaacaacaaaggaattagatattcatagatggcaaacatacctcaagagcaaactcatgcttggcaacatcaaccttattaaatgtcagaatcatcggtaagcgggtcttgtacagaatactgcaggcataaagcatgttgctcatgaaagtaacagggctcgttgatctgggggtgtcaacaacatatgcgacaactgttggaaatgtcgatgcaaaagcttctgttatgatagctcctgaagccgaccaagtgaagatttcaatctgccctggcgtgtccaccaggacataatccagctggtcggctcgtctttcaataacagatataacctgtaaagacaattattaggtgttacatatgatcattagcagaattgcatcatgtgtcaaccaaatttatctgtacactgcagtaagcaaaaagcaagctcgctttctgaaccactttacatggaattgtggaaatattatcccatcaacatgataagcagactgcattcctttaacaaatttactagactagtcatcaacccgtgcatctgcacgggctaggggcatattttctacccttatgtttattttatatcattattgacatatttgttaaacattataattttatattatgttgaccatccaacagtatcaataagctagtttgttgagaaatgaccattatttagtgtttccctacacacattccatacagctattagaaccataattagacactgtgcaagcatctccaggtaagaattgaaaagttacctatgcagaaccaattagtagcatacatgcacgataatcttcctataaaccaaattaaattagcattcattacattgtatcttttaagggaacaggactcaatctaggcaagtttatttgggaatctctatgtgctgcatgacaataacacttctaattgaatattacgcgtgtatatgtgaaatcttgaactatttagaaactattaatgaaattgaactgtcgaaacttatcgctgaactcttcactgtccatttctgttgctccctaactaactatcgttgcatacaaactaccattgaagtgattaaattgcctaagtattgcctaacttggtattgaagtacttcctgatagtgtgcattcaagtaacccaatcctaacaaccacttgatctaaacacatacggagatgaaatatatgatgatcgaaaagcacacctcgtcaaacttggtggagaataggttgagagaggtgaggataccgccattggggccaagaccatactccttcatcacctccttgtaccgaacggtatcacggatatctatgttggccccaaacggcagcgtcatcaccgcagggtcaaggttgagcacataacccctcatgtttgaagcctgggtgtggcataccagtcggtgcataaaagttgtcttccccgtccctacatcacataaaccgagacccttgaggcctgagctcccaatcccaaaattactcaacaagagctcattgtatgacaggttggttgccactaaacatcaaaggatgaaccaatcagcatgcgaaatcgatgtaccggccatgccgatgacgatgatgatcaccggcttcttcttgaaattggtgcgctccgggccgatggagaggctcccgatggagtccgcgagctcctcgctcttccccttccccttcgcgtcagtctgcacagggtccatcatcaggggcaaaaaaaaaacagtcacaatcaaaaactgaaggtagaatccccgtggggaggagtcgggcggcggcggcggcggcatgcctggtcctcgaggtccatctgggtgggcttgcccgcggcggctgggtcggagtcgacgtccatcggcggtggcgcggggagaaggcggcggccacgcggcgagcgggtggaggacaaccgcccgctaaaaccctagagactactgcgctgcgactgcgaggagaggagagagagcttgagaaaggaggaagtggccgaacgtggatgggaagggagatggtcagtactcggcagtgtgaacatgctttaaggttttggacttaccgactttagttgacccatgctggcccatcaaattttgcgggctgacccacaaggtttcgtgccggcccatcatctgaagcgccggcccaagcacggtagtggcaaatgagccgtgccggcatgacccacaggctggcgtaccgtgccgtgccgtgcctgggcctaggcatgagggctgaggcaccccggggaattccggcggaaaaagtacaccgaaggtccctcaacttgtcatcggatacaaaaacatcctcaaaccgcaaaaccagatatgaggtgtcccttaactatacaaaaccagtcacccgagatcctttagtggttttgaccctgttttagcctacgtggcgcgtgggacccacatgtgggcttgccacgtcaattcccctttcccctcttcttctctcccttcctcccccctctctctcgcactcttctcttgcaggctggccgacgggtagggagcagacgaccggacggcgaggggggttgagcggcggacggcggaggcagcgtgtgagcgcgcggcggccggcgaagcggaggcgcggagctgcggtggccggcggatggggagcggcgccgggacgtcgtcgacaggcgaggatcggcggggagaaggggtgccaggacgggaggcagctgatggggaggacaaccgacgagcagcggccgacggggagacgggacggcgtgcatgcctatccgggctgccaaatattcgaagcaatggtacctgcggaagatgagataggcaatcaaccattcaattcaccgcaccgaacactgttgtttccaccgacaaaactcgcatggcccggagatcgctgatgcacagaactgtggcttccctagcatgaatttccatgtaacttgggacaggatgattgttgttagcttgcttgacaccggagttggctgacggatgcctggtttcggtctggccacagctgttgcgctatcgaaatctcctactccatgcagtagctggtgtggcacatgtgagtgacttcaggaaaggaggacatggacggaggcgatcttggtggcggcgcaaacggggcaagcgtcaacggcggcctcgcaggcgccgcacaggcacaggcggcagcacggacgcctccgtgacacggcaggccttgcacgacgtcgccccggacaccgcgtcggtggcagtggcggcggcgccgccgcctggggtctcgaagcagcacgactgcgcatcctcggcgtcgccctcccccgcggtggcggcgacggcatagggggactggaggagctagtcgagcatcgcgcggaggccggcggcgacagcctcgtggctcttggcaacgcccatccacgcctgcccttccgcgctcatctggcggagcttctcctccagctccgcgttgcggcagcgtgcgcgatccagcttggcctccgccgcacgcgtcctccctgttgtggcgcgcgccgcggccgccaccagcgcccggacgtgccgtcgctgcgcttcctccaaccccgcgtgcatccgctcggcttgcacggcatccaccaaacaccgacaccgattaaacaccactcaccaaacacaaacagaggaggccggcggcgtgagcgggtgcgtggcctcgtcgtaggtgaagaagagcgaggcgttggttgtcgggatgggaggcctgttcccacgtcgccgccgccaccgcgtcgcctgtcgccagcctagagagaggtaaagtgagacagagagtaaggacgaagggaaagagagagatagtgatgacgtggcacgctgacatatggggcccacgtgggtctcacgcgctacgtaggccaaacccggggacaaaaccactgaagcaactcgggtgaccggttttgtatagttaagggatctcgcatatttgtttttgtggtttgaggacgtttgttaatcccgatgataagttgagggaccttcggtgtactttttccaattccggcaccccggttctgttcccgtatggggccgacgaactgagcggatctgccgggaagaatcgttgggcttgatcagacgaagaaggcccaaaatggaatggccgggcccgtcaggaggaaataaaagagacatggaaaagttcgagtaggccccgcatatgctcgccgaaataggaataagttcacttcatgaccctcaaatgtgatcgaaccctaaaccacaaaaccggatatctcgacccccaaactcctaaaaccggtgtaatttaaccacctcgacggttttgttaacgtggcgtctacgtggcgatattggtcttcgttccatgtggcgttgacatggcacttatgtgacagtagaattaaaaaatatatatggaaccattagtcattcaaaaaaaataaatgtgggcccactgacatttgcttcgttcttcctcctccctctctcccttctctttctttctctccccttcttccccttcggccggcgggcgggagggcaacgagagcgagcggcggcgggcggcgacgaacgcgcacggcatcattatctgactgctccccaccacgcgcacgtcgccggcggcctcgcatgtgtcggagcggcggctcgtctcgtagcacaccggcttggccccatcgccgccgcccggtgggcttcgccggagcggcgacctcctccgctgcagcatcacgaggagaatcagtttaattagatctggtcgcggaatctcgcagccgaatccacgccattctttagcgcaaaactccagaaagcccaagaaataaattatgaaccaggatagcaactcgccgggagaaaaaaattcaagaaataaattatggatgcttcgattccttttcctttttttcttctcctctagtccttgtttgaactaaagccaaatcgaaagaacggatatgaaatcgccaagaacgaatcagccaagccagctcaagcaatgcgctgcactgcgccgctcacgcgcgagcagatccaagaaacacatctcgtaattaccagctgccgacgacaacgacgaggactagtcgccggattcggtgttgacgacgacgtgattggtggtgacgacgagcttggattcgtcggccacgagcttgagggcctcgcctccatcactagctgcgaaggagaacctccaaatcagctctcgcctctcgccatagcagcatccaacaaaacaattaacagcggcggcggcggcggcgagaggaagaagaggaggatgggggagaacctggcgcggatgatggagagcgcgatgagggaggagagcatgagtgccaggacagccgcattcctcagcctcctcctcggctcccctcctcacctcgccgagctcctcggcttcttcttcttgcctccctttctccctctcctcagttgccgagctgggaagctgagctgagctgagcaggtgggtatggggattagtagcagcaccggcgagaagctctcctcctccgggcggtggtggtggcgggcgccggagatggggagtaggattccgggctcccagccctcgcctgccctcccgcctgccgccgcagttccggcctcgccgcccgccgccgctcgttctcactgccctcccgcccgccggccgaaggggaagaaggggagagaaagagagagaagggagagagggaggaggaagaaggaaagcactgccacgtgggccccacatatcagtgggcccatatttctttttgtgtgaatgactaatgggtcccactcatattttttaattctactgccacgtaagtgccacgaggaacaaagactcggtcaatattgccatgtaggcgccacgtcagcgaaaccgccctccaaaaccgccgagggagtcaaattgcaccggttttaagagtttgggggggggggtcaagatatccggttttctgatttagggccatggattagatttcgatcacttttgagggtcacaaagtgaacttattccgccgaaataatactgttgttccggggtaccacgcgctgtctccagaatcgctaattctctcacgcgcgtatcaggcccagaaggcccagtgccggcccgctagcgcacgcctcccacgtcttttttttaccgatatttttcttttttacccacttttttctgaatatttttttaatcttttagcatgttttgagtttgaaagtttttaaattttgagctgaaagtttttaaatctcgacttgaaagttttcaaatctcaagttgacagttttcaaaattttcaaatctggacttaaaagttttcgaatatcgagttgaaagttttcaaatttcgagttgaaaatttttaaatctcaaattgaaagttttcaatttttcaaatctggacttgaaagtttttgaatctcaattctcgagttgaaagttttcaaaatttgactttagaatttaaaacttaaatcgaaagttttcaaatctaacttaaaaaattttcaatatgttagtaaaaaaatctccaaaaaaaaatctccagaatctttcctaattactatcattagtgttaagtatattactaatagaggtagttaagacttaagaggggagtgctcgctagcgacacgcacgcgctagctaggagccccccgctgtctcgccatttcatggcttagtaacatctaagaaatatcggagtgatcgtgatcggcgtcgaaccaacatctcatgaatttttgcaaatcatgaaactttaagcatgcctttaagcattcccatcgacgtaagatcagattaaggagttaattactactagcaaatagtattaggaatgacctaatattaaataattaaaaggggtgagactttaaacccaggtcgtctttaaacccaggtcgtctagcccatcaccttatgaagctagccagaagactaatggacgtttttcggagttaattagtgctagagtgcttaaagttctaaaagtttaatatgatcttacatcaaaattttatgaccaaagggttcgttgtggttggaggaagtttgtaggacggattaagggtgtctttggcacccctttttctcaacccatctctctcgttttccacgcgcacgcttttcaaactattaaacggtgtactttttgcaaaaaagtttctatacaaatgttgcttaaaaatcatattaattcattttttaaaaaaatagcaaatacttaattaattacgtgctaatggactgctctgtttttcgtgttactattccgggttgggaaccaacatatgcgaacacaccctaagagttcaaagggatgggactattaatgattctgtttggttaggagacttgagagttttggtaggataagatagagaattgagggagtagggatggtaattggaagcaaaatccttaaatctcaaccattcattttttatttaaaatttaatcttcaataaacttcttatcgagtcccgccacctctattaaagaagaggttgagactaaaaattaaattttcatgttaatctcactggtcactatcaatttttggaatgattactggctgctaaacaagcctctctgctaacaatttcaagccctgcattttcactctatgcacaaacttgtctctgttgtagtgacaattcaaatggggctgagcgaatcctcggtgccacgcctttcttcggctgtagagcagcaattgacacgccgcccaaaccctgacagatcaacaagatctcaaaaaatagctgtccccgatagatttactggagctctcaccaccaagcaagcctatgagctcctgctaccttcatctcaaatggacaagaactgccccccccccccccacccccgaagatacatttttttgttggcttctatcaaaagagcgcctaccaacaaaacaaaaaagaacctgcatgctaagacaattgtctcatccccaacttgtgatatctgtggactcaacgatggaacggccagccaccttatacctgctgtgccctttcacctgcaacttctgggcagccctctttattgaccctggaatctctgatgtacgagatgtcggctgcatttgccccctgcaactgcaaccataccggtggcgcaccatcggaccttcttttttttttttttgagaaccatcggaccttcttcttgctctgctggtggtgtatgtggaaccgctgacacgatgtcatcttcagaaatgagcaaccttccctacgactactccttcaacgctgttttgatgaagctaacttgtgggctgagcgtatccggcgccctgatcagattgtagtttcagcctggaaagaaattttctcccgtcctatgcaactccaacatatgtaatggcaacggcactgtcgttctgcccgtcccatataaccctctttgtaatgaaacctcttatcaaaaaaaaattcaagtggggaatctctcctatccggtgattatccaaaaaagataagtgatcactatcaattttcttccctcatgttaccaaacaaatccggaatttctctttctacacaactgtttgcgtcaacatatagatttacggtcaataattctaggcagcaagcaaccagccaccaccagcagcatcagcagctagcaagttcgcgatattcgcaagcctgccagataatcgtgcccacgctgccggcgaatggacatgcatcccttgtggcaaattcggcgtgcagtggatatggatttgcccacaatctctgaatgcaaccacctgaacagtcaaataaggtctgcaagcaagaacaaagattctttgcggccggcgaacgactttcgacggcccggcgagaaataaaagaacaaggattttgatactacgctcctgttttggctagctgtttcccctgcaagcacatctctccttccccatccactcatctttataagctccaaccagcgaaccgaagacacaacacgcatctaacatctgtacagctactcgtactagctaataacttgtctgtgtaattggcgctatggcgttaagcaggagaacgcgccattgcctggtattactacttgtctccttggcattgctcccactgggcatggctacggatcccattggcggctactgctcggagtcggggacgagcgatgctgaaattaacggcaagacgaggcggcgcagcatcaactccgtcgtctccgacctcgtcgccaaggcggcctccaacggtggctttgccacgtcctccgccggcaagggcaacaacgtcttctacggcctcgcgcagtgccgcggcgacgtctccgccagcgactgcaaggcatgcctcgtcgaagccgccaattacaccctctccttctgccactatgcatcggactccaggatgtggtatgcagctacgctagctacggtccagtgcgtcaatattcgacagattttattccacttaagatacaaattttacatcagttttcatcaacatgttttttaaacggttgaatgatatattttatgaaaatcttttctatataaaaagttgcttgaaatattaaataaattaaccatgtgtcaattggtttcgttatttttcatgccctaacattgggccggttcattttgatgacattttcaaccttatcaaattttggtaatgttgtcaaaaagtggctacatttagggcttgtttggttctttaccctaccaattcattggtagtaccaaagtctaggcaaattttggcactaccaaaatattggtagggccaattatttagctaacatttggattgctatcaatttaaagccaaattcttatagcatagtgaagaaacttctagactatgaccaaatattttaggggcactatcaaatatttggtctcaatccaaactaacacacaaactattcaatttgccaataaattggtagggtatgtttttggcatcaaaccaaaacggcccctagtttgctgccaaattttgataactatataaaaaatcctgccaaaattttgacaagttaccaaaattttggcattatcaaaatttggtaaggttttttttttcatcaaagtgaacatacccgtcatcttcatcttcattaaaaacaaatggtgcctggctgcgttcttggttatacattttacgttcaattggctgttgggtaggcttttcgattccacgtcaaataaaataaaaacattagcacatacttaatcgagtattcatgattgctaactgaaaaatgttatttaatttacaagtagccgttccaagttaccgtttaaaactcagccttttgccgtaggctttaatatggtactgtatctttgtcccgtgaataatttacttcctccgtttcacgatgtaaaactttctagcattgactatatttatttagatgttaataaatctagacatatgcatatgtttagattcattaacatctatatgtatatggacaatgctagaaagtcttgcactgtgaaacggagggagtatatatatactgattcaagtttgctcttttactccctccgtactaaaatataagagatttacgtgatgagaaaactatatgtatgttccttttagtgacttggtttgatcaaattgcactaaaaattttgcttcttttaatctataccttctatatatatatttggtacccactagcaaatattacaagctaacacttaatatagaggtattccacagcatcgcctattaaccagtactgacggagcgtggggcttctcaccgggagaccgcgcaggcccccctttgccggttcggccgggggcgctaagtgaggttcttcgccctcgatctgaggaacgtcagcgagagagaaagtgcacaagacacgggcgacgtagacaggttcgggccgctgagaagcgtaacaccctactcctgtgttctggtggatctgtgcgtgaaggaataccgagagccccccgcgagagggagagttcaggctctcgaaccccctccttttaggcctgggcctcctttttatctgtcaggggtcaccacaggggcctctagctgcctaagaagggaaacatgctttttacaatgagggctagtctacagccggaagtgacctctgacaagcagagcacgcgcctcctgccccgctcgcctgcttttccggtggacgcccatttcaaccttcatttaatggccagcgacttccttgtcatacttgcgctgaagcctggaatggatctgaccgggactgacataccaactccaggagttagcacgccggctccggctagggacaagagccagaaagctcttatcattccgacgggacggggcgaggcgtgtgacaggccgcctgttgccacctaacccgcgatctgaccgatctgtgaccggtcacacaccgcgactggtcacggaccggataagcgtgcgctgcgccgcattgaatgcagcgtggtgcgctcgtccaacctgctataaatgcggttaggtgagccccgctgtgctcacctaacccacacatgtggcgccaaaaccgcagggggtcggggcgccccagccctcggggccgaaacgggggcgccccagccctcggggccgaaacgggagcggtccgacccctcggggagacagagggaggggtggccacgtcatcctcgggcccgacccccccgagggggtcaggccacgtgggtgaccgcggctatccaagcctctagtcacgatacccccagccccatgtcaccgacaagtactattctagagtataatattgtagtgtttaacatgtaaatatgtcaaatcatctttctcacatcattttcacaatatttcaatattcattatttatataatatttaacatatattcatctatgcgtttcgcagcaaagcacttggtatcacctagtttaaatataagaaggcctataagattttcttttaaaaactacgattatgcacgactgttttttttatgacgaacttatatcatgtgttgtgtgtgacgtacatacatatgtaatttcaggtatgactactgcttcatgcggtacaagaacgccaacttcattggacaggtggacacgagggtggacgccagcgtaagaattaggaaagaagaaaacatggacaaccctaagacgttccaaaaggtggtggcgaagacgatggacaaataccccaggcggtggcgaccgcggggagtgccgcattgggaagggtgaaggaaaaatacatgacgtttgtgaacatctacgggctgtcgcagtgcacgcgggatctagcaccgctggcatgtgcccaatgcctgtcgacggcagtgtccgacttcggcgacatctgcaacgccgcggagggatgtcagatcgaatacagcacctgttgggtgcgctacgagatttaccccttctattttccgctcaagactgacgggcgagccaccactgacatgacgaagtacaccaaggtcgttgtgcactgataattaagtttacaactagttatgtaaaggattatgttgtaacgcgtagcaatatacatataattaatttgtgggtgagatcttatatgacctctttgccacgatttgaaatggttctagagttaagtaaaaaaaagttctagaggacgaggtctcttataattctttgatttttcttgcacattgtctacctcccgtgtttgagtgtctcctctcctaagaccccaaccactactacacatcgatgtcttgctaacttcatgggtttttgttcaacaaaaaacaaaaacctcatgggttttaactgtgactctgaggccgtggatattcgacctgcccgttagtaaaaccgtgctctgggcccaaacatacaggcttcacacctgtgagccagcttgtcatcccgaatcgccgtgagacggtgagagtgagagggggaataagatcactttgactcccttaactgaccatcgaatctaaatcgtatccctcaactgcaatatcagaaatcttgacccccgaacttgcaaaaccggtgcaatttgactctcctggtagtttagggcggtttcactgccgtggcgcacacgtggtagtgttgacctggtttttgttccacgtggcattgacatgacgcttatatggcattaaaataaaaaaatatatgcgggacccatttgtcattcacacaaaaataaaattgtgggacccacagacatgtgggaccgacatgtcatcttctctctcactacccttcttcctcatctctcccttatctctctctctctctccccttgacatgagtcggcgacggcggcgagcgggtgccggagtggtggcagcggtgggcggtggacctcgggcgacgagcgtgggagcagctcctccctgaaatgggcggtggacctcaggcgacgtgcgacggaatgcgtcgggggagatgggagaacgctcctcgtcccagctctgtgtcgtgggcagtgagttgggtggcggccgcagcgtcgacggcgaggtgggcggtggccgcggtggaaagagagcgatagctcgctgttaacagtgaaatttggtaatcggcaaagacgtcatcggcttagaatcattatcggctgcagcatctcggaatcagccgatgggagttatcaagtcgccaatagtcggattcctgctatattcggttaaggaaatcaatctactaaaggaagcttatccctaagtgaccgagtttaaagaggatgcggtatgtcagtttatctattaattaggaatagtttgttagtttccttttatctttaggaaagtgtgtttagtgtccgataaggactttatcttttcctttttagtttctttcttgtccgacaaggacttgtatcaacccatgggtataaatatgtacacccggggtctatgtaatctatctctatgaccaatacaattcggcgcatcgccaccttttaccttttctactttattttatcgcccagtgggacttggcacccgacgtggggctgcatcgtcttcgatctccggcgaagggataagtccaatgttccgtcggtccaggcaattgtatcgtctacgttggtgtcgttcaaggctgcatcagtacattcgacctcttggattactctgctttggataatatatttgcctacctatttatcatatgtctctgttaatctagtcttagcatatcaatttagctctatcggctgcttcccgttttagggtttctgccggtatcggctaaatcgcgttgctagattagattagcttagacatctaccaccctgaaaactcagtcaacggcttgattgtctagatattatgtttctttttatacttagtgctgcatcagttaagtttgatctactaagtcgtgcttagaaccataatctctagcctgcttcttgattgccaataagggtttcatcggggtttcagtcggtgagttatctagacgttgcatcagctcataaggattgcatatacatataagttggatttagccgatgacaacaaaggcttcactgtttaatctagtcttgtggatttcatgacatcggacctccagccgatgtgtgctttgaccttcggatcgatgtttatttatcatatcattatttgctgattggtttatactggactatattattgttatattttattatcggtagccgattgcctttataccattatctacattggacgtatagccgattgcttaaaccctatcgctatcagctggtatcggcatcggctattatcggcatcggcttgtcagctgatcggctgttttgatctactatttgcatatcttgtcagttgcaggatcaaactgactggcacgcccgcatctcaacaacctttggacctgcactggagctaagcagatctcccaggctagtgtgttcgattttttcgtcaacactcgcgccccccaatgcgcggtggcgaactggcctcgagcgctccggcgtcgacctgaccatgatgcgtagcgacggctggagctcctcctcctcctccgacacgggccccctccccaaccacgtccgtcgcgagaccacccccttcttcctcttggacttgccgccggccgcgcccgtggcgacctcgcgaaggctgaggaagttggcggcaggagcagggggctcggtggccactagggcggcggggttctcgcgctcctcctcctcctcctcatcctcggtgcactcggtgtcctccgccgtgcacattccttcgtgccaccgctccctgctcgctccctccccgccgcggccgccccgcgccatcatcgctggaatcatcccgctcgtcgctgttgtgccctcaccgccacacccttgctgagcgctgccaccgccgaacctgaatccctgctactgcagcagcggaggcggcagaggcgacgcgaagactgtcggctgccgctccgtccatcgcccaccgtcgccgccgccgatccggacgccactccccacgcacgaagagaaagagggagagatagagaagggaggaggaagaagggataagagagggtggcatgtgggacccacatgtcagtgggttccacaatttttttttggtgtgaatgacaaatgggtcccgcatatatattttttattttaatgccacataagcaccacgtcaatgccacgtggaacaaagaccaggtcaacactgccacgtgtgagtcatgtcagcgaaaccgccctccaaaaccaccaaaggagtcaaattgcaccggttttgcaagttcgggggtcaagattactgatattgcggttgagggatacgatttagattcggtggtcagttgagggagttaaagtgatcttgttccagtgagagggaaatcacatgggctgctcaccgtgtgatgatctcatcaggataaggcccaggataagttactcggaatgctcgtcttgaatgcaatatattgggaggccatggaagtgaatttttgtcccttgaagggacatcttctcgttttatacatgtcgttaaaaaagttatcaaaaaaataaaaaaaattattaagatagatcaatatatgatatatcttgccgcaaacatgcgagttaaaattcgacttatacaattcgaaacaaaaataacaaatttgaccgtgaattacgcgttcaattcatagtcaaatttgttatttttttgtatttgtataagttgaatttgaattttcatgtttatgaagtgacatatcatatattgatatatcgtactaatttttttaaaactttttatgactttttaagtgacacgaggggatatcccgatttgagttttccaggaggccatgcagaatcgcagatacacatataaaaagaaggaaacaatgaaaacgcacagacatggttaaaaatgcataataaatgaatcaaacaacaacaataacaataataaataataaataaataacacaatttttcatactaggaaatctggtatacggatgaattggactgtactatatatatatatatatatatatatatatatatatatatatatatatatatatatatatatatatatatatatatatatatatatatatatatgtatgtataggatcaggatgtgttcctgccgaccggccggttgatcgacccatgcatggacagaactgatcaccacacgcatatactctgtcctgcgtgtaaaccagctagcatgaatgtcatatgcacatgcgcgcgcgcgcgacgccgcgacgcccgatcactcctcggagagcttctcgagcagcatccgcatgagcttcacctgcacctgcaggtcctcgatgtggctcgccgcgtcctggaacagctcgccgagcccgcacggctcgcggcggcagggcaccagcctcctcagctcccgaacctgcttcaccagcctagggtcctccaccacgccgcccctctcgctcccaccggccatggaccgtgccgccgccgccgccgccttgccgctatgccgccctttcatcctccgatcctcctcctcctcctgatcggctctgctcacagcttcttcagttcttctcttctctctcgcccagcagcgagctaacgaagcaggagcgcagcagccagcgaggacgggagaggccggccgcatcactcttgcgcagtagcaatgagtgcgcgcatatatagccgcaatctttgtttggatatatgcacggattgatacgatagaacgtgcaggcgttagctgatcgatcgatcgatcgatgatgatgatgatcaatcatggcgttgccggtgcgcctccatatgcgcatgtccgtggccgtcaccgcgaaccacctacaaaaggatacgagcgcggcttattctaatggcgccgttgctgcggttggccagacacccgccgattctaatagtgatcctagctaggcaagcaacgttctactactagtatattgcttcgcgccgcacacactcgatctctccatcgatcgatccgtcggccgcgcccggcgccttcgcagaaactaagcagctcagctggccggacggacgacggacggctggcttgcacttgcatgtcagtatgctgcatgcatatgcatgcatccgcttggtgtagctaggcttgtagcgtagtgtatagctaggtagccaccagttttaattcattcgctcggcgttgcaacgagaggggaggtctctgcacatgcacccacatgattcgggctatgcgcgccacgccgggccaacaaaccgaacacacaccaactcaggcatatgaatgcaggcattcattcatgcatggtgcgtcaatcgctcgcctttgtgcctaactagcgaagcgagcgatccgtacgtggcgcccgttcgtcgctgggaacaccctggattattcgcccgcctactgcacctttctgttccttgcaccgatcgcgagtatattttagcacgttaggaaggaaggcttgggatgggctccttgggatgggctcctaatcaggtagccctcatgacaccgtcattccagctcagtctgcgtgtactgatcatgtagtgcagttttagagcgagctagctaggtctcttcttgttgcaacgagagaaagagaaagggaggtggtttatattagctggccaattaactttgctgtgcattattggacgacgtctgtgctcaccttccggcaaactctaaacatactgctaatataagtgaagtttcgaagtcatcatgttatgttcggaaaaggcaaccggttgttgagttgatcataataatttgggccctgatttttagctgattctcaactgaccaaaggccatccagaagcatcggcagggcagacattagtatttcgcattccgaatgcaagaggataaagaaaacactacttcatttggtgccggttgagaaacctccatatatagatgtcagatatcccaacaggcgccatggaggtagtattgatgaggatgacttaaaggtgggtgctggtttaagaaccgatacctttgagttatatggtttgcaaataaaaaaaagccagctcggctcaattcgagccgaaccgatgcttcaaagcaaaaaaaaaaataaatcaaaaaatctaacaaaaaaaatacaagacacataaaagaatcaacatttcatagatcacataatcaaatattcacatcagagaatcaacaagtttgtggaggaagataacaaaatcaaatattcacatcaaagaatcaacaaatttgcggcggaggagccccagcggtccgccgtggcaacgtcacggggtagcaggagcgccttgaggagcagtggcgacgagcgaggcgaggacggcgacggccccgtatggccggtcctggggttttggggccctaggacaaaaacttatatagaggcccctatatatatatatataaacataactaatatatgtatatttatatagtcttataaacacacaacattcgatgtgataaaattatctatatataacattttaaaaaaagaaataaatagcagtaccgagctgagaagacgaccggcgaacgatcgacacgagcgtggctactggtgaaccgtgattctccgacttgctgtttccgtttgtgagacaccgagaagtcgagaagtcaccgagagcgcaggagcaacgagcggcgtgatgtgatcaaggcgacatggcgagtggcgtgatgtgatcgaggcgaagcgactggagtcagatgaagagatcgaggcgaagcgactggagtcagatgaagatcgcttcggctttgctaaaataggcctgacgatggactaaaatttattttctgtattggactattcagttgtctagcttaatatagacctatgacccatggactagaattatccaatacgtagtatatatactatatgtgtataggggccccctagattttgggggccttgggcggccgcacggcctgagccccctccccccaagggccggccctgtggccccgtgacgcaagaggcatggttgacggtgacgggcgccggcactcctcctgctccctcacacgacaaggacgacggcaccgcgttggctcggccacatcggcattgtgctttcccttgtgagggcgctgcagcgtcagcgtgcagcgaggggggcgaggatggcaacggcgccgtggcgcaggaggtgtggttgacggtgacgggcgccggcactctcccactcccccacccaatgaggacaacatcgccgtggggtgcccctacgtcggctcaaccccgtcggcaccacgcttccccttgcggctccgttggccctggaggcagaagggaggaggcggcatggtgaattacgactagtgatttagggaggagaagagacgagaagggaggagaggtgagggaggtggtggcttgggaaagaggaaggaaagggagaggagcacgggctggacgagaaaggaaaagaaggaagaaaagagaataagaagaaagcgaagagactgaagagacaaggacaggaggacgggagataggtatctgttgtattaaaaaccagcacttttaccttgtataaaggtgtcgttttttaatagaaattgacacctttctttgacagaaaagataggtgccggtaccatttaaaaaccgacacctatttataaaaaaggtgtcgatttttgccattggcacccttgcgagtgtgcgtgcgtgtggaaaaaacattataaatgtcggtttagctattccaaccctatagtgccgtctcctttatggctttcttagtcgtcaaatgacatatgaacattatatatacataactgttaaccttaaatgaagaacacattaaggtggatttatgtcgtatcctctaccattttaatccatgttatgatttatattacccttcttcttcgatccagctccaacgagatgacgatgtctccgacgagatggcgacggtctgatcagtttgagtttgtggttagggttaggatgagagggattgcgaaagaggaaagaatattgttggccttaattagagggatgtcaatcagagatggtggcgtggtagtgggagaggcgcgcgataccaaagccatgggagatggatgccaacgatgggctaggtaggcaacgggatgagggatgtcgttcggtgcggataccaatcttcaaaggaacaaattattcattgatgtcactcgaattacaaaacttctagttatgtacctaatacagaagaacattcagtttaattggtatttaccgggtatttttgcttaagccgaatttgagttcacagctgagcgtggtgttgcgccacgcattctcttctagtgtgctctatgcctctagttaacatataagcttataagtttcaccgcgttagctagtactaggcttttgtttgtcaagcttgtattagagagacatactcatggtgtatgtaataatgtgtgacaacgaaacgggcatatgtagacaaaggctttgcccaatgaaattattggtaaggagctttaaatcactagagaagtatggttcaattttcagtagcatcggaaaaaaaatccaaaaaggaactcccatcatacagcacatcggctttgcaagaaagccaatggacgaaacaaattaaagtctgacaattaacatctccgattgaaagatatattgcaaattctttgctggataatactccatataagaatgttttctaagggtcagcgttatacgggtattcccaaattacgcttctgttcaatgtatcatattttttttctagctatagtatacattatccttgtactacgagagatggctctttgtgcttccctacaagaaaccagtgatcaagtagcttatgattatgctccaatgatgcccccttgcatgtacatacgcgtgcgaacttgacaatgtctacgtaaacaaacagctgcagagttatataatacctagattctcattgctaggataaggatgtgggtgggtgatcatctcgttgcaacgaaaatatagtttagttagtataagagctcaaagaggcagcatctgtag

SEQ ID NO: 9334 - DNA, 102900 bp, Oryza sativa
aatcccaaagataggacctgcgtagagtggcatctgttatctgaggcctagtgtccttcctaatgatgcatacacctagtgtccttcctaggtctcaaataacagatgccactctacataggtcctatctttgggattgtatggttcagttgaagcctgttcgcaatatgagagtgtagagcgactcgtggtttgcggactacctccttcgagttgggaatggcattgaagaggtgaatgaggaaggacacatacacctgacttcggatatttgtgtgacatgcaaagggattgactcggacctcgatgggctcatggataccgtgttccccaacctaaatgataaccttatggacccaaactacatcacatctagggccataatgtccactcagaatgagttcgtggatcgaataaacatgaaaatgattgagcgatttcgaggagaggtgatgacatatcatagttttgatcgagcagaggatgacccttgtaactattacccgctcgaattcttgaactctctaactccaaacggtctacctccacatgtgttaaagctgaagataaactgtcccatcatgctattgaggaacattgacccagccaacgaactttttaacaggacaaggctagtggttcgtgggttcagaagaaatgctattgacgtggagattgtggtatggaaacatgctggtaagagagttttccttccttggatactcctatgcccttcggatgatgagatgttcccgtttcgctttaagaggaagcaatttccaattagactgagcttcgcattgacgatcaataaggcacaatgacaaacaattccaaatgcaggtgtctacctcccgaagccggtgttctctcatggtcagctctacatcgcgttgtctagagcaacctctagaacaaacatcaagattctctccgtgcaggacaaagagaaggagaaaaaaaatggtcagctctacatcgcgttgtctagagcaaccgtctaaaacaaacatcaagattctcaccgtgcaggacaaagaggaaaaaaaacaaacggtctaaacagactgcaacatgcacaaagaatattatgtacaaggaggtcctcacaacatagacgaggtatatctaatgtgcacaaagaatattgtgtactaactaattatctttgcaatttttatattaactattgaacacatttgatatttcagttgaaatcattacctactggaatatcagtcaaacttatttcatatttcatttgccgtacacaatggtttatcacatgcagttaaacatgatagatctggctatcacactcctttttttttcaattattgttataactaattcgatcagtattaattgagaaaataagattaatatactatttgcctcacttgcatgatcagatttgcagagtgatttcaccaaatatgaatatattgatatgttcatatatgtacacatatgtagaatttatttcagtttgtgtagcttcccttatgttgctaaaatatccagcgtaattgtccaactaacatgttcctgatggtatttcattgtcaataaattaaatccttcctgtatgttgaccaataagatgtaagattgttatcatcatgtctgtagtttttttgttagttggacatataagtcatctcggcatattaaattgtccaaagtagtagctggttgtatttttaaatttgtaagccatgttgatttttttccaaattaatagcaagttgcttctttgatttgtaacccaggttagttctttatttagaaagagttaacatctattacaatagtatgttgacgaatatgctaagagaatacagttttcattctgcaggttttactccttttgataacttaaagcatgtggtgaaggcaaacacgtgaattcgtggcagaaatttttgtatggaaatttaacattgatcagaacaatttgtatgcaaattatgcatcacaaattggcatatatttgatacatatcttcaatgtaccgtattttatcatttaaattaagcttctatcattggatttaaaatgtagcatacagtctatcgagatgattttcattttttttaatatatcgtgagtttttatgatggctagatgattgttacgtcgtatatttgatacaaataatcattgactggtcggattcgaattcacctaacgttatgtgtacttcaaaaaacaattaggaacttgttgttcatgtattcgtactattgtccagctataaaagaagatacatatatttcatgcttaaactttcttttcaagtatttttttattaagcaaattatctacttattacttcccttttatggcattggctcaaattttagtcacatgggatcgtgagtgattaaaacatgtgatcttaaattgatatatatttttttcaagttgcaacgcacgggcacccaactagttcacatcattttatcaattttaggtcatgttctccaagcaattacacaatattttagtgcttctatcccgttagaatggctgactcaattaaaggaacaacaaagaaatgtgtcattagaattttttagaaacaaaaaggtctgcattgttcacatcagtatttttgtttcaaaaaaaaaaaggtctgcatttgtaaactaatgatttttcaaccttcatcttgcatctaaaaatattgatcagccataaaaaaaagacattcgtgaaccagggaatagtgtgaacacatatattatagcaatcaagagttgagaagttaagattctcacctagagatagtagcatgtgagttcacaagatctgaataactggagctgcaatccttaaagcatcaatctgtgaacagaaaaaagcaaaagaagatttcgtgaggtgaaagcatgtgggtttgcaacagttgaaactcgaataaaaagaacaattctcaccggacactatgcacctgggtcagcttcctgtcagccagcttgtaaactctgaaactcgaatcagaagaaatttattgtttgcatatacttgtggtcatcgcaacgcgagatggaggggattatctgaaataccagatgtaggggattaccaaatggttccaaacttaactttgctttttttacatacaggtgatttttacatataggtgattatctgaaataccagttgtcatgggcgttgggccggctaaggcccatcggcagcccatgacaccagttgtgcagacaaatgagtgataacaatctgaatctctccagtagagaacataaagcgaatcaaggttgttcttgttcatgatttttgattatattcaaaaccgtatgatcaacttagtaggaaagaaaatcagcagattttatacgtgttgtgcctatttacaacctgaaacttatactaatgtatgtgatggcatgagctccctaacatggctagtatgtatatatctgctgttattatgaagagaaaacatggcagcatatgcagtcagcagaacttaccaagaagtgtattatactggagaggtagatggcatgatgctgaacttgaacagccttaagagagattgaattgaggaaaattaagagatgatcgaagtgtagcctgaaaaggaaaagcagagtgagaaaggttatccaatttctctgcagatattcattaaaaatatattgcagcgatcctttttaatatatcagactacccaacatacataatcttgattttagctgctataattaaaatcattgaataaacatgagaaattatggttaatagtgaacagtggggatttagtcaacacagtggatttctaaactcgaaagccattatgaatctctatgaatgaatgaaccataccctgcctcgtatgcctcctcctgtacaggaacgggatcgtctgtacactaagtgaacgcaacatttaattcatacatagtaaaacatcaagtacactaagtgaaacatttttcggtggaacaaaaaacaaaatgaattctcttaataggaggtttccaaaatatgtggtttttttgttgcactggaatatttcgttcactgcaatattagatctatatatagtaaaacattgtgagtacactaagtgaaacatttttggtggaacaaaaaataaaccaaatttccttaatagagagtttctaaaatatgtgggttttttgttgcaaaagagtattttaattcactgcaacattagatttataaatagtaaaacattgtaagtacattaggtgaaacatatatttggtgaaaacaaaaggagggagaagtaggtgggcccacgtggggggaggggcgcacggggagtgcctgatccggctctcccgcgccggtcgcgcgacgtagagattttcgaaagaaaggcgatccagacgttggatttcgcaatcgatccaacggttcatactccgcgggtctgcctggcgaaggatttttaatactactagagattatgccaagaccacctatacttgtttgtatatatataaagaaaaaagacgccctgaacatcaagtgcagcccatcaaaaagaaagagttgtacgcatgcctaaaccacctatacttatttgcttggttttctttataaatttgtcatactatcaagagaggtgataatcttggcaaacatataagagcagctctagcctgcacctaaaatcgatttcaacgtaaaaagaaccgaactatgcacactgtgggaagcgaactgcatgtgtcagatgaaaaagcaactccaaaacaaaagtcgaacactgatgataaaaaattgcttgttgctataggtgggattaagattttttttatgggtcccacccaaaatcgattttaacgttgtaggggtcgaatcgaatgtttatttgacttttgtggactagacttttgtgttcgcaagtgcaggatgggaacacatccctcctgcacgtaaaacggagcgtccttttaacatatgattaattaagtattggctatttttttttcaaaaatggattaatttgattttttaagcaactttcgtatagaaaatttttacaaaaaaacgtaccgtctagtagtttgaaaagcgtgcggacaaaaaacgagggagaggggttgggaacaggcgttgcaaatacagccttaccgaaccaacactacaaatgccctaagcaaacacacgccacattagtacacgagcgcgttttttttatttgtagctttgattttgttttctgtgtacgagaatctatacgataggacatcaagcacacatgagacaaagattatactggttcaggtcccttgcgaggaagccctaatccagtttatatgggattatggagaaaaccatatagattataatagagaacaatggaaccctgagattgccgacgagatccctatcaagaacggctcgacgagatccaccggtgagttggcttcgcgttctcttgattgtttctgctatggtgtgtgtcttgcgctaagattcgatgccatgtgcccctccagggtcctgtatttatatcgtaggttatcttgacctccagtagaactcggagatacctttctacgtatgggatcacaaatcccctatttcttccgaatatgactcttgtcgacgtttgatgtcgcgattccggtatttgtatggtatggggatcgtcggtgctaggatatatgcgagactgaggtaaaagagatatgtacaaggatttttatacaggttcgggcccctgaattgccaggtaatagccctacatcccgttggccgaagccggtcgttgctcttattcatcataatcacaccagtacaatatttggggtagcctatctaattgttgtcgacatggtggtctgaagttctgactcgtagtcgacaacagggtagtcttcctcttcgaatccgtgcccggcgagatcagagatagagctttcgtttctcctgacagtatccggagacaccgtagggaactagctatgcttatccctgaagtcgatatccgacgtcttgtcttggcgtatgttggcttgtatgttgatcttctgtcttgatctattgttccgtgtatgttgattgtggtgggtgtgtccctctcctcctaggaggccttgtatttatacccataggtgtctccttgtccaagtagaactagggaaaccaatatggatacaatccgagtagtccttgtcgtttccatgtagaactctggttgtcttttcttatccggaactccctccatatccgaggtcagtttccgtataagatatggtatgtggtgggtcctaccaagatttagtcaactactattaggtatgtggtatccgtaaccctgacaacactaacatcttttattcggggagacggtttccttgcggatcggctgttttccttagtttggaggtaacattcccgtatacttgaggatataccgtatttgtatatcttacgaccccaaggataggagatatgccttattcgtaaccctgatagtggaggccggtcgaaccggggttttagaactggtcgctttgggttggtccaacagattagaaaacctttttggataaggtgaatagaccgggccctaggccggtcggtccgggcatgcccatggcgctataaccccctcaacaccttcctcctcggcaaggagacactcttggcaatatttttatatttcacttgatctattgtatttactctcatactacttgagcacttctccattcactgttggtttttgagggagagtaagccaagataagtgtattgcaatttcatttctacccctactttgatgtctaatattgattttacccttattttttagggttttcgtttttaccctcaatttttcgaagtgaatgcttgttttgcccctactttggatggtgaagttaacggtgttaagtgattgagaaaatgacatttataccctctcatgtatgtacattaattatgtttttgtccctattttatacacgtagctttgaaactttatttttgggagtatatttaaaattagatgacgcacattgactaatataacaatttggacaaattctgaatttgatggaattttgacaaaatttcagcattttgatagaacttaaacaaaattttgacaacattttgtaaaatgtaattatatgttccctttagatattagtcaatgtgcttcatttaattttaaatatactcacaaaaataaagttctaaagctacatgcataaagatggggacaaaaacacaattaatgaacatacatgagagggtataaatgccattttgtcaattacttaacatcattaacttcaccatctaaagtaggggcaaaacaagcgttcagttaaaaaagtgagggtaaaaaaaatcctaaaaagtaggggtaaaatcaatattagacattaaaataggggcagaaacaaaattgtcccttgtttgaactattgtggcacttaatcacattcgagcatggttgccacctgttacttttgaaggttgctgcatcctatatggttggaacgagttgtccagtgacctctacgagaagattgtgaaggaggcttgatattagttgtctgtgatgccccagtaataattaggaaaaagaaaaaagagaggaagaaaaaaaaagcaagcagcaaatataatggacgcatagagcaaagctagctagcgtgcagcactagtctggttggcctttgggccttgaccggcccacgcgaggagtagcggtgctatcaacgtatcaggctagcagcaacaggcagccagcaaagcgcaacaagctagctggtcccacatctctagtgaagcttgagatataatactagcttacttatatattaacatcaaaattgaaacttttttaaagcgaggataaaagcacatagtgttacattgtaagtgtgttaacagtgaaatttggtaagcccctaaaagaattatcacatcaccaatagtcagattcctgctatatttggttaagaaaattaatctatcaaagaaagcttatccagaagtgacagagttcaagaaggatgcggcatgacaagttatctattaattagaaataatttattagttttcttttcatctttaggaaagtgtatttaatgtcctataaggacttatatgttttccttttatctttaggaaagtttctttattgtcctacaagtactagtatgtccccataggtataaatatgtacacatggggtcattgtaagagatctccacgatcaatacaattcgggccatcgtcaccttttaccttttctattttattttatcgtccgacgggatttggcacctaacgcggggctgcatcgcttttcgatctccggcgaaggggtaggtcaaatgttccgccggcctagacaattatatcgtctacgttggcgtcgttcaaggctgcatcaatacattcgacctcttggattgctcaggtttggatgatatatttgtctgcctttttatcatatgtcttagttaatctattcttagtatatcaatttagctctatcggttgtctctcgctttagggtttctgccggtatcggctaaattgttttactagattagattagataaggcatctaccaccttaaaaattaattagtcaagggcttgattgtctagatattatgtttcttttcatacttagtgctgcatcagttaagtttgatctactaaaccgtgtttagaaccataatctctagcctgcttcttgactgctaataagggtttcatcggggtttcagccaatgaggtatctagatgttgcatcggcttacaagcattacatacaagttggatttagctaattgcaacaaaggtttcactgtttatccaatcttgtggattttatgacatcagacctctagccgatgtatgctttaatcttcggatcagtgcttattctatcatatcatttctagccgactggtttctactggattatattgtttaattatattgattatcggccgattgtctttatatcattatatacattggacgtatagccgattactcgaaaccctatcgctatcggctggtatcggtatcggctagaactattccatcggcttgtcaaccgatcagctgttttatctattgtttatatatcttgtcggttgcaggatcaaactgactggcacgctcgcatatcatcaagatttggacctgcactggagctaagcagatctcccaggtcagtgtgtatttttagcatcaatagtatggtccaacaaattgagttgcgcctaaatccgcctttagaccctaggcatcacaaccaccttcagctgaaggaataaccgtcctagtgatcgagccttatatgaacaacttcaggtttggcttccaccttacccattccttaactaggggatttggaggtttgacggtttgatcggtgaggttgggctcttgtgtaaaccatttggaaaccggctcccaccttaccgtgagttcttcctgctgtgtagttgaacatccaaaaccctcggtacgcattcactctgtttcgtatattcaatctattcatgttttacgtactgtctagttttagtttacatgtatagattgtatgatacgattatgctagtttacatgttcaatcttatgatttatttatagaataaattaaatcaatatgtatatttttaacaagggtcaccctgactcttcgttggtatttgattagtgttgttccattaatcatgatgtgtactttgccggattccaaaagctgtttaatccatgtgatccaaactgaattaaacccctgtgcgatagtatggtgtagagacattcccagtttaaccatatgcacaattttagggtaaataaacatttgcagtgtatctactgcattacttctatgtgtttattctttctttattcacttttcagggtgctcagattgttggaatggttgcagaagcactgaatgttccagcaactgccaaactatttgattaaggccaatgatgtactgggtatcccccaaccttttattctatcaatgtgatttcacctgtttcagagtacttgttctgccatgttaccaagtttctgtgctctactccaaagttgaaaaaaatagtgatcatgctaatgtttttaaatcaatggaccaaaatttgttggatctttgaatcaatggaccaaaagaaaagcttgattcaattaggtttgttgatgaatctaggggttgtttagattgatgacattttaaaccataccaaattttctaaagttaccaaagatgtgcatacatttagttttgtaccaaatattgctaaatacataaggaatcctgcaaaaacttggcaatattgataacttaccaacattctagcattgccaaaatttgataatgtttattttggctataatctgaacagcccctagttaaacacctctatattttcatcttgcaatttctgctagaagtctagcccacaatttttttgagaattcccagctatgattttatcaacaattgtttgagtgccaagtatgacatatttcagatatggttccggttattgtcagttaaaaaagttgaattcttatggtagaacaatactttttttagccatctatgtatgggacttcctccgtttcataatgtaaaattttctagcattgcccacatacatatagatgttaatgaatctaaacacatacatatgtctagattcattaatatctaaatgaacatgggcaatgctaaaaagtcttacattgcgaaatggaggaagtaccagccttgcagctgtagaagcactgcgtgcacgtgattgagaccaaaatgtaattgactctgtagatgtcgcatgcagtctcagcttatgagaatacactgcacttgcatttgctggtgttttcaggtaattcctttgtcatgttcataaaatcatgcatattttgttttgaaacaataagcacgtgggttccttgcctatcatgggggtgaacatatatacaatggtttgatttgatcgatcttttgttaatacctgtaagatggaattcctaattgaagcatcatactttttcattctgctatgtgccaagtttgtatacttaatcatagttctaaacatgcagggatggtttgaagctgtcaagcttagaggagaatccgtgctggtcactgtccaaaaaacactgagatatctctaccttgatttttttttttaccttcgaaatcgataagttttcattatctgtgtaggatgcttcagatgctgccagcagtgctatggttagtgtgttggtctagattcagaaacggtgcaacaattatgcgatgctgcaatgacgaagtagatgaaaaagaaagagttcaaatagctagcaaacttactgtgtcaagtgtttcatttgatgttttcggttccctatttggtaccattgtcatgttgtgttattttattgcagggaaattacgctgtttgtggtgatgtgaagggtattgaagaagttgaagtcccttaaggccagaacgatggttaagtgttcccatgcatctatatgtgttacctgactatcataacttgatgtgttgtattttggaaatgcagtaaggttaatctactgaatactagctcctttgctagaaagaatatttgctcccatccagcagctctcccggtaccgaatctcggcccttcatcctgcccgatcgaacggttggaaacatacggtacctccaggtacatatttttttatgagatggtaccacctgtattgagagtggtggaaaggtatttttgtcttttcgtgtagataagttttctctagctgaacaccctagtttaattccccttgtgtgtggtagcggcggcggctgcgaggtagcgagggcccgtggccgtgactttggtggcgggcgtggggtgccgactacggtgatgaggtggtggtgctgtggcggcggtggccggtgcgttagcgaccttgattgtgaggtggtggcgtcgagttgttgcggccgcggtatattaaggtggtcgtcggagtcggtaaatgacttagctgaggatttatcaataatttcacagcgcgcacagagattgttggtaatgttctttcatcattgcttgtatggcattgccaggtcaatgaaggaaaaggcttttcagataatccccatgagaaataaattagagggaattaaaagggattagttccaggtatatgaaatttcctttcgattttcttgtgaaaggaattgaccaaacaagatctaagagaaataataaattaataaaggtacttgaattgagaacattgatgcgtgagatctgtaagtatcctaatgtatcgaatgttagcaacaggggttttgtggcaaactgtcagtagcccatagttcagagtttctttttgtggtttcatgtttatttacaccctgtggttctttgactccaggggcggattcaacgtgggtgtagggggacccacaagacccatagatacccctcggaacacctcctttaattttttcaccatgactgataaactaaagatccctaaatgactggaggttaaaaaaactgtgtaattgaatccccaatattttgttcctggatcaacccctgtatgaccctccacgtgtgtgcatgtgcaacggggtacaaacaagacccataaatactgctatagtttacgcaaaaatccttaatgctgctcctacgctgagactgatataaattatatttgtattcagaaactattaagaagtggagtactccatattatcatttcacgaattatactcctggtcgcaaatactgttgttgtggataagatttaatcaaacttttgatgcttcgactgtcaatggtttatgaaatacttaatttgaaaaaaatatattttatgtatatttgttttaaaaatacagtaagtataacttatagtaccttataaacttaggctgctttcagaggtggagattcggagcttcatctccccgcacgtaaaacaaagtgattcattagcgcatgattaattaagtattagctaaataaacttgaaaacaaattaatatattttttaaaattaattttttatataattcttttaaaatctaccgtttagaatatggatagcgtatatgtgaaaaatgatggagtagaaattggtaagaggtgtgtatataaactaattcgaatataaaatttgtggtcaaaatcgcatctcaagctcagttaatgaaagtcaaacgtcgaagtctttggtgactgaatggatcactttaattggagaactattaaagaactgcattgtagcctgtaggtatcgaagcagttcgcagtttcagaaagaagcaccttttgttgcaatgtttagtattctcaatcggtttataaactggttaggtaagaagcatggatggctgaatcgtcggcgttagttagctcaatcgattggtcaagatagagaaagaacatcgacaatggatgtgctgacatttgaagaaacagcccggccaagaaaatggatacagatttacagtaacagataaagaaagtgttcgaaattttagcaaaaattgggttatctgaattgaacagctcagctgtctttctactaggagtatgcctcccaacaggctgaaggggcctcaacctttctcgctgtcttctttatagccaatacatgatcggattgaactgagtttattagaattatttgaggcccaaacaaatgaattacatattaaaaagattttttttaaaaaaatatcgtttaggagattgaaaaacatacacacgataatcaccaaatccataaagagagaaaaaaaagtaggcatctccatctccaatatttatggccttaataacattaaggtaggtctcactatttcttggttattgccacaatgcttaaaacaagagtgtatactaagatggacctcacaagtgtaaagtttattacctttatcaaccatcttagttttacatattactttattgcttgtggttgagccataagtttggagttatcctttgcatttagaggttgtttggttacctcctaaactttgccaaacattgttacacctcatgttaggcaagtttgatcaagttagctcattgtttggttcatgaccacacttgtgataagattctctttcatttctcatggtcccatatgtcatcaactcaaaagtgtatggcacacttttcttttgctagctaaagtgtggtttacattttgttggtcataacttagctaaagtgtggtacaaaagtattataaatttgtaccggttaaaaactacaggagaaacgatctttaataccggttgtagcaaccgatccagtaaatcgagactaaatatctcgatctcaagatgcatactaagacaaaaaaaaagtgagatgtggaattcgaactcaagagctctcacctcagccctgctttctttttaaactaaccctggaggcatctttagtatcggttggtaacaccaaccgagaataaagatgtttctaggtacttcgactttaactagtactaaaacatctttggtactagttcttaatctagtcgagatatttatgttttgggacttaggataaaaaatcgtttctcatatattaaagaatgaaaatgttaatatagcatccaaacaaccatttagtgtattgtggcttacctccataatgtatatggtcaccataaggtctttttataatcactttttggctgctcatatagtatatgtaaggttgtcagtccagtttttggttttcttctttcggggaaccactatatttctgtatggccattttagctgatcgtatgctttcttttatactagaattaactaggataaaaatagtttgataccctgattgggatttgacactagagtagtactactattttttatataaaataaaaatcaagggtgcatcatacattcaccaattcacgtcacagacgaaagaatgcactggccctctttaccagcaaaccaaactcatcagtgcctaccgatcgtagcaagtgaaaacaatgaaggcaactagtacaattatttcttttccaaacacttttttgccatcaacctctattgtcatatactacctccgtttttcaatagatgacgccgttgactttttatcacacgtttgaccattcgtcttattcaaaaattttacgtaattataatttattttgttatgagttgttttatcactcaaagtactttaagcatgatttatatctatacatttacataaaattttttaaataatacgaatggtcaaacatatgttcaaaagtcaacggcgtcatctattaaaaaatggagggagtatgtggaatatcaccgtatcatatcctctaacaaggtggggaaggggaggggaggggaggggagggggttcctaaaatccatatatacaattcgtgaaaaatagaaatgattccgtaccaccacaatttgaacttcataaatatcttaaattatgatctacatatgaaatgaatgtaatccccacataaagatctggatccctttcacacatttaggcagcgtgtcatctttaacccttgtacaccaaggatagaccaggtttttcacttttggtttttaccaaaattttagaattttggtgcaactgaaacttttggtaattttggaactttttgcccaaaattatttgaaaaattagcaaactttgactgaatttggataaatttttgaccaaattcacataattttggggaaaaagcaaaaattccgggcgagatatttgcttgctagaggggagcgtaattacaaaagtttcaaattttcaaaccaaaattggaatccctgggatagacatgtcaaaagcttgttagtgtagccacaaaaaccctcgagagaaagctgcaatcccgatcttggcccatcccaaaacctaaaatacatactcccgccgtcccaaaatataaacatttttttagtatagtgataaatcaattatttctaactttgaccattagtaacaaaaaaaataaaaaaaaagatcaataatgtaaaattgatgttactagatttatcattaaacaaattatcataatatgcaatactttttattttaaaacatcttactttacagatattgttggttaaagtagcatctcagaaaccgtgtcagggtctaaaaatgcttatattttgggacggagggagtagtattttgctagttttcataattgaatagttattattattattctaaaataaaaatgtataaatattggtatttaatttattttttggacttgtttaggctttggaataggtttttgggtgaaaatataggccaaagctagcctatcaggctccgtttggctaataggttatacccattgggaaatggatataatatcctggtaggatgtggtggtagtttagagcaagtataataacaaaatttcagtcagctataagcctgtacagctcagcttcgtctgacgtggtggagagaggcaagatgagagagaggggatcgggcgcttatgcaatcgccagccttggcacaggcgcctagaaaacttagccgattatcttcatcagccatttactctcatgcatgcattggatgatggtgggccctcctccatataataaaatgaatgattagtattggagtatgtgttatgcagctggttgatacaaagatctatctatttgattgcttttagatgacgtgtcattggcttatagctaactgatgactctcttattaaacttgctcttatatgaagggaaattttatcccatgtttggttggatggattggaaaaggaagtttctagaagaatgaccaaaatgccccttcaaactatgctaaatgagtaaacaaacagcacagctattatctataagttcaaatggtgagggtaattcagtaatttttcctagcagtcaatccaccctcaatcaagcaggattctatatcccactcccatccacacccaaacggtggaaatatgaaaaatggaaataacatccatttcccacactcctcatcccatttgccaaacagagcctcaaatgcaggctgcccataaacaggtctaggcaatggtatttctgtaaacattatatttagctaccgctctttacggcatgagctcatctctatctacatcaatcaatgcacttcctctataaaaatatctcttgaaataaatctagaaaaaaaatcagcatataatcttttacaactaaatttgtcccggcatttactaaacgccatatttacaccaaccaacacacaactcaagtgacacttgtaccactacctaagtgacgctggattccacccttgaatccacatatcaacagatcatattctcccatctaaatccctctttgatttaagtttactaggattctctttccttccacgagcgcaggggtggtgatggcaaacctcaacacaaaacacagcacaactattaagaacgtttacaacttaggtgatccgtagttgacaaggaggtagatgttcttgctaaaacgacatggggtaacttcgtcttgccgtgctgaagcccaggaggcatgaggagtcgaggaattgaaccaacggtgataaatcgttaaaaactagtgaaaggggaagtaaaagagaaattgaacttgtaggggtccttttacgaaagtgagttgtagggggaagggcagaaagactagtgaacttataacggttattttcccctatattgagccctgatccctagataaagacagggtttgtaactcttgcttgccattctgaatcttcatggagtccatatatatcattggaattttggcatgtccaatagcgcttgtaccaccatattagcgtagtcgatgtctttctctcttttgggtattaatctcccttgtcatagttatggaatgtcaccagatcatctcctctaaccggatccacatctgtacttgtgaataatagaaaagttttcgtaccaccacaatttgaacatcgtaaatatctcaaattatgatctacatatgaaataaatgtgatccccagttgaagatattgatccctttcgcacatttgggcagcatgccatcttcaaccacagtatgccaaggataggcatgtcgaataatgcgggttatcttgggccatgaaaagtgcgaggaaaaactacaaaactgagctagttttcatatctgaatagatattattattatttaaacaaaaaagtataaatattaatatttaatttttatttttgggcttgtttaagctatggaataggtttttgataaaaatagagacccaagctagcctatcaatgtgggttgccaataaataggtctagtcaatggtattttcgtaaatataatatttagctaccacccgttatgtcacgagctcatctacatctacatcaataaatacacttcctcctgtaaaaatatcttttgaaataaatctagaaaataattcgacatataatcttttgcatccaaatttgtcccaacatttactagacaccagatttatgccaaccaccatatacgtcgagtgacacttgtaccaccacctaagcgatgatgttttccacccttgaatccatgtattaatggaccatatcctcgcatctaaatctctcttgatttaagttttgtaggatgtcaaatcacatccctttgcacttgtggctcctggggaggggggttggggtgggcgcccaacttttggtgttaaatcaagtgttcgctttgtagtcggttctgatcctgttaggaagatttaccaaaatccatatcacacatttgtgaaaaatagaaatgattccatatcatcatttgagaatagtaaatatctcaaattatgatccatatatgaaattaatgtaatccccaccttttttttaaaaaaactaatggaatccccacttgaagttctctatcccttccacacatttgggcaatgtgtcatatttgcccatagtctgccaagggtagatatgccaaagtaggttaagccgggtcatgaaaagcccgagagaaaactacaagcccacactagttttcatatctaaatagttattatgtattatttaaacaaaaatgtataatattgatatttaatttatttttggggcttgtttaagatctagaataggttttttttggatgaaaatagagacccaagctggcctatcaatgtcggctacccataaacatatctagtcaatttagtcaatggtattctcgtaaacattatatttagttaccacccattacgtcatgagctcatccatatcacatcaatcagtgcacttccttctgtaaaaatatatcttgaaataaatattgaaaaaaatgaatatataatccttttgtgttaagatatgtctcagcatttactagatgccaaatttacaccaactagcacacaactcaagtgacacttataccaccacataagcgatgtttgtttccaccattaaatccacatatttatggaccatattctcgcatctaaatacgtcttgatttaagtttagcaagatatttaatgcacgtccctccacgcctgtggctcccggtgcccgactttggtgttaaatcagccgttcgatttgtagttggttccgatcctgtttgaaatatttcctaaaacccatagcacacatttgtgaaaaactgaaatgattccataccatcatttgagcatagtaaatatctcaaattgtgatctacatatgaaatgaatgtaatccccacttttttttttttgaaaactaatggaatccccacttgaagttctctatcccttccacagatttgggcaatgtgtcatctttgcccatagtctgccaagggtagacatgtcaaagcaggttatgctgggtcatgaaaaagctgagagaaaactacaagcccgagtttggcccagcctataacctaaaatacttatcagtttccatatttgaatggagtagttattattattgttactctaaaataaaaaaaagtatgagtattaatatttaatttacttttttggtttgttcaggctttggaataggtttttaggatgaaaatagaggcccaacctaggccggtcaaggcgggatgcccataaacagatctagtgaattgcattttcataaacattatatttagctaccaccagttatgacatgagtatcacacctatatctacatcaatcaatgcacttcctcctatataaaaaatatctctcgaaataaatctagaaaacaaatataacattataatattttgcaaccagatttgtttggtatttactagacgtcagatttacgtcaacaacaacctagctcaaatgacacttgtaccaccacctaaggtctggtgttggtttctaccattaaatccacatattaatcatcctcacatccaaatttgtaataatataactttagtaggatatcaatacgcgtccctccctccatgccgcggccgcctataaaaccaccccatagcccttcccccctcccccatcggccatccatctaccatcacattcacaaactcacaatttttcacatcaccatgttctttagttccttaggcttgagagcaaaccctacccagggtagcccaagctggatctgaactttgtgttcttcacataatcaatcacacacacatcccgaccgggtccgaatagaagtatagaacacaaagagggggctgacgctgaccggtggggcccaccggcccggcccgaccacaactcctagtgggggtcccccgtggtgcagcgcacgtgcgaggtcgttacccctctccgactccctcccccgtaaaaccaagccgcggacttctcttttttcttttcttttctctatggagatagcttccgcggccgcccaccaaatctcgcccatggtttcctcccgcgaccccggcgaggaggccagcgcgccgccgcccccgcccccgcgccgcggcgagaagcggcgaatgcgcggccgcaccccgtcgccggagccggcctccgcgccgcaggtacgtgcttacgaggccggatttgcatgtggtgttagtagggtagatcaggggggaacacgccgccttcttcgtcgtcgtacgtggtggtggattcctttttgtttgttatatatataatttttgttccgtctcgcccttcacgtttcgaggaactgttcatttggtaggcgactgttgcacgtaaggaatcgttgccgtgggtttggggttcgttcgttttgattggagaggatagaattctgtctgtatggatcgtgaatttagttctctggtatggagcatgtggggggagtttctatttgtgtgttgtttgggtgctatcaggtcggatgagtagcaatgagatgcgaatttctggatgcgatgcgtttgatttggggttcttagattaggtcgggagagcattgggtggatcgatgaataatgtgtcctagagagaaaaacttatggatcctgagaattgtaggtttaaaattgatatgcgattcggatgccgcaacagattggcatcttcccctaggtaactctgggttctgttgttcctgatttgagattaaaggaataatttcccccaacctatcatgtcgatctgtaaattggtgatgcaaatttgtgtgtgatttcagtggctgtaactaattcgatgttcttggcctattgggggaatttgggatttggcccggcgaaaaaacttggatttgcccttgtgctagtagattgacaaatccatgaattgattatatgatataaatatatgccaatctatgagaaaattctactaaatcaaatcaactttcctcaagtaatgatgttggaactaaagtccattgatcgaccaatcatgaactcaagcatatacatgcggatatgtaaacaaattttgatgaatggtatcgtgcaatattatttattttccattggtaaatgttaaattgttaacttgtaatagaaatttctctgtcctataagaacatccaatctgtggcactttcctgatgaatgaaatattcaaggtacaagctaattttgtaagactactccttttcaggatctctgcccatcaggagcttgcggggacaatgttgctggagctacaactgtaattccttgaaaagttttgattttattagctgaatgttgtcatttctattcctctacagctttattattattggctaattaatttttcatgctattttatcttacttttatgaacagacaaatggaaagtggcatccacatgaatcgtacagacctgaaattgatgatgcccctgttttcactccaacggaagaggtttgtgtacatttatcttacataactattccatgagatatgctgatagcatagtaatagttagctaatcgttctttcccttcaggagtttaaagatccaattagatatattacgagcattcgtccccaagcagaaaagtatggaatttgtcgtattgttccaccatcttcttggcgaccgccttgttctctgaaggagaagaacttctgggaatgtacagagttcaatacccgtgttcaacaagttgacaagcttcaaaaccgggaacccacaaagaaaaaatcacaacctcgagttcagaagaagaggaagaggagaaagagactgagatttgggatgactcacaggcgtcctagtgcaaatacatcagaagactgcgcagatgcagacgagaagtttggctttcaatctggctcagatttcacactagatgagtttcagaaatatgcagatgagtttaagcagcagtattttggaataaagggaagtgacgaaatccctctttctgaaattaaaaagaagaaaaaaaattggcaaccatcggtcgatgaaatagagggagaatattggcggatagttgtatgccccactgacgaagttgaggtatttagtttgctatctgtgcatcatcttcctatttaactattaatacatactgataagcatcggactctctttgactaggtggattatggtgctgatttggacacttcaatgttcagtagtggattctctaaattatcttcagattcaaatagacgagatccatatggtttatcttgttggaatttgaacaatcttccacgtattcctgggtctgtactgtcatttgaaactgaggatatatctggcgtcgtagtcccttggctttatgtagggatgtgcttctcatcattctgttgggtaagcttttattttctcattgacccatttttacaatgttatcattctgttggtaatagtataatagccgtttgcctaggtaaaagtaatctaattaacttccttgcttgttgaagaatgaacatattattgctctatgggattggaaaatgctactagcctagtgatattctaacctggcagtgctattcaatcttcttagtggattaacataagatgaatgtttacatagtaggaaaatatgtgatttttaattgattatgataattattcttggctgatatctctctcttgaactttgtagcacgtggaagatcatttcctttattctatgaattacatgcattttggtgaaccaaaagtatggtatggtgttcctggtgctgatgcagtgaagctggaagaagctatgagaaagaacttaccaagattgtttgaagaacagcctgatctcctacatgagctggtaaccatttgaaattgcatgtttgttatgtaatagaattgaccctgtgattctaacaacatgaattcactgattgcaaaataaactttttggatatattgcgaactggaaacaacttagcatccatgtactgaaattcaaaggaaaacattattttctgttccattttagtactctatttattatcattgcctagtgcctactaccagtcacaaattcttgctgacactacacagtggttcatctgagaataattatcttcctgtattgtacaaataaatatgctgcatcttcattcattttcatcctaaattttcatggtgcaggttacgcaattatctccttctgttcttaaatcagaaggagttcctgtttatcgtgttgttcagaatccaggcgagtttgttctaacgctaccgcgagcttaccattctgggttcaactgtggcttcaactgtgcggaggcagtaaatgtcgcacctgtggattggctgcctcacggacaatgtgctgttgagctctacagggagcagcggcgcaagacatccatatcacatgacaaattattactaaaaactgcaaatgaagctgtcagacagctttggatgaaccttagcgactgcaaaagtgaacaaggagtatacagatggcaggatacttgcggaaaggacggaatgctgacaagtgcaattaaggtactcactagtttaggccgttgttatttatcactgattattaatcagctgtgactcaaaggattaactctttctttttcatcaaaaagactaattactcatattttggttgtactatattgcagacaagggttaaaatggagaaggcagcacggggagggaatatggcactgcgatataagaaaatggatggggattatgattcagctgaccgggaatgcttttcatgtttttatgatctccatttgtcagctgtcagctgccaatgctccccaaatcgttttgcttgcttaaaccatgcaaacattctatgttcatgtgaaatggacagaaaaaccgcgttgttgcggtataccatagaggagctccatactcttgttgcagctctagagggtgatccaactgcggtctaccagtggggacagaatgatttaggtttagtctgcccatctggttctactcagtacaagaagatggacttgggtgaaaacacggaatttccggattcagcaaccaacgtcaatcatggctgcagcttaggaagtcaagatcaatatcactatgaccccgcaaagccagcaggataccagcaagagaagggaatccagattgcttcagaaaaacatgataagaacaagatggttgtcaatcttgagtctccagcaacagctagtaatccaagcaggtcaaagtctgactgcagtggctcactgtccttgaatcattcatctgagttaccatcttcaagaattcaaacaggaaattctacgctagcttccattaccacagagaaactgtttggtgttgacattaaatccaatttagcacagtcttctgatggccaagttagtcaattggccaagccttcctcgagccaaactgatgaagtctctaagccagcaatagctaagtatacggttgagctgctagacagtggaacaatgatgattggtaaaaagtggtgcaatcagcaagctatattccccaaaggtatatacactgaacaatgcaatgattatttttgtcttctggtaatatgtacatcctccagaaatatcactaatagaaattcatctatgcaggatttaagagtcgagttacatttcatagtgtactagatccaacaaggacatgctgctacatctccgaagttcttgatgctgggcttcttggaccattgtttagggtacgcttttattataaacgcttcttgtttttctaaatttcaggatttgtctgctttccttcattgtgctcacataagctactgaattaataacaggtgactgtcgaaggtcttccagaagtttcgtttactcacacatcaccaatgcaatgttgggacagtgtaagagacagagtaaatgaagaaatagcaaaacaaataagttttggaaaatctggccttcctgattttctatcctgcaattctttgaatggacttgaaatgtttgggttcttatcctcccctataattaaggtagatttttacgatatccacagtatttatttttgtgaaacctggtcacttcaagtaactagttgaatattacacaaaaattctttgttgttcaacaggaaatcgaggctctagatccctgtcaccaatgcttggactattggttgtcaagggtttcttctgttggaactgaactcccctcggaatctgtgatggcagcaatggttaatgactccactaaccccccaataaagttgctcgggattgagattaaccggagggaatcagaacaatcaagtagcttcaataattcctgtgtgaggaggtcacacttggcaggttgctgaagaaggctagctaagctcccagaagaaccagagctaatggcgatgaaaagaagtattcagtagcagtctagtggatcagatagcagtggtatcatctggagtggcaattgccactctccaggatgagatgaacaataatgtagatacatagtgccatgaatagatcagaaatttcagataactcatcctagacagcttccctagggaaccattagaattgaaatagagccaccattggtttgcattcttctagaattgcatttcttgatattcatttcagcttgatcccaattcatttctaacttgatggcaacaagttattgtattctctaattgtttctggattagccagtttattgtgaccaatgtaacaagttgatgtttcctgtcgacataaagcttacatgtacaaaccttggcagctaccaattggaaatgaaaggaagaaaatgttttcggacttatggctatttcttctacttcaatttaaatgaattgtcttttcttaccatataaatgcgatgaatctgtcctcattcagggctaatgttgcaaggggttactttaattgattgttttgtccttaatagtgatgccaattaaatcatactcccaccgatttttaaatatgcgctgtttttggcttttagatataacacttaactaatttttatctaaaagtatttctcatggtgaatatcacataacataaatctcactatgtttaactatatctaaataagtgaaaggtgaaaccctgcatgcaaaactacagtgccacatcattaagtgattataaagcattcgattttcaattcagacattacaggccgttggatcctttaattggcaaaaatatcttcccagtccttttagaaatttattttacaaagagttcctcaaataatagtgttattcttcgccgcctgaacgacacctccccttctctcagacgcctcagtttcctcctccgcaccccatgcagtgacgcaactgtggggctatccttcctgcacctacgcagcatccgctccaccatggtccatgggcattcccaacctcctaggtttagacattgcctatagcagaatgcatatgtgctgttcaatagtccattgaaatatatgattcagccaataactaattaggaaagcaattttgtcctcaaagcatcatttgaatgaatgcagatgtgtagataaatttattcaggcacctcttgcggcaacctgataactcagttatcagtaacaatacccttcattattgcactccacataattggctttcagttgctcaccttgcttatgttggccatttaccttcattaggtttcaattaatgttatattgcgttcatatctggaaataaagaaaacaatataatgagaaagtaatcttagggcatgttcaaagctagagcccagtgcaggctctctacactccatgtcagcgaaaaaactcctatatacaaaggatggtctctttagctgactctccattaatacaggctaataaatggctaataaattcatcatgtatactagatcaaatgtaaattttagccttccataaattgtgcaaacaacaagctattatttaagcaaacagtaagctatcatataaaaaaagacaatgagcataccagcacacacatactattattttaagcaaacagtaagctaaattacattatttcgttatatagagtagttctacttttttccaagcgctgccatatatgtgcaactaaatctttcttgagttgcatatgagttggacgatcacgaatagatgaattccttcgtagtactgcagcaaagcatgggttggggttggaggagttgctcacttccggtggcagaacgattgatgctcctgggttctcattcaaatccaaaggaatttcagtcatttccttttcatcttcaactatcatattgtgaagaataatacaagcttacattatgttgatagcatcacccctctgtcacatccgggctggacgacatacgatgttaaagtgagactgcaacacaccaaaggctcgctcaacatccttcctctcttcctcttgacgggctgcatataatatatcttcatctgtctgagaaagttgtattgtcttcacgaatgttttccactcaggataaattccatcagcaaggtagtaccccgtgttatattggttcccatttacagtaaactgcacacgaggagcttcccctatcaatgcatcaatgaacaacggtgacttgtttaacacattgatgtcgttattggatcctgtagtaccaaaaaaaagcatgctatatgcgaaggtctttcgatgctaccgcttagaggatcatggtaggaactcccttgtcaccacgagtaaattggccgcgccgagagaccgggcaattttttcatgcccaatgcatgcagtctatacttcctaacatgccaggaaaaccacgcgacttagcaacctgtagcaatctttcaacctcatcattccttggagctcgtaagtactcttcactaaatatttcaatgactcctttagcaaatttgcccaaacactccaaagctatactaggaccaatctttaatacctcgtcaagttggtccaccggagttccatatgctagcatatgaatggcggctgtacacttctgaagtggtgaatgtcctgctctaccagtggcatccactctattagtaaaataaggagaccattcactaagggcctcctcatccgaaacctcctatggaacatctcatcggtgtagataggggactcggagaagtagttggccacaagatcctcattgccatcttcttggtttcttggtatatacggtcttgtaccactttgacgttgacaatgagatggctcagctgttatcttgtccttcatcctgataataatctgctcactatattcatctaaaaacaccaactcagcaagaaaatcatccatgttatatatatccataggatcaaagttgtcgaggttgatggcggcatcgtcgtcaaggtcgatggcagcatcatcgatgttgagttcggcgccgacgacgtcaaggtcgatgccggtatcgtcatcgagatcggtgtcatggtcgaggtcgacggcaccatcgttgtcgaggttggcgtcagagtcaatgttgatggcaccatcgtcgccgaggttggagctagcaccagtgtcgagatcagaatcgtcggcgagaccatcttctaactggttgatttcatcggaagacaccatgtgatctgacatacattcatagatacatatatctcagattgagattctgaagataaacatgcccatcaatcatatcttggaatcaatccccgcataaaaaaaaaagaacaggtagtatagtttcagtaaccttcaataaacagtcatccagaaacaaccattcagcatgcacttagtaataatatggaaatgagttgaaagtgtaaacttgcatatatggttattacatgaacgaaagaataatcttattcaccacacaccgccaagagcgtcgtcgttcacaaagcgtttcgatggcctctttctacgtttctcttccaatgccaacttacacggtaacaaagtcataaataaaaataaataaaatttataaaactacatgtactttgatgaaaactatcgcaaaagaatgcgcatcacaaaattatagattttgtgttaaatttatccgatttaaggtatcatataaaaatatagatgtagcataattttatcacaaaaccacaattgttataacttataataaataatagtgctagggatctaaactctacaatttgtagtacaaattttgtaatttagtgaaatttgtagttctttgataacttcactaaatctatagttttgtgataaatatatagttttgtgatgcaatgactaaatctgtagctttgtgattcatgtagtagttctgtgatagtttgatccacgtatatatagttttgtaaaatttactttttttaaaaaagatattttggtcaattgtgataaagtgttaagtggctcataaaacgacttgcaagtaaagtggtgctagttagatagccgttcagctccacgaagaagtgcaattttctcacaaatataaaacaagactgccatataaatggtaggagtaaattcagttaattttagaatctgccattgtaggacacaatactgcactactagcaaatagagataatagggagaccatctcttgcaacaatattctaagttatctcttattcagataaaaaacaaaatggataaaaaaggatgccagcactaatattagtcagagcacaacatcgattgtagtggggcattagatgcgtgacattttgatctgtgagggatcatttggagttgcactttcccattgctgcctttatttgcattgccattggcatcaccgacatgtggcactacctccacacctgtaaacacggcaattggttcattcccaaagtcactgttactgcggaagaacctagcgatgcagaacctgcctgagccaaggttgacaagttgtggatccttgcactccctccattcctctggcaggttgagttccttccaagggcccactagctgtggctgggagtccatggcagagaggtcagccgcagccaagcgccgggcctcagcagagaggccaaaccagaggttgaactcaggcacataatcaatcctgccatggaatggcagtgtccactttgccaacttggctccatgagtggcttgctgtctccaggcagtaggtgccgatgccattgacagataagcaaatgtgtgagccaccgccaagcacagcgtaggagctgatctctgggtctgggctgctgcagcagctgtgacagtgcttgggttcacagacaaaaggcggaggtggaagttaatggcagtgccaggcctttctgtaggaagataatgtagacttgcggtatacgaaggcctcaaactgatcgctgttgaagcccaactccggtttgggaatcctctccatgacaaagaggctgctgccatagccatcatgggaacgaactacgaagacagacaagggcatcgacttgggcttgtgaagactgggcatggttcctacctcgcacgtatctgcgttgacgaggaatgcgcggccagactgatccgtgcaaatcacctcgcggctagcaagcgggaaacagtccatcttcgattggttgttgacgttgagagctgaagctcggaagttgatgctggagaagggaagccccatactatccatcatcgtgccagctgcctgtttaaacttttgccagaattcgccaaccttctgtgtcggtggaggtgttgccggatagaataactgctggtgcatcatgtcgaagtaccatagcgatttgacatcagggttgcggttgcccacgatcagattaagaaaccgccgcgagaaatcaatcgtatcccttaaccagtggcttaacctgattcgtatccctcaccacgatactgcatatcttgaccccccccctcatttattaaaaccggtgcaatatgactccctcagcggttttggagggtggcttcgctgacatgtcatctacgcggcggtgttgacctagtctttatgccacacggtattgacgtgacgtttatatgacattagaattaaaaaaaatatgtgagactcatttgtcatttacaaaaaatgatttgtgggacccacatgtcatgatctctctttttccctctcacccctttctcttcacatgagcactgctctaaggcatgttatttatcttctctaccgaatgtcaaactacacatgcaatgcatgattatttcagctctctttgttggggggaaatagcaccaaaagtccaaaacagagatcaaatatggggaggcgaaatatcccgcaaaaaattgaccacgagacaagactaatttacctctagaacgcacgaaattgggggagaaaaactggaaacaaccgaacacgcacagcacaaaacaaccagacgctgctcgcaacaagacccaaaaaaaatgtggaaacacataggcgaatccatctacttcaccgcaaatcagcatcaaattacaaggggaatagtaaccaatcgaaaggcaaggcagaatgagcactcgcacgcgcgaacacacacatgcacacgaggacgagccaagcaatgcagtgcggcatacgagacagggggaggagaggatgaagagtgaggatgaattctaatctctcgggtggatgcccacccgtttcttgcatgtcaattaaataattatgaaaaaatttcaaaaaaattacaagatagattaatatgtaatatatcacttcacaaacatgcaagttcaaattcaaattttacaagttgtaacgaaaataacaaattaaacttttagtatacgtatatttacagtcaaatttgttatttttgttacaacttgtagaagttaaatttgaacttgcatgtttgtgaagtaatatattcatattatcctatcatgtcaattttttttaaaactttccataaccatttagatgacatgcaagaaacaggtggacattcacccgaatgcttaaaacagtttcccgatgaagagttcctcggaagcttcattcgccactccagcatttgcccgcccgccggccaccgtgcccatcgcccaccgccgccgtcgccgccactcaagccctcgcctgccgccatcggatgaaggtgaagagaaagagagaaataagggagagagaggggcatgacatgtgggcctcacaaaatattttgcataaatgccaaatgggtcacatataattttttaatctaatgtcacataagcgtcatgtcaacgccacgtggcataaagacctggtcaacattgtcacgtagacgccacgtcagcgaaaccgccctttcaaaccgctgaggaagtcaaattgcaccggttttaatagttagagggtcaaaatatctgatattgtggttgagggatatggatcagattaggacgctacttaacggagccaaagtgaacttattcccatcccgtgaaacctcctcaacccggccgttcccctagaatttgatcggcaattaagggtgtgtttggttggctgcaccgggggtggctcgcatcccgcatgcaaccagcaacgcgtttggttgcctgcatgggtgagcgagccaagatcatctgatgcaaaaacggccgctgagccaggctgcgaggaaacgcggaaatcggccgtaggtcctcagccaggcccagctcacgccgacgcggggatgagcggatgcaagtgtgggatggacgagaaaatgaacatttagccacgttcgaaacacagttttcctagaatgccatctcgaaaacgcgtttcactaaaattccaatataaagcgcgtgctcatcaccactttgccattttggcccttttgtgcattttcaaaatcatcttcgcttcttcagtggataatgagacgaaattgccctccatccttccccttccatggtggcagccttggcagcgccatcggatgagcccaccaccgctgccgacgacggcgggatggccaacagcgccgtcggatgagtccacgcccgctgccaacgagggtatctgggtgcgtggagcgacaaaaccaccggcagctgcccctgcctgccgcatccggacggcaccgacgaggcggaagcagaggtgaggtcgtcgaggaggcccccccttcgcctccgtcgccgacgaggccatggggccacctcgaaaccctagccgccatcgtcgaccacggcgaagcgacctccgggatgtcgtcgtcgaccgcggcgaggtagtcggcggaggtggcaaggtcgagggaagagaatatgtcggaggactcgccggccacctcgttgtctgggctccccatatagcactgcttcagatgccatccatggaggaggaggaggaagacggtgagctgctcatggtggacatggagatggccgacgaggacgagctcctctccctcaatgatggcggcaaaggacatgaaaggcaattttatctcatcatccggtggaggagcgaaattgatttcgaaaatgtacaaaagggccaaaattttgcaaagtggcggtaagcacgcacttcatattagcattttagcaaaaacacgttttcggaatggcattagagtgaaaccgtgttttggaagtggctaaatgtccattttctcgggatggacaggtgcagcggcgcgcaggggtcgatgcatccagaagggagggctcgaggggcaccgtcggcggcagcggcactgccatcttctacctcctctcctcttctcctagtagttgtcggcgccgtctccatggggagcttgagctcaacgaaatccagaagaaagagagagggcaggaggagggacggagggagggctaggggcatcgtcgtcgctgccatcttcttcctcctcttctcctagtcgttgccgacatcgtctccctcatcggccaccgcttccctccttcacgagctgtgacgcaccagatccgacggccacaagcttcgacacgctagatccgggagtcttcagcttcgacggcaccggatccgcagccatgaactctgctggcggcggcaaacagcgggactcaaagggagagtggcgagcgtcatgtaggcgagcggcgacggcagttgcgagatggcgatgcatttctctcttccttttttttttcatttttttcttttctttttctatccggttgaccggataatcccgacgattaatttataatagtgtaatttaatgtttggcacaattttttgggacttcctagtttggcgaattttttcgtcattgaaatttgtgcatctccaagaagtcagtagcactgcatgtaatatgttgttatcctctccaatacgaagaaactatactcaatattccgaaaacttcatcttggacttagttaaaactcaatttaatacccatggaggtaaactcaccctccaatccagaatgtatttttgatccaaccaaccaaacatctttcgcatacagtatctttaatacaactaaccaaacaatatctaaccatatgcaggtttattcaatacaaacaaccaaacaatgcatatgtatatctttaaccaggccaatcttagtctggataaaggagatgaaccaggctagaagtatacgagcaaccaaacgcacctaaattggggagtgtttcctgcgccgctcatctccctctgaaagtctggatcaaactagctggctacccaaatagcctctcacgatcacaggctcacaacctcacagatatagtgacaaatcgcacgagctggagctatcatagattgaaggaaagtaaaaaaccaaggaaaaattaataaacagataagggaaagaaataaaaatactactccttccgtattaataaatagatggtgttattgatttttctttatctaacatttcatactcgtcttaggaaaaatataagtaatgattaaaatatctttaatgataataaattatatttatatgtttttcttaaaaaaaatatccaaacatcatatctaaaagtcaacaacgtcatatattaaaaaaactagtgaacgtgcacgtgcaaagcacattgatatatacaattgaagaaaaatgcattcattgctaatgtacatctacatatactcacaaattaaagctcataatcattgataaaaataaaagtattgtaaacattgtcttggtaattcattgaataaaactaatttgttattgtattatatagcgtaacagatgtttttcagtgagaatcttattttcattactttatgccttggactacatgcaatagataatggttaagcctgtaagagttaaactattatgagaacaaacgacgatagataactcaagaaaaagtgagatagcagccatgtattatcaaaagctagtaaatgtacaaatgcagcttaaaatagatcagtgaatcagcaatggatgtttcccaattttcctctttcacggtctgctgagcattaaatagtttgatttggatatataaacatgtacatgagattttaatgagataattttccacacatttagcagggtaaactcaggccaaaataatgattgaaacaaaacttctctaaattattttctttgggcaaaaaacaaaattcggtttcaacatctcataaagctcacagaaaactgaactgcaaaatcagtactgcaaagtttaggcgcatatattgtgctgcatttgaagttactttattatgtatagatagacattattctttcatttgtaacaacatgattgggcatcattaaaatccccgtccaggaccggccggggtacacaaacgacaatgttgacattcagatccacgtcttacaaacatcataaaagtcttacataaatgcagcggaaaaacgaaagataacaggaactaagccttgacttgatctgcagcgggaacaccactccacagacatcctcgacggcacggacgaagcctactcctcggagaaaccaccatctgacacatacttgtactctggggttggggaaaatagagcaagactgagtactacccactgtactcagcaagtcataccggaataggggtatgatgcagggaattatcaaaggagagctagagtggttcatttgcataaagcgagcatttataaacagaagttgaaagaattaaacagttgtaataattaatcatattattcatccactgtccaacgctataccacgttgcgacaggcccaaccatccacctatagtatccaatttcattagactaaactagggtgagactaatcacggtgaatctggttgaccgcccataaccgcaggcacgactattcgaatagttttactctgatcagaggtgtacaactgtacccacaagacacagccccacgacacgtttccgtgcgccgacatgccaccacgacataccggaaagagaccgtaacaggacccttcgcataaccccctctaaccaagcacaccacacctcaggtttcactcccactcctcacaaggcagcgggcagtcccctctcgtgcctaggtgaatccggaagctgcataggccgtagcagggcccatccaaactccatcacgcccacccttgcctggatgcgtcggctaaagaaaagctacactacaagtccagccgttgcccacgctggcttgtggtaagtacgataagttcttccagggcatcccgcgaaccggtccttaactgccatgggtgcgaccaacaaaaccatgcacccacagcccaccatgtgatttattttaattaaccaacactgaagcggtgtcactaatccaacattaccattagaacctacagtctaaacattaataggatttttccccaatgtgtgctagttgaactaagcatggctaagcaattcctagtccaaagtctattcatgttataacgcaagctaacaaaggagcatggtatcaaaatagcatggctgtaacaataggtaaacatcccatagtaacattataaaacaatgcagtatttgaagaaaaacaatagaccatttgcaatataggatcaacatgttcaagtgacaggcataacttgccttgctctgcagttggaggaacctcggcgactatctcgaagtacaccggagcatcagaagaaccggaatctaagcgacatacaaagcaaacaatgcaaacaggctataagactactgaaacagagaacaaaaccatttttaatggattctacacatttttcttgatttactgagacttgaatgggcttaaacggagcacggatgaattagttatgaattttagaagattcactgtgtttattactataataaaaagtccttaaatcatttattgcgcaatatgtcccagggctgacgtcatcaaagggggggtggtgccgacaggcggggcccgcatgtcagcggctcaaggggagagaggggcgccggcaagtggggcccccgggtcagcggctcaaggctgccggtccaccggaccgacggcccagatcgcccccgaggccgatcggacgggcggcggcgacggcgtggtgcggcggcgagcctagcggcggctagcggcagccggagtagcggaagcggcggcggcgggtggaagcacggcgcgggagcgatgggaagcacgagggagttcggcgagatggggaaaaagagagagggagtggcggtggagcttaaataggggaggggaatcccggacatggccggtaggggcgggattccgccggccaacgcggggaggtggaggtggagagagaggtgggattcggaattcgaatcctggccatctcgggcgcgggcgcgagcgggagagagggggagtgggtgcgggaggcgcggcgcatgcgcgggcgtggccgacatgacccggaggaggcggggacgttggcacagcggcggtttcggcggtggtggcgacgtggggcgggcagccggaggaaggggacgaccccgacaggtggggcccacctgtcggcgtcccggggagagagggaggggcggcttgggccggcccacaaggaggagggcgcgcgcggcggcggggtggactgggccgacggcccaagaagaggaaaaggagggaaaagaaaaagaaaaggaggaaaagattttccctgggatttaaaattgcatgtgctcaattttaattggttaaaattatttcgagagctctgaaaattccactaaaaatcttgttagcgtatttcgacatgtagaactcaagaaaaattccacatgccaattccgattattatttgcattaatttattaaggttttctcttgatttgcaccggcattttcttaggatgatttataaattcaattttaggcttaggaggagaactttagggtgtgacattgatgctcataggatgctgaggtgactaccacacaagatgaagaccatgtgtgtagttgttcttgatcacttaaagtcgtggtacgtggactgctacgtcactggtcgaagaccagttgtagttgtaccttgtcacgcccaaaaatttagcccaaatttccagactattttgtgcattaaatctctgtccaagaatcacccagggtaaacaaaacgacaagtaatatacggtttcaaacgtaaataaagcgtaaaatacttacagaagaggcacttagtcctcacacccgaaacgaaagcagcagcagcggaaaaaggcaatcctagcagggcttcagctccactccacaggcaaaactcaactggggtctgagccttggtcctctaactccgtctttagctcagaagcactacacttctgaaaagggggaataatagcaaggctgagtacaaccaccgtactcagcaagccacaccaatgatgcaggcgtgcaaggggatacaaggatggcttgaggctatttgcataaaggcaattgtaaaacatttattgagcaaaacagtaaaatagttgattaattaaggtaatattaaatctccactgatcaacgctacaccacgttgaataggcccaaccaacccacctgaactacagtgcattgagtcgatttaataagtgtgtgactaatcacgatgaatctggtcgatcgcccataaccgcgggcatggctattcgaatagttttactctggccagaggtgcacaactgtacccaaaagacacaatccaccggcatgtcaccgcgcctgtccggacacgtcaccatgtcgagtgattgtgacaagacccttcatataaccctctctgaccaagcacaccacacctcaggtttcacccccactcctcaacaggcagcgggcagtcccctctcgtgcctaggcaaatcaaaaaggcgcatagactgtcgcagggcccatccgaactccatcacgctcacccttgcctggatgcgtcagagaggaaagctatacttcaagtcagacagttacccattcccgcttgtggtaagcgcggtaagtcttccagtgcatcctgtgaaccggtccttaactgccatgggtgggactagcaaaaccatgcacccacaacccaccattaagtcgcattttagttggataattatgaccaataaaacatggtcggatgtctcgagcacgcagctcgtcatgatactaaaagttctacaagatcagccagtcgtccatcccatgatgaggacaagcggccatatattcctgaagtcgttcccacgcctcaggaatggactcatccctcgtctgctggaaacttgagatccttccagaagggcgttggttttgcccatcgggaagaattttgacaggaatgacgtagagcatttatcccaggtgttgatcgtggcacggttggcataaaaccattgtttcgctttcccaaggagggaaaacggaaacaattgcagcctgacggcgtcaggactgacacccttcattgtgaacgtgttgcagatctccaggaactgttgcagatgagcattggcatcctcattaggcttgccgcaaaacgggctagcctgcgccattgtgataaggctggacttcagatcgaaatccacgtctcccatgttgatttgcggcccagtggccacgttgttagcagagggagcagcaaattcgcggagggtcttgtcagccatagtcttgaaagttggtagcgctggtatggctggtttctatgtcggaagagtttactgcagagcgacgactcgtggcttacgctccgaaagaaagcctctggattttccttagagttttccggcaagttgaaaccagtcatgtactaccctgtttccacaataaaagtgaaaacaaccatggttagcctgcaaagtacaatgattatatagaggtaaatataaagtattagtaatggtaatctcttttataaatcttccctggcaatggtgccagaaatgcttgttggtatttcttaacgacattactagaaatttaattcccagtaatggcgcaaaaatacttctggtatattatggttacagagttcatccgcaagcgcatgaatataccattgtagcatttcacctgagagtattccaaaggtatcgtatttgtttaatcccgtgggaagattataatagagagaacagtactaataatttatatattactgtacgaataatttataaccaaagtctaagcaggggttaatataattcatagggtacaataacactaagtagaagcattcatcctcttactcgtgattatctaagctaagtggaaagaatatagaaagatcctattcctatacttctaatttacatacatattatatatacatcctagttatagtattacttagctaataccctccatccgatgccctgctggtgcttcgagaagccacccctgattgtcgagttccttacgacaatccgtcatgactatacaaccgggactaaatacggtggagtaccctccccaggaaagtatcttaggactatatacattcgtggaggaatacccatactgagctgtcaccatcagcggcccacctcgcttccacagcatataaccccaaataatgatatctagtaatctaaacactacgcttaaattaccaaatactatctaatatcatcgtcatgacatagagttatcataaatacgattattatacccacaccattgcatctcccagataagctagcatcataataaatataactcgaacatatagtaaagttggtattcatatactcggaaagtaatacaataccaaagtagtataaagaagagtattctaaataaagtacaagtcataaaaaaaagaaaaaaggaaaagctactagagccatacacgaattcttccgaagactctgaggactgaagattttattctatttctattccattatactctagaaactatgctaaacttgagagatgaaatgaacttcttgcttgaggtgtgtcttgaaatggaggatgagagggctttatatagcttgagaatgacggttatgacggttggaaaggtcagtaataccctccaaccgccataggggagcaatcctgaccgcccatccaaaccctgcatcgaacggagccacggtgggttcggctgaacccaatgattcggccaaaccatgggctgggccggcctggtccaaattcggcaggtggcctcctctctcgatcccttctgcagacttatgaattttggcccaattggtcgtgttatttctgagttcttggcccattcgttgataagtctgattctcaacatcgtccgattgattgatcacctgttttgatatcgattctcctccattttatgtcattctctacaagaggttagtaatcctagtgctagtggaatatttattattctaacacaaatatgcattgcaagtataactagttctcctttattttggtagtattgatggtcgaaactgatcgctaacgaccgtcaacattggtcctttgatccagtggtgtgaattgtgggcttgtttgctcgtggtaattccgtgttgtcagcccatctatccacaagtctgattctcgacagcatccaattgattgatcatttattttgctgtcgattctcctccatttatatgtgcttctcctggatacatgttagtagcatagtatatagtggaaggagatattttatttggaaattatgcattgtaagcatagttagtctttatatattgggtaatattaacggtcgaaactggtcaataatgaccgtcaacaataacatcgaaaaaaacgtgtaattagctataggacaccacaaagacgtgaattggctctatgacactctaaaaaaacatatgcttgaggacactgaagacattattttattcttttcaaacaaaacagagaaagagacaaaaagaaaagaccatattgccctttggctctctcggcttggctttctcctggcgccgccgccttcctcgatggtgttgtcgatggccggcagctcggcacggcacatccagagccacggtaccagtgcgtgcaggggagacgcaccacgggtgtccgctaccgcgatttcctccgtgcacaccgtcccagccacgcccaccgtcgcgcacaccaccggtggctttgacaccacagcttacctcccgccgcacgaagggggagggtcctcgacggggaaggactgctcgttgcagctgccctgtgcccgccaggccggagcagctccctcgcagtcggtgtggcccgtaaattatccgcaagagttagtatagaacaagaatatggggaaaaaatctcaatgcatgatagtgtacaacataacattatctcaatgcgagggttcgcatcaattacacaaattttatttcaaaatttccaatcacaaatctgtacactttgaatttgcaatgtgctgaaattctaaacaattgaacaatatgtaccactgtgtgatgccaagaccttccccttcctctccctctttttattcctttttagtttggcaaattttgctacagaacactactaatgtgtggttttagccctaggacactgcacaaactcacttttgggggaaaacactccataaacatgataatttgtcagtggaaaccacgccgattgaaataataattttcggttgaagaggagagagaaatcatgtgaaatgtcaaaaatgcccttgggcccacatgttagctctcttatctctcttctctctctatcacctccttccagcagctggcgagagcggccgtcgcctcttccccctctcccgccggtgcagccgtatcctcccccctctcccgccggcctcatctccccctatccggccggcctcctccccccttctcctgccgccgctccgctctactccgccagccacgacctgcccgctccgctccgccccgccccgcccgccgccgctccgctggtcatcgtgcgatcgcccgccgccaccagcgctccaccccgcctgccacgcgctcgctcgacgttgccgccactccgctcgcccgacgctgccgctccgccggccgcacgctcgtccaccgccgccgccgccccgctccactccgccagccaccgtgtgctcgcccgcctgcttcggcctctagctccgctccgccgcagccgacgctgtgctccactccgccgaccgccgtcctcgccatctcctccgccgcaacaagctcgagccccagcgaccgacgccgccccgttcccctctgggagagaagatagagagagatgagaagagagataggagatagagctgacatgtgggcccaaggacatttttgacatttcacgtgatttttctctcctttttaaccggaaattattattttaatcgtcacggtgtccactggcaaattactatattcatcgagtgttttcccctaaaagtgagtttaggtagtgtcctagggctaaaaccacacattaacaatgtcctttagcaaaatttgccttttagttttgcttccttgctccttggcttccttgcagacttgctgcttgctcttgccactgcggcctgtggtgctgcagtagcccgcagcttcgccaaattaacataaaacaaactcaatcgtgagagtgacccaggcgcccagcatgacttcgccgcgccgtcgccctcgggctcacttgaagaagagagaaagaatgagatagagagaaaagaacaaggataaggaaaaaaaaataaagggtaaaatcgtacttacacagctgtttctctctccaattccttcacatataataacataatctggcaggtgtccagcaactaattaccagttttttttgtccactagctaattatacgtttttttaattttctgtagcaaattttgtctttaatatatgcagcaggtatatgactcttggctgattttcttaaaatactcacatgtattactaccaatgtgatctaaaccacaaggcataaccgtgcgagtatttgttcactttaatatttgatactttttatcaacatattgtcagaaatttttatatatttatgttttaaccttgtcattttttttaggcttatgaacctacaacacgcatgcattaatattatattttttactgcactttatatatgatgcagggatatatattgcttcgattaaacatatgggtgcagtgaattcatgttacttttgaattattttaatttttactctgcctgtattatcaaacatatgggtgccgccggagtcgctgccgccagatcgagcaccggccgagcaccaccgccacccattggatctgggagaggggagggggttagaggaagccgctggaaccttcgaggcccggccgtcgtcgtcgtgtggcagccgctgctggatccaccgcgaccgccactcttcgccgccgcccgcacccctccccgccatgggacccaccacgccgctccccgccgccagatccacctctccaccacaaccgcccctctccttcaccgcccaccgcctcctgcgactccccgggccgccagatccgccgcccatggcccgagtcgccgcagctcacgttgtcgccgcaccacgagcttcgtcgctgcacctcgttgccggatcagcttccgtgccgccgtcgccgttaccactgcaggcaccctttcaccgcctctgagaagactagagaggagaggagagggagacggccgtgtatgggaggagaggagagggaggcgactgggagaggagaccgccactcttcgccgccgcccgcacccctccccaccacggctccaccgaccacgccgctccccgccgccagatccacctctccaccacgaccgcccctctccttcaccacccaccgccgcctgcgactccccgggccgccagatccaccgcccgtggcctgagtcgccgcagctcgcgttgtcggcgcaccacgagcttcgtcgctgctccccatcgttggatccgcctccgcaccacgagcttcgcctatgctcctccccatcgccggatccacctccacgcgccgtcgttgttaccactgcaggctcccttcacctctgagaataccggagaggagagggagacggccgtgtatgggagaagaggagagggaggcgactgggagaggagagggatgcggtgggtggtgggttgtgggctgtgggggtttttaataacgcggttgatttttttttgcaagcgctgctctctatgagtatgtactttttgctgtcggaggtccttagtaaccgccagcgaaaatcacttaagaggtccgcttataaaaagtcccctatttttacaagcggtactcttaacccagccgccagcgaagatccattttcgctgacggtccttaacgcctcatccctcgttaaaatttcgctaacggtttccacttatggccgctagagaaaacaaaaagtcaacgccatgaaaaatcgattttgtagtagtgtatgcaaatttcatgtttgtatccgtgatttgtatccattcgtaggggaccgaacctgagagcgagaatctcgtctaggcttgtatccactaacgagaccaaatcagagggtatggtaggataacatgaaaaaaaacgtgcatagaagccactcctagacccatactcatctggccgaaccatagaaaaaagtgtgaaattatgttaaaagccatcaaataaaacgaactttcttgtctcatatgcattggttgagacgaaggacataacaaaagacgaaaaattcctttggcttgtactcatggtggtcaagcctaagaatatggcaagaagatgacttcctggttcgtactcattagccgaaccgaacaacatagcaaaagaatacatcaacgtgagcagaagaacgagaaccgagagattctttgactcgcacacaatgaacgagcctaataacgaaggaggagcatgattcccaccttaaacacctctgatcttccagcacagtggagcgaggaagcagaggctgacgagatggcataggagcaaagcggaacggcagcagtattgcctagcaacaagcagcgcttctgcaaagcctacgaacagcacctagcctctacgctaatctcccctggaacttcctttgccgctagggggttaaccagcttttcgtggtttagaacagagtcccgcgcgcatccgtgggcagatcgtgggaaatggactcaacagcatacacctttctttggcttacatgtgggtcccttcattttgactggatgaatgtggcaacgtgcgtgcaggtagtggggtgaacatgagcagaccggtcatgcccctggtcgttacatgctttcccatttattgttatcattctaatctttattactccagttagccttttaattgcctggttattgagtgagagagagcgcgtgtatcctctcactgacatctggccctctcttatttggcgcgtgcgtgtttatatatccgcatcattatagcggtctgcacgtgacatgcatttttatttcacgtcgcaaaaattaggagtataattttctcatttgttgtatgaacatatattttggttttctttttaatttattggatgaccgtagtctaaaactattttatatggtgcgtacacctttcctgaaaatatttaggacatgactattttgggtgagtgggaaaaatcctattccacggccatatgttttaggccaggtgtgtacttagcgaataatcgtagtctcaatatatttatacgatctcttttattatagcacgaatttcatatgtgcacacgaccagaaagctaagtatcagcgttcgtcggtccgatgaaaagcacgtaaaaaatatttgttcacgttttttaattttttgaacgtgtttccaagatgctaatttatttttatatggcacgcgcatacgcatttctatttgcgccggaaatcatttcactctgaccgagcggattttatttttatattgcggccatatatttttggtcgccattttattttatttattcatttgactgttttgactgtttattcctatttttgtttatttatttttttacattatgtttgagattatatattagtttataatttaatacatcttatttaagatacgagccaaaatcagtgtcaacaaatgcccccttgccaaaattttggttttgcatccggagctcgaaacataattttggattcgtagggacatgatgcatgtgaagtttatcctcacaactatcgatgtgcccgttgtttgaaagattgttgagaaaattaaggagcatctctccgattatttggccacgttccctatggctaggggcagtgaggcacttgttcgttgaactcatctactactccagtcttctccctctttctcctcttctgtgcaaggatttgaggagagacttcatcaatgacagcatcaaaggtaagaccttgatttgatcttgcatactgaactggcgatctttttttttgtttcctttttactattattgttggctttcattcctccattaattaattccatttgggtttcttccctatgcacacatgcccgaaacctaccaagtcttaatttcagcgggtgattggtgatttaggtgtggcaagaggaaggtacagagagattttcttcaccctctttcagtcattcattttttttacaggttgatagatacatataactttctttaaccacatttgtatagaatgagttgctcgtataatcggggttcccggaaattttgtgatatgttacgcagccaatccgggttgttaattagatttgcatgtcaaacttgtctaacaataccttttcttcctcattgtatatttaggctgcacctatatacatattccgatatatttttttcatttgtagatgacagatgctggctcttctcgagcaacacataacttgccgctttttagaatggcgcaacttcagccctatgaacctgaaacaagtgacttggggaaccctactattgtggataaagaattgatcggtggtgaattttcgcgtaacactcgtggcaggacttctggtcacgctttcaagggccgctgttttcaccctctcacccctttgccttgagatgataaggcttccaccttagggaataggatagtatctgagggattgggttgggaaaaccataaggtggaatttgttctagctccttcaggatatgcggaatggggtaaagcagtcctgcgtcatcattcccttcatttgcgtggtagcgaagagggggtagattacatttatgggtctatctattgctcccttggtttgtactgtacatcaccattcaccaagtatgctgagatctctgctggaaaaatgggatccacacaccaacagcttcctttttcctcatggcgagaggaccatcacattactcgatatatacaaactctcaggactgccccttgacggtgatctttttgaagagtacgttccacctcacagtgagttagagccatctctcttgatgtacccaaagagcttaatgctacatatggacattaggaagagtcttgaagttggtggagaagtttcgcttcaggattggtgtgatcattttcacaaccgcatggaggggttgccagattcctcgggcattgagtcctcacgcatttacatagccgcctttatagctttgtggctttgttgcttcgttgttgttgggttgggtccagtccttcgtcatgggggtattggtcatggcttcctggatggccctagggtggagaaattcgttggctccgcccgccctatgttctttgtactattctttgatattggctagtacaaatcttatcatcccctcccatgctgcaagtagaccatggcctatacactttttggttggatgggcatttatttgaagaagttgtatggcaacaaaaaacaacacccatatttcccttcctacagacacccttctgctgagaagccactcatggagcataccatgtttaggatcccctaattttatacactgttgacggacgttatagaccaatctcgaccgtcaatataactataataaaggagaactagctatgcttacaatgcatatttgttttagaataacatatctccacttgtacttatagtattatttgttacaggaatttagcaaataaaataaagagaaagtgaagaaacctcactcctaagcaagcttatggataaggagggtccacaaatcaggtgtaaccatcctggaaaccgcattaactgccacaaccaccaataggacccacctgtcacccaccctgccgaagctggagacctgctgggctagcccaggttcagccaaaccctggctacgtcggctcaggtcagccctccacgtggacgctccaaattgattcccaatgacggttccgggggaaaatggacaattcgcatagctacaaccatcataactgccctataacaggaggagttcattcactatctcaacacactcaagcaagctcaagatttctcttcatactttagtttagtatttttagtgctaagtggagtagaatagaatagttctcggagtcctcggagtcttcggaagagttccggtatggctctagcagcttttctactttcatctataagactttcgaaattaatgaaatattcttctttatatactttcagtactttgcttagtctgagtattgctcttgctttatgtttgcgtcggtataattgtgtgggtagcctaccagagaggtgcaatggcatgggtttagtgtccgatttatcggttgctctatatcatgtccagaggtgtagagtagtatttattaatgtaagcatggtgcttagattactaattatcactatctgggcatatatgctgcaggacagtagaggtggaccactgatgatgacagctcaatacaggtattcctccacgttagtatatattcctaagactaattcctagggagggtactctcatgtatttagccccggttggacggccatgacaggttgtcgtaaggaactcggtaacccaggatggtctctcgaaacaccaggagggcactgttagggggtattagccacatgattgtatacttctgggtgaaatgctacaatggtatatccgtgcgcttgcggattacttctttgaccatacatatataccaggattattcatgcgccattgctgggaatgaatatttgtagtaatgtcgttaagaaataccaactagcatttctagcgctgtttctagggaagattagtaaagagattactataagctaataatcttttatatataattacctctgcataaatcattgtccgttgcaggctaacctttgtgtcatgaaaacagggtatgaaaacaggatagtgcatgactggtaaacctgccagaaaacttcaacgaaaatccagaagctttcttccagagcgtcagaccgagtgtcgtccctccgcagaagaaactttcagctaagaaaccagtcatcccagcgtcaccatgtttcaggaatatggctgagaagacacttcgtgagttcgctgctccgtccgctgacaatgtgcccgtcgggccacaggttaacctcggagacactgacttcgatctcaagagcagcctgattactatggcgcatgcaagcctattttgtggcaggccaaatgaggacgcaagtgctcacttgcagcagttcctagagatctgcagcacctacaccatgaagggtgtcagcccggacaccattaggctgcgtctgttcactttctcactcctgggaaaagtgaagcagtggttttacacgaatcgggttgcagttaacacatgggacaagtgctccactgcgttcctctcaaaattcttcctgatgggcaagacaaatgccctccgcaggagaatatcaagcttccaggagttttacaacgtctgcaggaatatgtagctgcctgtcctcaccatgggatggacaactggctcattctacagagttttacaacggacttactgtttcgtcccggaatcacttggacgttactgctgggggtgccttcttatcaaagacggtcaaaggggccgttgatctcatcgagaagatagtgtcgaacatgagctgcagtgaagaacatctccagacccatcagcatggcatgcatactgtcaaggagacaaaaatgctggccgcaaagctggacctcctgatgaagaagctagatgatcaggagaagaacaacccgtaggccgctgtcaaggcactagactcgcacatcacttgtgaggtctgcaggaacactggacactcggggaacgactgccccgacattcgtgaagaagccatgttcatggggaacaatggctatcatcccaaagaagaccaggggtggaaccagccctgcccgttctaccaaggaggcaacaacaacaacaataacggtaacttcaacaaccagccctccttaaaggtctatgtgggctccaccagaagactcatcgaggtagataagtcaaagtgtcacgtcaacgaaaccactctccaaacacagttgagagagtcaagttacaccggttttaataatttgggtttcaaagatatccggtattatggttcaaacgacatcaattgaggattggagctatatttgagggacacgaattggacttatttcctttttgttttccgtaagtggaccgagccttagaggctctgtagtaggccaggccgcgctaggagttctggcccaggcagaggagagagggtccagcgctagggttggcccccgctctcttcgccctttgcgccgcttctcctcttctcttctcttctcttctcttgggaacctccacttgtgctcgcctcctcgtcctcctcctcctcctccccctcccggtaaggcggacgaccgagctgaggctgagctagggctagggcacccacctcctccccttccggtatggcctctcccctctcctcatgatttcttttgcgagttcgtccctgcgatcgatttgttaggcgagcgctagggatgcgcagatctgttacctgggtgggttggatggatggatggaacctgtcgattcgattcttctgtttgtttgtttggaacgtgtagatctgcccccaaatgggtgctttggagaatcacgcggatctaccatccgccatgggatgggatgggatgggatgccattttgactagtttgtttgatgcctgtgaaccgcctagatctgcccgctctgtttggtttccttggtacttgttgttagaacaatggaacccctagtggatgagggacggactagtgctgtggatttgggcatatggtccagtacgtgaacacgcatcgtgtaccacatggatcatacccatttttttccctttttcttgtcacgtaccaagtaatctttttcgctagatagattaggcacggctgagatatcactacatcatcatgaaaaattgagatgatttattcctgtggctacttatgttcaatgtgccttacagttggcacctaacaattgagatgatttcgcatggtatgtgcttatttatcgacaatagtgcaatgctccatttatactaatctaaactttttgcgatgcaagtttcatcttgtttctttgatatcatgttttaggtcactggcgtatctggtacacttctttttgtatattttcttgtaaacacactgattagaatactgcaatttgtgagttatggcctagatgaggtgttagataaaagttttgcaccatatgtctttcactatcttcatcctacttttagcaaattagtttacatgatatcgatatgtcaggtatgtcactataggcacatcaatataggatgttgccgtcatggtttacgtgcatgcattaggtcttctgcaaatgcagtaacagcactatcctctaattaggttattgatataatggtcttgtgttaaccacatagatggataaattggcctagttgctattacgcggtcttccacggtttgcatataagaagggggctaggggttgtagctagacaatcaaatctatgctttgtctatgcaataacaaggttccctttttcgacctgtgtaacttgtttaggtagagcattgtggtgagatagcatacatacttctttcaaggagcaagtatgtagtaagttaaggtctgcagtaaggtcaatttaaacagtttttttcagagattgtaatgcatggcaccaaatgtatgcttatttcttttcatgagttaataaaaaaataccattcagttgttttaattttgacattgggggttgattttctgacatatactccctccgttccagaaaaaaccaacttctggggacaaatctagacaaatgcatgtccagatttatctccataagttgattctttttgggacggagggtgtaaatttgcggtgaatcctcctggttattactcaaattcactccacttggatggttagatactgtaaatgaaatatgcacagttgcttctactaattatgatgccataacctcttttattgtacatctcagttttcaatatttgatgcagtatcctggatggctgctggtcggggcattaaccagctcctacggagaacactccataatcagtcctcagtaagaattttaatgaactatttattttgtattacttctgtcaaaaaccgatcgcttaccaatctttttaatatttattttctgtctgatgcctgtatgaaatgttatggtataccaatcttgaattgattattgaaatggcatgtagaaaggtattaccggacatcactataacgtgaaatgtatcagatggggttttggaaagaaatcacagttcacattcttactagttactactgcacagtttttaggggtttctgtttggcaggattgatctttattctactttttacagttaaacctgcattatgcatacaatgcttatttttgctgttctggttgagtaattagaccatgatatcaactacttatcctaattttgacaaagtttataatctgacagtaaccatttgttcaccataagtttcagtacccatgatcatctcctttttagtgtggtgacctgcttttttttaaaacattataatcatgttttcagggctcatctctgctatcctcgttccggataaagcatgaagaatcctccgctggactgagagcattggctcttcttggagttggtgcttctggtcttttaagctttgctacaatagcttctgcagatgaagctgagcatggtttggcagcagctgaatatccctggccacatgctggcattcttagctcttatgaccatgcatcgtgagtcatcctttttcaacttccttacaaaatagagtttagctcattgcaatatttcagagtctttgcatacggtatttggttattattaattgatccatgctcttggttaccccaatccttcaaacctacttcaccaatttagtttcccagtaggatagcgaaaagaatcacaatattcttttgctcccaagaaaatccttttaaccactactaccctattcttgctgtttactcattgtcttatatttgaacacttctatgatcagtattcggcgtggacatcaagtttatacacaagtgtgtgcctcttgccattccatgtcattaatttcgtaccgagatttggttggtgtggcctacactgaagaagaaacaaaggctatggctgctgagattgaggtggttgatggtcctaatgatgagggtgaaatgttcacacgtcctggtaagttaagtgaccggttcccacaaccatatccaaatgagcaagcagcccgttttgcaaatggtggggcatacccaccagatctcagtcttatcacgaaggtaatgatattttatgccattggcgttgcattgtttaatcttccaccttcaagttgtaatttactgtttgactccgtatgttcaggcaaggcacaatggccagaactatgtgtttgctcttcttactggttaccgtgatccacctgccggtgttcaggtaaatctcattctctgtcagttataccttaggcatttgcagttgctacttgctatgtgtatcgcccttaattcctttacaaacaataaagatgctcttgcatgtggattgaatcacttgtgtcacagggatacatattttacagacacatgatattgacatcaaatttgacactgttgtaactctgtaattgcaatactggttgaacttggaggtgctcagcttcaagttgtgttgtcccattgttgtttgagtgttttctctgttaatttacaattattcagcctctcatttgttgtcagttattgtttggaattcactacataatcactatttttgttcataattatgatgttgaactctattttgaaaaaaacctaacctgtcccacgaagtgttatttttctagctgtaatttttcaagctggttgtgttctgttatttgctttctgcagtgtgcaacattagtaaactctctggttgatttgtattctagatccgtgagggtttgcattacaatccctacttccctggtggtgccatagctatgcccaagatgcttatagatggagctgttgaatatgaagatggtactcctgccactgaagcccaggtaagtttctaatgcgttgttgggctcttacagttgtgacatgttgggttagcattaagggcctaagcatgattgttgtcatcctctaccacagatgggcaaggatgtcgtttcgttcttgtcatgggcagctgaacctgagatggaagagaggaaactggtaatcagctcaacttttgtccatttatatattactttcaattcgcaatatttcctaataccaacctactctaatttgatgtagatgggagtgaaatggatcttcctactgtcacttgcacttctccaagccgcatactaccgtcgcatgaggtggtccgtcctgaagtcacgcaagctggtccttgatgttgtcaactgagggaccactgtttcttactttcattaaaatgttttgagcatttaagcggaagcatttcaaataatgagtatgatgtacattctgccactggggtttcccatgcctagaattttctgttttcttcctctgctgcaaaagcattttcttcatgggagcacttgcaatttttgtcaatgttacctgaatggtaccagcaagcttctaacagaactgctaaagttcataaatctttatgttttgaactgtgcacaattcatttgtttcgagcacgctgatgatttgggtttgcgtttttatgtgacggatgcctgttgaactgtcctgttttgtgtttttgtcaagttctgtgtcgaatctatgcgttcattcgcgctcaagctacatcggtattgtcatgcgcatatcatatgtcaagcggtaccaatttggtattttttttccggtagcttcatgtactatgctgtcagaattttgcgaacggtctaatgtaacagaagatacatctaaacgaaatttaacatttgtcacaactcacttttgcaatggctaggagtagagtttacatcgacctgaactcgtaggctctgtttggcaaatgggatgaggagtgtgggaaatggatgttatttccatttttcatatttctactgtttgggtgtggatgggagtgggatatagaatcctgcttgatttgagggtggattgactactaggaaaaattattgaattaccctcaccatttgaacttatagctaatagctgtgctgtttgtttactcatttagcatagtttgaaggggtattttagtcattcttctagaaacttccttttccaatccatccaaccaaatatgggataaaattttccttcgtataaactaccaccacatcctaccaggatattatatccatttcccaatgggtataacccattagccaaacggagccgtactcctaatgagtcactaggcatttagctcgtaagcttatatgccagctcgtgaattgtccgtttagctcaaacagttgtccgtttagctcaaacgagtcgaaccttaacgagccgatgacttgtagtttgtgcttgctttactttggaccatccaaaaacaacaatttgttttgcataaaagaaagcttaataatatcaatttatttttccaaaaaaagttaacatgaatcaatgatgtctcatctaaagttttttttttgtttgagttggagttcgtttaatttgttcttcgtgttggatttatttactagagcttgtagaaatttttttcatggatttatcttgagtttatggagatgttttttttgtcgaatttcttttaattccagtagttcactacatccacaaaatccataaacctaattcaaatacaagggtgtatcaggagtacaggttgctaactcattcatctcgcttagaagacgaggttgtttattagtgcataatccattaagtttttagctaaaatgacttgaaaaatagatcttatatatatatatatatatatatatatatatatatatatatatatatatatatatatatatatatatatatatattaaaaaacatactatttaaaagttcagaaaacgtacacgtgaaaataagggagaagttgagaaatacgagtgccaaacacaaccctcataaatattaggcatacacatgcatttcaattaggaatccagtgagcttagcgattaactccctccagttatgagtatctgtgttcaactttaatcgtccgtcgtatttaaattttttttaaaaaattaaaaatttaagtcacgcataaaatactattcatgttttatcatctaataacaataaaaatactaatcataaaattttttaaataagacagataattaaagctgaacacagaaatttataaattgggccagaggaagtaccattttactgtaggtctttgtcgaatataatggtgcgtgtgtagtggagtggtgtttccatgtaatccggggaaaaaattccctaaaccctgtcaggccaaatctttccaacccattctattcatctggctgaacccactcttctctgtcttcctccactcatcttatgtatacttcgaggatgagcagagcacctaaaataaataaagaaatatttgccgctactaaactaaactagtatcgccaaaaatactgaaatacaaagtcacaatattaaagaaatatatggtgaggaaaaaaacactttatgcgtgaaacaaatcaaggccatatcttgccatatctggccttatccaatatgtggtttgagtatcagctcttgataaatagtctcaaatgaacatgcaaaggagctcaccgttcagcaagtaaatgtagctaggcaactcaaactaaatcaaagccattctaggtacatcaagatcttaaacacaaagggaagatgaatggcatgcgtcgtttacaggatgcacatctgattttgaatacaaggatctaacacacaggcaaagcatgcttcacacaatttagacaaaccacatgcttctgctatgttgagcttttcctagcttagcaaacaacagggaaaaaggaacggtaacttcattgcttcatgtttgcggtgggggtgtgctgtcacagcctgctggcttctttcctacagctttggcttggctgccttttgcacctctatcatcctcatcagcctcatcgtcaatcagcgatccggagcgcatcagctccttcaccttgaggaattcatcatagtgagcacgacgatgttccttgaaactcagtcttgacttttcagcttctggatctacatgaacaccaacatataactaactctccgatgataccaggaaacatcccacaggaactatcatactccataagatttcaggttccctatggtgaataacagattattgccaattcgtaatgatggtatgtatcccttgcttatgtcgtcaaaagaaagtactccgtatacaacatgattttaagatgaattgacgaaatttaccaacgaggaagcaagaactaaacatttgtctaattatataaaacagatatattaagaagagctgtgtcatctgtcatcagatgcatctaggtcaaaattgaatttgctttggaagttaatagataaattggagctagcttaacatgtggaaataaatgaatattgataatcacttctgttcttttctgaccatcaaactcaaaaaatgtgttttaatcatcatcattttgagctggtacaaagtataaccttcaagatttattttgaactggttctcagaatctctattaaatgcctcctctccagatatgtacgttgctttagtagagcaatgctaagggtttggtcggtgtatgtgctttactattacaaaatgttaacatactataacttccagtaagatttgcgctacttatccaatgacaagacttttcagacatattcatgtaatttcctgataatcaattaattaatttttccatcaaaaacaagatgtcttcaaatgcatttaactgaaacagggaaaatataagagcaaattactacatgcagggtagatatatgaaaatgggaacagggtaagaggcacaaccatcatcttgttccatggcatctgcatcatcatctgaggatgcccaaccatcatcctttggatcagttttgcttgaagaagccacaccatttaaagcagttaaaatagcttcagcattaacagtctcatccagacacttgtcaaaaggacgcgttggtgacaatgaccctataaagaaagcaatggcaagacatattcaacaacgacacagtaactaatatggtcaagtaaaggtataatgagatcagaacaggaaaacatgtaccatcatcatctaccatagggtgatatggtgtcttaggctcagttatcttctgcctaacaggtttatttgattcaatctcatacaggttgtcttcattccacttcacacgacgagagctaaagaaaaacagtaaaatcaaattaagtaaactctaaactcacgcttgtgcagtagttttttttcaactagctcttaacagtccagcatttccacaccaaaaaagaaaaaaagatggtgtatgaatctaaaactccataaagttctttaatctaaaaatcaaacagtttttcgaaacaaaattcatgtacaaatcagcagctatggtgtatctgtctaagcacttagggccttattgtaagttattccaccatggtaccatcatcaaaaggagccgtgtcacctttttcttaacacaaaactttgacaagctctgtttgccctttcatcccttcagttttaacgtatcaggttctgaaatccaagcagcataaatcaacaaactactatttctgggcctaaaagattgagacatcatacttcaacaatcatacagctctaaattctcaactttttagtatttatagtaatatttgattttactaaacaatcatacaatcatacagctctaaattctcaacattgagtcccatctaaacaatatttgaccctgaagtaatccggaatggaaccactgatttcatcatcattgaaactgctgaatctttacaccacctcatattaataactgcctggctggaaccttaacttttgtaaggtaaaaaggaaaaaaaaaggaaaaacaactgtaaacaaagaggtgctgcttaaattgattctttgtcaagggcccagggttcgtggcctttcttgactagctttgtctgtggtttcttcttagcttgaaaagatgagggggcggtctttcccccgccggccgagttttgtttttttaatttacatatcatagcaactggaaaataacaaataatcctcagaatttaccaaacatacttcttggtaacgtgttatgggcgtgggcctaaggtatgcaaaccagcagaaatatgtccaaaggtaggaagcaagaattgacctcatgattaagcttcaacacctcccagtgatggaaaataaatgaagtttgagaaatcctcactcacgaaagctgccaaagtcatataatgttaaatggcttcatcatgttttcatgcaggaaaattgatgatgcatgatgccagaaagaaaaataataacatatagttggagatatgcaaatacggtaaaaacattagaacattaaggcccaaatgtaatgtgagattttttctggtttgtgtaggaattgaactgatatctgtgaaattcctgtgttttaaattaaaacagagcccaactgtcagtggcataagtgtaagataggaaagcacgtgcaaattcccagttccaacatatcgacacgacttaatatcatctcaagttgatgatcccgaatgactcataatactaacaaagttaatcaaacaattttctgcacatgacaaatgagataatgaactggtagaatgtaacttttttagagagtgcatcatgtgcatggaggtgaatggtcttgcagtgactgaagatcaataaagatatttgagcaggacaatctataaatgcataactaacccagcttggagagagcaccacaatattttgaacatagtatgctgtcgagacaagctattggcttaaagaaaaaataaacatagtgatacatttagcagcagcgatggattaactggtgaaaatggttactgctcctaccagctcagagtgatggttccatagtagtcagaaggggtaggatacccctgccctccacacgcacaacacacacacacatcaaaattagcatgtgttaagacagacacacacaaattgtgacatgctgatgttgccacaacgttacatacactatagaaataaatattggcatcatccaacacaaattactcttctggatgtgtgtagatttcataatactgagaagaaaaaccaacaccatatatatatatatatatatatatatatatatatatatatatatatatatatatatatatatatagaccattttctggttttcatttgtctgttatgataagagaaaggttttgcagcccacaaacaatttggcctgcatcaatggatgtgggggcacactgggtaccatccccaattcttgttacaagggaaccattagtaataactatcttaggttaactgacttttcatggggtcttaatcaacaacacagctccactgctgaatcgtgtcagccatgacctagtgatcactgattttccttggtagcgatggccactagacacacttgcatcaatacgcatatattatacccaccagctacaaggatggtgcgcaatagtttgtgcgtgctcaggaatggagaatgagcaacggcgcaatgacgagcaacgaattcatttattatatagaaccacaagtagtgcgggatggcagtgtaatcaaattttctagtcaggattacgatcgcccatcgactatctctacagagagaattattgtcaactgtgttcagctttatcgcaaggcgaaaaaccacaagcggatcataaatcctttggtactcgatcataaatcccccaccctagaacgatgaatccaggtgcaggcagacctaaacctaacacgcgggggcatatggggtttaatcctccgttttccgtttctaacaaaagaaaaagctacaggctagggagagaaacgagatcaaaccaatcgaatccaatccacgccgggatgggggatctccagtccacaccgcccccgctgatgaagtggcgcggaaggaggagggatgggggagaggggggctacgagctgcgagagagaggaataggtaccttccggttcgactcgagcggcctcgccggccgcgcgcacgacggaggccttcggcgacggcggggggagggggggggggggggaaggcggcgcgggggcacaagcggctctgcagatcgcgggagagggagagaggagaggagagagcagaggggattggtcagaaacaggggaagaggtgggggtgaatgttgtttttgtcattgctaatttatccatttttttaaaaaaaattcatgacatgaaaaggtcaaacttgtaaagggtgatgaaaggcaaagacgattttgttcacctcctttaaaatacttctttttataaagaacaaacatgatcacaatacgcatccacttatttctatgaaatcatacacgcatacctcatctctattatcatataaaataactgggttggtaaattttcgtatcgaccaagttatcgtgtgtgtctcgttatcgacagatacattatctactactaaaaaaataattagccgtgaatacttgctcctttctcattagtcacaagagttgaggcgtacaatatagtctttgacattgaataaatattttgatcattaatttcttcctaatataggtacaaaacaagaagcattaacaattaaaagtatttttaaatattaatataatgatattatgtcatacatgaaaatagatagggttaattagatacatgccattaaaaatttgctggtttcgaaatatactattactatttacgtatttgtaacaatgctactgctatttgtaatctcaattgcgtatttgtaacgatgccactgctacttatttgtaatttcaattgcgtatttgtaacgatgccactgctacttatttataatctcagtggtgttaatacccacaaagatacgtattttgcatgtattagacgaaaatgcactcatcttttacctctctctcttccctcgtcttctacctctctcttcccgctgctttcttgctccaccgccgctccgttctctccgctctctccgccgccgtcctcgccgttgtgagccacaacttgctctatcgctgccgccatcgccctcgctgctcgagcccatccgattccagcagtcgctgccctagtcgcctcagccgccgccgtcgcaaccgcaacactgcactccgtgtgcccgtcgccgtcgcaggcgtcccccagtagcagcagcagcagcaggcggcggccgcggcgagggtgcggagccccgaggtggagatagcgctgcagtcgcaggcgtccccctaacggcagtgtgaggtggagggagatgcagatgtcgcgtgcaaaataacgctggagagggaggagacaatgactgcaacactcgtatgtttatcgctggttgtgcttgctgctgccgacactaagcatcactggtctctgagctgtggaagaaagaaggggagaaaaaggaagaaggaaacaagggcaatttggtccacattttttcgtaaatgcatctaagaggtaggtagtggcatatcttgaatatgtgtaaattatatggcatggattcaaatatgtaaatgctcgtggcatattttaaaaccggaatatttttaatggcacggatctaattaacccagcagagtaatcctagttgatcttgtaatacaagcaaacaaaaatgataatattttagctggcttgatcccatgtctgatgtttacaagcctattttcatctgtttatttctcttggcacagtgaattcattcgttaggagcaccgtctaccgccataggtaaagagaaataatattgcttttgagatctcacatgtctcactggacgttttgacgagccagtccgtggcagagttgatactacgtacaatccattaattcaagttattagggttttaacatattagatgagcttttaggagtccagaacatgaagatgatacacccggtggtcaatctttgttatttcagactgtcaactgcgaaaaatgactttggcttttttcttttctcgaaaaacacatgagacgttatattttattaagaaaaaaaataaaatatgattagctgtcaaacttcttttgcctgatcttcaacttcccatgatgaccctattaggtgaatggagcaattagcttagtactaccatgaaagagttgctgtctagaaacgttgcaatgttcgtgaaaggtattatggcatcttcatgaaaattacatatgaaacaaggtgaaaggtcgcgtgatttgctattaagtgcaaaatttcaatcagtttcaggcggtcacaagtgcttatcatgttacaaggtcctttgaaactcccagcctgaatgactgagacaggttatcaacaggaaatctacgagtatttgattcgaattcgagcatatcaaattcgcacaatgagaaaccaggtgatccattctccagtctaattgctaaattgacataccatgcagcgccggattcgctcagatctcactgatgtactctaaaagagattcgacctcttgcctcagggcagcaactttctgctgctgggcagcaatcctgttctccacatcttgccctcgcaacttcttttcaaagctgtcaaccacagtggaatgccttgtcatgagcttatcctgcaactctctctccttggcaaccaattcctctacctgcattaaagaaaaaaaggccaactgtaaccactatggcgcatatacttaattagagaatgtgggcaaagaactcaaattcaaattaaatggtgaataaagatgcactagtaagtatctctctcttctaggtggtctatgcacaagacgttgagcaaacctttggccatatctggtaagactgagaggatgactgcagggatgtcaacaatggcttcaactcttttgctaattccttaaactgtgcatcagctgtcttacgagccactttgcatgatttaacatctcctgacctagataactcgtgtaatgaggtctccagtttatcatgagctgctagacattggttgaagatagcctggatttgctggatgatgctctgtacctgtacaaaaagtatgaaatagattgtagaggttagtctgcagaaagtaagaggtctccacaagtttaaagcattcttcaattccagaaacactacaattaatgttgatccagcttaactgcttaaaccaatgatacgcaattattatcttcttaactttgaagtttggattgaagatttaggacttttcaagtaacatttttttccctgtcaattatgaagctcgcttttaacacagcatggactgctctttacctccagattcatttagagcttgttttgcagattctattccaccgtggttaagacccttcacttgtaacttgtccatttttggaccaaagctctcaaaagccaatctttaacagaaaggacagcgttctcacatgattctgatagtaaacttgtcacttatccaactaaaagttctcacatgattctgatagtaaacttgtcacttatccaactaaaattactagtaaacaagccctccccaaaatttaaggccaccattcaaccctgcacattttgagacctttcctagctatttgctcaggccctaatatgtttgtcatctgatatttactagttcaagtttttatcattgcattttttttctcccataaaaataacaccgctacatagtactccgtatgagctagcaaaccaattcgaattatgattcataagtttatttcactgtaattagtgctcatcctaaacatagcagcagtatagtaacaaactgtagttcactagaagaaaggttatggcaagatagatttaaacatttctcgtaaatcatcaaaatccaatcctcaaaggggagatttgactaaaacgaccatacctcatcccactgcacctttgccagataagaaggagaattcttagagattgacatgtcagtgcgcatgtaaacaatacaggccatgaagaggagaaagaagccagttatcaacatcatcggttctctgagtagagagatgttgttgaacctgtagtaaacctgcatattgtagggcattaacaccataagtttgctatggttcacataaaacaccatgagatagacaactcacagaaagtattcatggtgcagtaagccttttgcatagcagattttacatactcttcagtcaggttaataatttagcaacgctcaacttttcatggaggggtaaaattagttgcacaacaaattaagtctgaagacaaacctggaaatatagattatgctctggaataacatcaagcttctccaagacaaccactggccttccagaaatatcaaggtgtgaatacttcacctgcaccacaaatcattgtcattacaacaaaagaacaggatcagctagttgttcagaatatatgtgtgtgtgtgtgtgtgtgtatcatccaacaagaagtcacctcttgctcttgctttgttggaaatggaactgaaatatcaatatcctttgaaccttcaggcagaacaacctgttcaaaaagaaaggtttttatgcagggagggaaattaatatgtaacatcacgttcatggaaatatgtgcaaatgtatttcttattgattatctaaccatgacatgtcatctacatttttttagaaacataaaataaaaataactaagtgaaggacaatacaccagaagatagccaagacaacaaaagggtatgttagttgcaggttcccagcaataaatgaagatctaatttcaatatcaaagaaataggcaacacaaggaattatgtttggtgtctaaaattctatatcagtgcaattaagaacaaaacatggaacacaagggtaaaaaatgaaagattttaccgtgcgtgccagatgggtacaggagaacataccttcacaataagcttttctatgagaatctcctccactggagaaccaaatgtgatattgaggaatctctttccatcagaattgaaaacaaagtcttgaagaggtaaaccataaccaatggtaaaggtcgtttgccaaccaccaaacaaaggaaaccttggctcaacttcaagttgagtctgcaataggataaatattcagcatatgcactcacttttgcaattttgctgggaatattatagccttgaaactgagataataaaaagcaagtgtaccttcttggaatcactccataaatgtgatgttgaaatgttaccaatctcatctctgtagtatatagaatgtgcccttggaggcagtctagcaataagatgcctaaaagatgagacccctcttatgtacggtctagattggtaatcaatcctgcaaatttgaacacatcagttatctctggacaaattttttctatccagctaaaggtgagctatttaaagcacaagttagaagggagaagaacctggaaaattcacccttgagtttggcaccaccatgagcaatgttgtaatgttctgtaatctgtacattcccccagtgagatatctctatctcccttataacttcctttgcaactgcaaaagggttattgttctcatagtgcacaaccataggggagtaggaaaacggtggaagatcttcatatggtccatattttagttctgactctgcaagttttgtgtttgggtactttgtgtaggactcaactcttccaccaggcaatctgatactaagtgtctgtaccttaacagggtaaggtgacagatactgagcactgtcctgatagacaacaagctgcgattcagcttgtgtgatttcttcggggaatggctggacagagtgcgtaaatacggtcaggacatctaagtgaagagtcttccccttctccaaaggtttggataaagatgccgaaaagaatgtaagttctgggggcactccagaaggctgaacaacttcaatcggaaggaccatacttggacctttcaccttttcctcagtaccaaatgctcttatagctgctaagttctttgcttggacattgggaaacgccagtagaaattgagaaacagcctccggtccactattctcaacctaaaaaaaacagagattacaacaaaagcaaaacctcagcatatcacatgtgcatagacaaaaccccatatattactctatctactagtgaggactggcatcagacaaagtgtaattcaaaaagagttactcggagattttagaattggtggtggcactgacaaacacagaacccctattgccagttaaaccccaacttcaaatcaaccagaagagagcttgcaacccaaagaatctgcaggccaaatcatgcgagacatggaattgaacatcccaaattgagacgttaagaatttggagcactcgtgagcacacgtcgaggcgatgaacctatacaggacaccattaatgatgaaacgctaactccatccatgatccatccacacattacagcgctcttatcatattatcagcgatgaagagacaaacatctacccatccagaactatatcacgatgaaatgagaagctcccttaacagatcggacgaacgaaccggggaacggctgaatctccccccaactagacaaacaaaattcgagagaacacagcaacaacaaccgcgtgtaccttgagcgaagtgaggacacgaacgatgtgcgaagtcaggtcaacctgcaaaaaagaaaaggaagggcaaagaggcctcagatccgggggcagaaggcgcggcgtgctcgtcgggagatctggagggcgcgcagagagacaaagaagcgaggcgggagctcaccttccgatccgccctggtgacgacgagatcggcccgtgcggtgggggtggaggcggcggcgacgaggaggaggaggagggcggcgacgcggcggagcggcggtggcgtcgccatgttggggggcggagggcagatcggtgggtctctcgcggcgagatcgagtgaagaagcgctttaaacccttcctctcctcggctcctcgtctcatcgtggaggagaggagaccgggcggctagacctgctcgtgggccgcccgacccggcagcccaatcgggccgggcaggctcggtcctgcgttttgcagcgcggtaagtctacattgagtccctcaaattagctgcaataccagatatattgaccccccaactgtcgaaaccggagcaaaatgactctctcggtggttctgagggtggatttcgatgacatggatcattgacatagtctaatcagctgagccagcgtgtgggacctacatgtcctcctctctctctctctcctccttcacacacctctccggtgggtaggcgatggtgcgggcaccaacgatatcctgcgtagtcaaatatggcgggctcctcctccaccaccacatctccccatcgtagcagggccatgccgccgtggttgagctcctcctcttccctcgagaggaggcgcaagcaacgacgaggtgccgtagcatgtcgctgtccctgtccttcgcgcgggccgctgcgagccccgagcccacctccattcacaaggttagcccatgtcgtggtggcaatggccagggaaaagcatcaacgtcgctgggctgacggctgaacacatctatcgcgaggaagagcaacgaggcgagcagcaacaccagcgtgatgtcctctcacggtagaatgccggaagagcgagtagccacacagtgcttcggcttgcttggcagcaacgacattgggggaggagaagagagttatgtgtcggtggacgcgatccctgtcatgtgccgggctgcccacatgacgagaggaactgtgccgagggagatgtagggggagaaaggggagggaggagaaagagatatggatgcaggggggtgggtgggtcttcctcaccgtctgaccagtcaagggcgacgaggccactgccttcgtccatggccgttgggttagggcacaccaccgtcaagccgtagttccaccagttccaccaccacgacctcaccacgagccaccaacaccccatgccgacgtcactttgtccttgtcacatgagccgtgtgcttcgtcggctgccaagtagccgccgcctactcctccctggtcaatggtgacgggggtccaccggcaacctcaaggaacaattcgcacaggaggagataaaggtgtgggtgatgacgtcgccgcaacgaggcatcatgttagccgcgcagatggtcacgttgtccaacctctgcgatgaggacgaggatgagggcgagggcggtggtcgccgcaagctggctcctaccgcggtggtgttggggaggcgcctcacgctactggacgtcatccggcgtcgactagcctccgtggaggtcgaggacaaagatacagagcgaaggaagggagcaccacccacggtggcgtcggcgaggtgacatcgtgatgtgaccatggctaccacggatgcaaccattgctcacatcatggatgaacaaaaagatatcgagatcaagtactccaagtgctggaatccgattcggccacctactacactgctgacttcaaacggccaccgaatctgcatacgacctccgttttcggcccgtgagtacttgatggaaagctctcggagccctctttctaacggatccagcctcttctctgaattctatctcgtgtggccagaatcacaggaacaaggtgttgcatcacctataatgggcctatgggcttgtaacttcatttgggaccccgggccaggtggggcccatgtggggtgcgccccaagctggtggagcacgaccctaggcacccctaggtcgtcctcccacccctatatatagctagttaccccttcagggtttctcgggttttgttagattaaagtttagccattgctacttgcttgcagcgcgcgtgtcggctagaccgtccgtctgcttgttcttcggaaccccaacttatcatttgtattaaattcctatttgcaatatcagattgcttttatcttgttcttgcttgtttcttcgatttgcttgcaggaatagggttgatctgcaccggcaagatcagcaacccacggagaggtgtatcgatcgctaaggcgcaacacaacgtctcgtacggttgtagtcggatcgtcaacgtttctcccaaatcgtagttatcacaactcaccgaaagatcgggccaacaacagccttgagtgtcgagaggaactcagggttcatcaggtggtatcagagctttcgttgctcggtgagtttttatcttcctataaccagaaaatagccatacaaaaaaattcgtatcatttacctagccatattgtgccattgcattgttcttttcagtttttgctttgttgaattttgtgttgcatcgtcacgtcgtgttgctggtcttagcgtctagttcgtttagagtttcgagttctggtcacgttttgtaccacagtcgtcgctgccaccgtgtctctgttgttgtcgggacctacgaaaacggaatcggctcgctgccacggttctatttttgtagttttcagaagtttctgtcggttagttttggagttcttgagttgcatctagagtttgccgatccttgtgtgtgtttgttttggccgtgcctatgtcgtgcacgagaggaggaaggtgaattaccatatctgattttggaagtagtcaagattgttttggaaagatatagtagattggattggttaaaaatcagtttcctttttatcccatacaccaaattcggctgccatccactccacctcctggccgagtcccactcgcccctttggccgagtccgactccctccctctcttccacggttccgagttgtgtcaaacaccttggcaaatttttgtttggtgtcggtttcgagatctgtttggaaaaacggaaccggcataaattcagcattccattttttgtataattttaattttgggtttagacttttacatttgagtccctgtaaattttatatttatgtttgagtccctgtaatcttacattaaggtccttgagtcagtttttgttaaaaaaaaatcaagaaaaaaagtgaaaaaaaaggcagaaaggtgcaaaaaaaaaagccgcacaaaaaaaaaacagaaaagaaaaggaaagaaaaaaaaagaaaagaagaaagaagaaagaaagaaaagagaaaatactgttatgtttgagctgaacttcatatatcagagttgtgcatgagttgttcctagtgctatcttgtggtatcgtttgtgtctaggctcgcgtctctagtacgttctagcctaggaccagcacggtacttgactttgaacaattattcaactttgcattatctgatttgagcatttgctattcctttgctacatatttaagcctacccagagctccacatatttgattacagctgtaccgcaagtgtttgccaaggcatcgatacatccaaccttcattggggtgcttggttgagtcggtgtatgtcaccattccacttgcattggtaagatcttgtaagagcttggttaaaagcttgagtgtgtgcgatttttgagctgccactacctagtagttaataggaacgcgcatatttttgtgtatgtttcttgttttctactaacaatggcagggatacgcaagataattggggatagctgcgctcaacatcgacatcttcgtcgagacatgaggagggatcaacatgaccattatgaggtaagtgatgatgttctaggtaagatcaaatctgcactgccttatttcgagggagactatgatcctcgtgcttacattaattgggagctagcggttgatagtgaatttcaaaagcatgtcttgtcggagaaacaaaaggttatgtgtgcctctagtgttttaattaaacatgcttctaatgattggaaacatctttgtaggcataacaaaataccacaatcttggaaagacctgaaacgatatttcagagatgtttatgtttccatgtattatgctgacattttgttcaacaaactgcaatgtttaaaacaagataccagaactgttacttcatactatcatgatatgcaagcttgtttattacgttgtggtttagatgaatgcgaagaagctaaagaattgaggtttttatgtgggcttaacaaagaaattcaggacatgcttgattgtcaaagatatacatctctttctcatttgttacaacttgcttgcaatgctgaaagtaaaatagaggaggacatgaagaagcaacatgctatgtttttgtcttctattactaaccatttgcaggaagtgcataatcatgaaaaggaggagagagacatgaaagagccaccagtcccattgatcacactcaaagtcgaggcacctccattatctgaagagggcatcaaaggtaaacttaatggtgctgaaattaataaaggtgagtgtgttgttaatgaattgaatttgtccacttttcatgctatagcagagcaaccattagtggaaccaactgctgagattcctttgtcacaaattgatttgtttgctgttccttgtgataaagaagagttatgcgataatgcttcacttatatccatgccacaacttgtgaatgaacatgctattcctactgttaattcatactgcactgattttaagcatgttgttcacattgctaatgaagtagaggagcgtgaattgagatcttctttaaatactatgggctatgttcagtttgatgatttttgtgagctcgataatttcaaggagaaattatttgctaagtctgatttgccatatccaaccaatgttctatttcacatctttggtgaatataatgatcttggaatatattttgtgcatagagtttacatctgctcggatttagaacctcctgtacatgtggataaaatatgcaagctagagaaaaatgttattgctaaccaaattgtctcgagtttgccttgttttgattggaagaaacaggttgttgtaaatggactacgcaaagagcaccatatggaaaaaccgaggacggttttccgtgaagaaggggaggatgatgtgaccatggctaccacggatgcaaccattgctcacatcatggatgaacaagaagatatcgagatcaagtactccaagtgctggaatccgattcggccacctactacactgctgacttcaaacggccaccgaatctgcatacgacctccgttttcggcccgtgagtacttgatggaaagctctcggagccctctttctaacggatccagcctcttctctgaattctatctcgtgtggccagaatcacaggaacaagatgttgcatcacctataatgggcctatgggcttgtaacttcatttgggaccccggcccaggtggggcccatgtggggtgtgccccaagctggtggagcatgaccctaggcacccctaggtcgtcctcccacccctatatatagctagttaccccttcagggtttctcgggttttgttagattaaagtttagccattgctacttgcttgcagcgcgcgtgtcggctagaccgtccgtctgcttgttcttcggaaccccaacttatcatttgtattaaattcctatttgcaatatcagattgcttttatcttgttcttgcttgtttcttcgatttgcttgcaggaatagggttgatctgcaccggcaagatcagcaacccacggagaggtgtatcgatcgctaaggcgcaacacaacgtctcgtacggttgtagtcggatcgtcaacgtttctcccaaatcgtagttatcacaactcaccgaaagatcgggccaacaacagccttgagtgtcgagaggaactcagggttcatcacatcgtctccggcaccgcgagatggccaccgcagaagctaaggctgaagacccggggcagaggaagggagtgcggcgcccacaactgcgtcaaatggataggtcggagaggaagtgggaagagagaaaagatatagtgaaagaaggacgctgactcgtgggtcccacatgatgacttagcaaggtggactaggtcaacatgccacgtcagcgaaaaccaccctcaaaaccaccgagggagtaattttgcactggttttactagtttagggttaagatatctggtattgcggttgagggatacgaatcggattgtagggtctatttggcacaactctagctccagctccacctctcgtggaattggagcatagccaaatagtttcagctccatctaaaatgggagtggagcttggtgagcgctctcacaaaataaagtagaaaggtggagttgagtttagactgttccacaactctactccagacccaaccctcggaattaaatttaggagttggagctctaccaaacgggtctgtacttatatttgagggagtcaaagtggcttattccttttgcagccccaaaaatgtgaaaaataatcattgaaagaaaactagcatggtccatggtagcccaaggtttggcatcatcatcagagaaggcaatctacatcacaatatttgcataattagtggatataccccacacgttgcaaccgggaatttagaaatattttaaagaaaacttgtatttttttaaatcgtgtactcgtaatacctaaatggacaatattttgagctctatatagtaattgatgtgaaattgcaattttataagtgtgagagtaatctaatgattattacttttctaggtgtcatggttcaatgtacattaagccttatggcaataaacgtagtggattttaaattcatatggcatatgaatggttgacatcaaagcataggatggatccaaaggctggtattttctatgtgatgttatggcatatgaatgattaagataaaagcataagatggatccaaaggacaatattttatagatgatgtggctcaatgattgttaagcttttggctccaactatgtagtgtaggatatataaattcacgattcctagttgacaaggaaattcaatttccacgtacataaccaattttgaatgaaaaaccacggttgggggacctcagaattgtcctcaggcagaggtgaaaacgatgttgggggaccttgaagttgcacaactagagcacgggaggggaggggggggggaggacttccacagatgccttgcgttattggggaggaacacgggagtggttgaggagctcgggaaagccttcagcatggatcaaggagcattgggaagactttagtgtgaagggaggagctcgagaagttggctgtgcagctacgggcagatgcaccgagcttctacagtatgtcttgtggtgttgggacggcagaacaacgactgctagcctaggaggcatgggggaggtgcggtcacatatgcagcgtggaggagcttaggaggggttggagacagcatggcggcacttagtgcctgctagggagtgcgcgaatgatggcatgtataccagcctagcaggatgacaatgagtggctactctatggttttagggtctcaacttagtggcataggggacggaaggagggggatgagggtgggaaagttgcgcgagagaggggctcaatggtgagattgcatacttttttttgcacttaccctgttgttcatttcaatgccatctttgttgacctttgccaccgaatgatgctatgatatatgacaagatatgatctctaagtggcctttcgaatttaccacatgaaccctctctccatatctctaaaatgttgactcgttagggtgtagtggatgatctaaatcctcaaaactaataaatgctttagttataaaactggatgtatcaattagagaacaatttatcctaaagaattaactttcaatatcaaaatgtttttttctctattaaatgcttgtgtaatctcctagaactttctttggccaaaatcctgacccattttaacaaacaaggccttctgcatctaaaaacatccatagataaccaaggaagtttttatgtacccttatagaagaagctgcttcctccgtttcacaatgtaagtcattctagcatttcccacatttatatgatgttaatgaatttagatagatatatatgtctagattcattaacatcaatattaatatatgacatgctagaatgacttacattgtgaaacggatggagtatataaggaccatttgtactcagcaaactctgtggtccttgcctcatgagatgcacatctttaactctcctaaaaaggaatttcagtttcagactttttggagctttttttggattgtctttattaacctcttttcacttcctagtactccaagaccaaaatcattataaacaatatcttcactttcctaacctctctaccagaaccattgcctacctaagatagagaatgggggagaaagaggcaatgctagtggtgtgtgctaatgatgtagggttggtgtacgatatcaacacatgcgagaagattatgtacatacacgactgcgttgctcctccatgtggcctcgcttttgttgatggatttctcctcgctgcatctcggacagacaaggatcaaccaatctttggaagtgctatatatttctgggctccaagtaaggtaagatttcttttgtgccatgtgatgtcttttcttcgtctttgccctttcaggtaatggattttgtgtagatcataggttggattgtgtggatcatggcagcaaattagtctagagaatgaattaattgcagaagtctagggctagaactggtccttgtgttatgattggttccaaattaaattatatgtttcattaaaaaataagatggattattttatcaaaatactctaaattttgttagatttttcgctatcatgtttgtaggagtagatctaattcgatcagtattgacaaattcaggtttttcaattttagtcagaaatcatatgccagattatggtagaagggattcaagatgtaaaagtgtgattgtgattagggtgagtcataattcagatgaaaaatgtgatccaagttacaagctaaagtgataatacattaagtccatttttcctatttcatctaaaactcggcatgtattgctcatttctagatgtaatagttttttccctcaatcaaccgaggacatagaatcaactaactacaacttctcattacccttacacaacaagtacatacggtgtatgtttctatatggtaaatgactaaaactgattgattgtaaaatattataagtgttcaaatttaacatttagtgagaaaacaaaatggcattacttttaacatatgggcccaaaggattaatgctcaaacatgtgagtgtttatatctcaattgtgaataccctatagtcctattctagttccatttaaattattttccttttacagatcaaggaagtgcaaaaaagttatgtagctgaagccattgggcccattgcttgctcaaaagatggggtgtatttggttggtggtgctagttctggacatacttatatttgggaggtaaataaaaaaagcttcctctttctacaaaagaattaaactattcatacgtcgttctattctagctagattatgatcaacaagagactcttgatgcattgttcgatgtttgaattgggtatctttatattaaaggaaggtatggcttgtgtttatgtttgttttttaaatcattctacgaattatcctgtcatcactaatgcataattatatccaacaataccaagttcttttattttgatttatgaaagacatggggatttcctatttaaacatgtatgaatctaccgaacttcaactggtttgtccagcaatacaaaatgaagtttgaactaataaaagatcacatcaaaacttatgccccgccaattctttcatttataacctagtattcgttatgctccatctttatcgaaaggatgccactctgatcataaattggtttgctccatttgttaatgttagtttggatgatctaaataaggaggtccatgtaactgacaaacggaagaaagtttatgaccatggaagttaattatacttctagtcactatgttaacttccctaaaaataacattacgagttcatttagcgataaattggtagtgctgttccagcaaggatatataatgatttgtatttatatttgagaagcagttcagttgaatatcccttttgtatgtatgatttcgcttgaacaaaatcttaatgcctctcattctacttcacttgacatactaacattttttaacctactgcattgtttgatattctacttggatggttagtgtatgagtgtattttttaatccaaattcataaataaagattgcatcttctatgggaaatattcttgcaaatagtacaaatatctaaaaagagtaataatttaaattttgcatcacacacttagtgacaaatttctgtttaatatgaactctttttcacttgaaaatattgttcatttcagatagcaagtggagcattattgaaaagatggtgcggacataaaaatgctataagttgtttagccttctctcaagatagttcgtttctcatctctggatctatagaagggatggtttatacttggtcaatggtcaggtactctctacaagctagaagtcggtgaagcattttttttaggaaaaaaatacaaattactccctgaaatatcgtggtcgactgaattaccccctgaactcgaaaaccagatatcgctcaccttgaacttttaataccggacaaaacaccccctccccccgagcactgttgcaagcggtttaggattcaaatagcacacgtggcagtccagacatcagttttttttaaaaaaaaattgctagggcccactcgttggaatccccgcccacatctctcttctccatccccttctgaagtgggtggtggctagggagagggcgtgacgcggcgctcttctccctcctcttctgtagcgcgtggcatggggggagatgggcgacacaacatggcgacgcgaccggcagcggcaagtaggcggaagcgaaggcggcgcgtgccggcagcggcaagtaggcggaggcgagggcggtgcggaggacgcagtggcggtcagagtactgctaaaatctctcctttctctttcttccctctggtgcggcggtgagattgggtagggcgcgtcgcgacggggctagaggggtagagccgccaacgagggcgtcgggaaggagaggtgattggagcggaggcggcgatgacagagcggtggagcacgcggtggaggaggagcaaccgggcgctgggacgacggggatgggctgcaaactcgtcgccatagcctgccgtctccaatgtcctcgtcggcgcccaccgcccgcctcgccctccccaccgcacgtgtcgcgccttccccgatgaggactttgtcagggttatggatatcacatacccaatagtaatcgactaagctcggcagggcccaccacataccatgttttatatggaatcatacctcgtatatagaaggagttccggataaggaaggacaaaaagagttctatatgtaaactacaaggactactcggatcgtatctatgtttatctccctagttctacttggacaagggggcatctatgggtataaatacaagcccccctaggaggagaggagacagaagccaaacgccacaaaaccacaagaccaacatatacacacgctaacacacgccgccagatctcgacatcagagattagccagacataccccatccggtgcctacggaggccggtaagagggatctagcatcatctctgatctcaacgggttcatattcgaggaggaagactgccctgttgtcgactacgagttggttatctagccgccaagttgacgacaactagataggttatcccaaatattgtacttgtgtgattcagatgaataagagcaacactggcttcggtcaacaggatgtagggctattacctatcagatgaggggcccgaacctgtataaaaatccatgtctccatctcttttacctcaatctcgcatatacctggtaccaacgatccccataccatccaaataccctagtcgcgatcttaaacatcgacagactcatcgctcgccgcctgcctgagttgagagagagagagagaggcctcaccgccgtctccagggaagggagcagcaacagcgctggcgcttttgcctcagcgccggccaatgacgtcgacggcgatggcgacgatgaaccactcgtctactcttctccctactgctcacccgcgaccctgagctgcctcacccgtgaccccgagttgccttagcctcgccaccgaccgcgctgccctcgcctctatggtcgtcagcctttgcagccgccccgccgcgtcacccctctcccccgccatggctgccttctcgcgtaagtccggcgcgagccactactcccctaaccacaggaggacgaggcctggtgagcctgatgggccggccaccgccggcacgccacatcctcggcctctgcctcgaggagactcgcaaccgctggcgcgccgctagtcctcgatcacgctaccttcgtttccgcggtcgccggcctttgcagccaaccaactgcgtcgggccagccaccgtcggcgcatgcgctgctcgttctcagcggcgagtgagcgacatcagagagagatagagaggtgagaggggatagagaggagagagactatgatatgtgagccccaccattttttaaaggcaaattttgctacaggacactgcttatgtgtggttttaaccctaggacactgcccaaactcacttttgggggaaaacactctataaacatagtaatttgccagtggacaccgccccaattaaaataataatatctggtagaagaggagagaaaagtcacatgaaatatcaaaaatacccttcggcccacatgtcagcactcatatctctcttcttttaatctctccctatcttcctccttccagcgtcactctgataggcgagccggcgtgcagaggaccggcataggcgcgacgaccttgcgggtggcacggcgaggcgaggcggcgagcgccagtggggtgcggcggctgtgcgggcggcgcggtgaggtgtagtggtgcggcagcggcggtggctcgcggtgacaccttgcggggtgctccggcggcgaggtgcagtggcgcggcggccatgcggaccgtgaacgtctccgcaccgtagcgctcgcctggaccacgaacttctccgcgcgctagcaggggcacttgcgcgcctccacgacaacgtccgccgccgtgctcgcacggcacaccgtctgcacggtcgccgcgccactacacctcgccgccggacgcaccttgcatggtgtcgccacgagccgctgccactgccgcaccgcccgcacagccgccgcaccccgctggcgctcgccacctcgcctcgccgtgccacccgcaaggccgtcgcacccgtgccggtcctccgcacgccggcttgcctctcagagtgacgctggaaggaggaagatagggagaaattaaaagaagagagatatgagtgctgacatgtgggccgaagggtatttttgacattgacatttcatgtgatttctctctcctcttcaactggatattattattttaatcggcgcggtgtccactagcaaattaccatgtttatggagtgtttttccccaaatgtgagtttgagcagtgtcctagggctaaaaccacacataagtagtattctgtagcaaaatttgccttttttaaataaaaagttgctgactggactgccacgttggactgaaaccactctgatattgagtaggggggtgttttgtccggtattgaaagtttagggtgagcgatatctggttttcgagttcggggggggggggtaattcggtcgaccgtgatagttcagggggtaatttgtacttttttccttttttttaaggcccaacttttcctgttgggtttactagtattacacgcaggcttgccattcaagcataggaacaaagcaccactacattattcagcactaccagaaccaactagcaagaataggtagctaaagaactacttatgacaaagagaaaaatgtcccaaatagcttgcaaactatataagcgcaacagtctcatcaggcttgtagactatttgagacaatccttggattgcaattagagttgtttatttttttattggaaatagcgagggaggccctcacggcatctttttcttttattcaagcatgaaatttgctcccttggaaagtcgaatgaaggacctagaggtgctacttgagcactgtaaccactaggctacaacccctttagcaagttgtctcatattcagttgatccagcaaggtgtcaatgtcttcttgctcttcccactccattagtcactatcactacacaaactattttttacagtttgatttggaaaggagtcttacaggcaagtattaaaacatatagatcatttttaatgaatcgcattaaatgtcaatgcaatcacattagtccaataggatgatttcacctataagctacctctgatagaaccaacttgtttgtggactcattcaagcataagataaaacccatcatatataagccgtaaagggatgttgggtaaatatatttttatcaatgtttcccaaccaccatgagacaaatgaccacatttcctagaactgagccgttgtctcactatctccaccattgaaatcatctatgcaacaattttccagaattcaatgatatgtatgtaggtagttgaaaataagctatttttacaattcatcatgtcaacaattgtcctctgttcttctcactccactccagagacaaagtctcactcttctaactatatattatcataccaaacatctcataaaagcagtacaataaatatttgagaaatgctccacttcagaaaaagaacagtgttaccagtatattattgttggtatgtaaggctatttgatatcagatgaggcaccaaaccctccaatgggaataatcaactaagcatttaagttaacacatgctttcaataacctatttttcgctctgcatatgaactttgcagtttatttcaagcagaggaacctcgacccattgaaggtacagagatatatcccaacttttataatgtaaagaaaaatgagcacaaggcgtcaataactggcattttaacaatgctaaggggtcaatgtcccattctaataacgagctcactcgatggcaattgcaaggtttaatgcacctcagatgaaatatgttgtttccttttgcagtgatcaatattgcaactttatcagcatcctatatgaaacttgaaatctagttcctgtactaaatgtcatgtacactttcataatttagcaatgaattatgactactgatactccatacattcaaaatatattattcagtaaaatggttctatatgcttagttctttttaaacaatataacttacatatatgtttgttgtctatacaatttactattctgatgtttgcttcaatattataactagatctcatatcaacacaaaactcgatgtggtcaatttcttgtgcttgtgttattcattgcttaaaatatattcaataatagtaccaagaccaaaatgcaacagaacacttactcgtaagatttagcacactttttgaatgtagatttgagcatgatttccattggcgctgatgacaactttgagaatatgttatttttctaggttacggatctattgtctgggttactacttcacaccatttcactctccagttcagttactacaatcgcagttgatcctttggaacaatttctactttgtggggctggtgatacttgtatatatgtcactgtgttgaatggaattgggacaaaaaaatccagtttaacatgttttgaggataattgtcaaattctttcaggacacaagtaagttatagttgaattaagagcattgattggtaaattttgcaaatgttactcaagacatatcaataattgacaataagatgcaatgtactattttaaatttagaacaaatattattatcaagaatataaaacaattatagggatttccaaaatgagaacacatttctttatcacaattaaaacttcaaggaaacggtgaacataacctctaaactttgggtaaaattccgtgtagcaccctaaacataacccccagactttggaataccattcatattatttcctaaagtgattttggatagtggctttgtgcatttggaagcttaaatgagcctgttacacatcatcagtcattggtcatcaatatataagatatagttatgccatactagtattatatcgacattcatttgtaagttcaagaaaaaagtgggtaagaatgaaagatttaggtggagatattagcatatatgtccaatgtcatgcagtcatcgaacgtatatgcaaattacataaaaaccagtttgcaaaatgcactagtatttggtttatgtatgatattatatagttcggagggttgggtatttggtttaatagattagggtgccaaatggactttcaatcaaagtttcttttgggcggggtgtatttagacttttctaaacttatgtaatatgtatctatacgttagtttctattgtatccaatcttgagtattagtttctttctatgttagattatgattgttccgaagtattttttaacaaagttctataaagtcttgatatctaatctatacctaacattgataaaatatttgattttaagtgttgtgaatccataaaataattagcacaacataaaactaattggctgattccaacttgtcaacagcgctccaattactgcattagcattttgttctaaaggagtaaggttggtttctgcatcaaaggattgcactatccttgtttgggacacaagagcatggcaagttattaataaaatagaaaacaaaataggtaagtctacatgaagtccattttagttcacttttgttctttctgaaagggtcacttttgttctttctgaaagggtcacttttgttctttccgaaaggttcttattttaacattttttttgccttgtcatttcgtcactaggtgggcatataacaaatttgctagtctttccaaagcgagcgatctcaactgttcatcaagaaagaaatttccgtcccatcaagttccctaaattagagaagatatgcaaaccaacaaatgaaacaatggcatttttggtgccatctcaattctccaaagatgtcaattctagcatagtatctttcaatagttccaaccttctggctgagcaactcttggatttagaggtaagacttatatgtattattattatttctgaaaagaaaattatatattattatattaaaaattatgtaaagaaaactaattggaacactttctactatttactaggaaaagagaacccttgaagcagtagagatgattattggagtgaacattcaagaccgggtgaagaaccaaaccatggcaaaggaattgactaatatgaatatgctactgcagggacaagtatttgatgtgatggatgttggtgcagatgaggattaagtcattgatttgttgtttcatccagtatgtgcaatgaacataataaaatgattgaacatatatcacagtagaaagtgacataatccaagtatcagaaagtgcaatcttgaaaatcatatttatctgaaatgagaatgcctattttatttggtattgttgtcctgttaatttatctttgagataattcgttgtatgctgcctattattttattattctattacttatatacaacttctaagtttagctcgatatcatgtatgccaatatgtttggctcttcattccatgcatacctttttgttcctatatcattggttgttctagaatgaccatatcacccctcatttttttctccaatacgtaggagatctgtttatcatcatattaacaagaaaaaaagatgggctataaccctgagtacagaaccaaacacgcacataatgagttctaggaaccatacatgttgcaaaccaaaccacaacacaagaccacaaccacaaaccaaaccatgatgtgagactaaccacccggctcttgagtagtcaataatgatagcccctgaggccggcaaaaaccacagttgtgcttcctccttggcaagcaaaagagcatcggccaatttaggagcagtcccataaaaaacacaatggtttcgatgcatccaaagcgtccaagaaccaagaatgactatagaattcaggccatattgcaccctcaatgattatgctccaccacttattttgatcgtcattcaagggggaccaaagaatttaggacaaacctctacaggagggagtaccaaaactgtttcatgaagacacaatttgtgagaaagtgatcaatagtttcatcatcttggtcgcaatgagcgcaaaggtctggatgtggcagaccttgtcaggcaagacaatctggtgtctagcagtgattatgcacgacaagtcacatgaaaaaagtgacactttccagatgcccatgttttccaaatacgttcccatggcctgaaaatttagtggcaccttggaaggaggaatcataagcatccttagctgaatattgtcttaaattcatagtgcaaaaaactggactggtgagtgacctggatgaccccttggtgcacctgtccgacggtctgaccggtggactgccggttgaaccgtggttcaatagcaaatatatacggtgtgtatttgctctaaaatacaagggaacaagggtaggatggctagagccaagcgctctcaatgcacaaacccagtttcgagtccctataccacaagccttcctatgatttttgtaaaaaaaaacagccgcgtgggcctgaaggcaatggactgggccttaatttggcccatttatctccttttacccggttgtaccaaagtggtttagtgcccggtatagtctaaacctagtccgttcagttgttttttatccgggtcgaatgcatgtccggtctttaagctcaaccgaaccatggagatctaaacccggtcggttcagtcgtttctattcgggttgaatgcatgtccggtctttaggctcaaccgaaaattggagacctttggttctagttttttcctgttgaaccaccagcccggtccgtttttttccactatgcctaaagttgagaatctccatctatgaatatccttcatgccgagctataaaacaatcttagaaagcatatctcatagattgagaaaatccgctaggactccaccagaaatagcaccttgaatgtcctggatccaaccatgatctatcattattgcccctcactagaaacccaaagaaagaagacaccctacctagatcaaaaccacacctagtaactattttctaattttgaaaaaaagaatcaagaggatgaaattgccaaaaatacataaattttgtaattttggtattttctcactggattttaaatttaaaatcattttcttgtcccattaaccgctttggcattgacccaatgaattacaaacagatttgaagggaagcaccgaagcaatagtaatttgtaaaatgatttattatcaacaataaaaataaaagtgcccaaccaaaatagctagaagttaattttcttgactaaaaaaggggtcaaaacaggccttttcatacttattagatagatcaggcatctaagggaaaaaaaccagaactcagaggtatatagagaattgagcaaaactcgcaggtctagaagggattagtaaaaaactgcaatacgtaaaagtaatttctctttgccttttgtgatgtatttggtcttgcttatgatcttcacccaatttttatatacgagcataggcttgagaaaactatgccttaataacattttaaaagaataacatgtcgattagatgtaatttattctgcaaacaaataatgaagggataaataacatggatcatgttttacaataatataaaatatcacaaacaaagatgtgtagactccagttggcgaggctttggctactccaaattaatcttgacgattattatgaaaataataaatggtgtatataattatggaaataataaatgatgtgtactcaccaattttggagtagcaatgaaaattgtgaagagcttcaactcaatgggtgggaaagataacttggatggagtcccgtagagtttcttaaagggaagttctatgcaagttataatcgtattgtaacttgaattatcaactccaatgccacataataatatatcatcaattagttattgaaaacgcatgagaattgtgcttcatttcatgaagaagaaaagaaatatttacaagagagagaaccaaagtatccctcaagcgacaccaaaaaagaaaagggcgtcacaacatgacacaccactaaaacaacctctaaggccccgttcgttctctccgattagagggacatttccggtgcacatgaaatgagaaaactcattagcacataattaattaagtattaattattataaaattaaaaaatggatttattcgatttttttaaataacttttacgtagaaactttttgccaaaaacacaacatttaacagtttgaaaaacgtgctaacggaaaacgaggaagtcaaagtttgaagttgagaaaaagaactaggcctaagaggaattagccatcaagaggtagcgacctacaaaaagctcgtggagctttggccccagcaatactccaaagggtactttcctgcttgaacaaccaccaaaatattaggtgtaccccattaaaaacacggtcgttatgacccttccaaatttcccaagccactaggataaacaaggaattcaagcccttcttttccttcttagggactttttgaatggccttaaaccactagttagagaaacgagttgaagaggactgaggtgctgcagctgccattccaatcttctcaaggatcaaaaaccaaagttgtcgggagaaaacacatttgacgaagagatgttaaatggtttcttcttcctgatcacaaagtgtgcatgcctcccggtgttgcaacccgaacttggcaaggcggtcggaagttcaacctcggttatttactgccaaccaagtgaagaatttgcatggtaggggcccaacttttccatattctgctccaaggtgcaaatctgatggatcccacaaagtatcataagcatatttacttgtgtaagatcccgacccagagattttctaaacatactgctccaacacattgcaaaattaacccatccaccaagtcacataattgtaaatattcataaatgaccagcatagtgaggcttcctagtatatcatctacccatcttctatttataagagcttgcactattgttctctgctttcttttatctttttagggatcataagaaagaggttaggagcccattctacaatttttttccctttcagccagcagtcagtccaaaacttggtctcctcccattaccatctgtagtaaccaccacaacgttgaaaagtgcgtgaacactttgcggcacttgaatgggcagcccagcccatggccttgtgggatcggtcttttggagccatagccatcacattcttagagcccatcctagtttctcttagttatgaagtccaagaccaccatattggagtagtcggtaaacatgatcccaaagactaggcagctaccatcactagcagtctagcattttcctgtcctttccaaaggaaacaccttcgccttttactctttatcaatagctttgatcacccattttggaagatccattaccatcatgagataaatatgaaccgccgtgaggaccaccttgaccataatcagcctactagctatattcatgagggaggcttcccaccccgggagattatcagccactttatcaaccaaagtcaacccggggtttatcatcgattagttattgtaagtaatatcttgatggtgctgtcagtctgaacatagcccaattaagcttacatgattgtgtacattgttagaacaacaaatttcattgcagttggggcttagttggatgtggatgtataaatgttgaatgtaatttctgatttgaatgaaacaatacattttgttcaggaccatggatcctcaatatattgacagataaattgctgccatgtacatgtttaagtactaatagacaaatccattcaaattgcttgctgtgtatgttaactcatgctgtgagaggtcagtccaaatgtaacgtaggaaggaagaattaagtgcccaatatgggaggagattttgggggcctaaggtggccagcaatagacaaatgtgtggattgggctgacccagattgtggatgatgtttttgatagtgtccttatccagataatgtttctagtagtgtcctggcttggacgctatccactctagcatccttcttattttactaaatttctgccttcaattacttgttatttaattaaggatctgttgattattgcaaataaaagaaaccgatttatctagtgttgggagttttttttccattgttctttcaaacagattccactgaacagatataccttgctaggatgaaaatggtcatgaaaattcccaaccgaccgagcgtcatttccatataagtcatactatttctgattgtttccctttttagaaatatataaatgttgaatttttgttctcatttctttcagcgttgtattgatgttgacacggaacagttaaattgataaatatggtgaattactaactgaccgaacatcatttctgaaaagatgctaacgattttgaccttttcggaatattttcatcccatccatgaatagttgacaaaatttgcttcagtgctagtgctggataaagtgatgtgttcagcaattgttttcctgggcaacattcttggatctccttgatagagttccaaattagcagatgtgtgtctctgttccaaaatttttcttccactgctgatcgcttgcttcatctctgctcccccccccccccgcccctccctccgttaaatcccctgttgttgtatacacttgtaccttcttttggttattattttttttctggttatctgattattatacccatctagtggctgatctctagggtttatgctattgcaaagtttccttttgcaagtggcagattagtatattcaagtatgcatatgtataaattgttaatacttgctgccttgatctgctagctagttgttggttgctagttgttgttggaaccaaatccaatagctatgggagtgtacaagttgtgtgaactactagaagagtgagacttatgagattgatgagaatcctgccttcactaaggcgacatcgcacatttatatgcttagcatatgtacatgggaaattacatcattgatcatgtaggcctcctacaagtaggcccgggaacttcctactaacaagtgggctccacctaggagcacacccgtaactacaccagacaccgtcgtgggtggcccaagatgttgcatgggccgacatggatcctgtggatcctaggatctgatgtgtcatgatgggcccaagtcgcaaggatctcgattgcctcccgctgcacgacttgttggagcaaagcggctagtaggtgggcattaactgcctcctgccttgtctcgtctttaatggctcatgagctgaagcctcggagtagtcttgatcatgccccccaactggagcacggggttatgcgcgccagtggaaactggctagaggcctccgcttcttcgaaatggaggggtggggccccatctagcgcaaaagggagggatctttcctatggagacaggctccagaaatccttcagagtgacactggagcccatccctcaactgttgctcatcaatttgtatattttatcaaagtgcaatcttttatgcagcaaccacgataacaactattgctgctgcccctgaggctgggtatgatcctataactgatccaaaacggaggccaccatgcaaaggatccagcttggaagtgcggctatttgatagtaattagaaacacaaacttagtgacatgtaatctttgtggggaggtgacaaatggaggggctacaaggctgaagcagcatctagcaggtggctatggagatgttttagtttgtatcaaaattgataaagaactcatgaaacaaatgcaaaatcggttgcacaagaacaaaaaaaaaacggacaatattcttgggagatgaagaaagggggaaatgtggaggttctgctagatcaaaatgtaacaacatccttttctatgccagttgtaccttctagtgggataacagcaaaaagaagaagagcaacctacgatttcagagctccaatagtaaaaaaaaaaagccaagccaaaggagaccaagacaattattgctacggttagaaaaacagttgaaaagattgtagatggacgcgctttgattggttccaaagcaccatggagagtacaaagagaaaggaagataagcattatgtggatatgcaaggggtattgtggttctatgagtatggcataccattcaatgttgcaacctcaaggcagtttgagattgcttgtgaggccaccgcataatatggttcgggttacaagcctatgagtaagcacatgttaagggagaccttgatttaggactatgtccaagacacaagtaaaataaaggtaaaataaaggttgatcatgagctacagagctagcatggaagtagtatggctccacctttatgtcagatcgatggatagataggaggggcgccacctaattaacttgcatgctgtgggcttacttcttggagtcttttgatgcatcaagtgaaacactgtagacccccgattttggaaatcggaaatcttctgtgtttatccgtaccaatccctggatcagtagttggtacacacattcatagttggatcacaacatatcacgaatgaattcaggctaagagagttaatacttacattagggccaggtaggctaacaactatcagagagcaacagcggaagacaaaataatataagggcccggttaacatgccacaggcagtcgactggggaacgagacctagaacaagaccgcactccgatcatcttgttggatacgcaagcgtactaacaagggcttctcttcagcgctctcctaaaagatatataaatagcaagggtgagtaccaaccgtactcagcaaaccaccacaacagcaatgcatatgataaagggtattcaaggaatggcttcaggttcttttgcgtaaagctgcgttttgcaaatatttttacaagcctaagacctagcatagactgatcaaattttagttccagtgttcacattaaacaacgacggttctgtccaccatccattgtgatcccaatgatagcttcccgccattgaatcctcatggttttctgaggacgtccaccttccctcctctcaggaagtggctccaacagcataaaaatcatcatgcaatatcccatcccacacaagttaagaatttagagtctagccaagtgtaatacacgtcccggtgctcaataaccgcgagcacggctattcgaatagatttggtttactcacactgcagtggatgtacactttacccgcactctgcgactgcccaacacatgagcctcatcccaacacatgagacgcgtcacgacaaagcttttcgataacctcgcattggcagtatccgctccatgaactttacatcctcatgcactctaggcatacacggtttctagcagtgagaggagttctagcgcacccgggaagggaagactcacacatgcattaagttataattatgtttagattctcacatggcagtcctaccgatggcgacaccactgtagacacccgcctcgtggtcctaccaatggctgccccaccgtagagcccctgcctcacacatcaagaaaccactatgcatggatactgcctccgctcagctatctactccgctaggtctatacccatacgagaagtgcggttgtacggggttcgtttcatgcttaacttcatgactcggtccttaattgaccggggacggtactagccttttccagataccacccaaatcctccgtccgccccagtcaaaaacagttgtttagtttcatttctcctttcacaaatcatgtcatcaatatcatggcaatgtggtgctcatgtctccacatgccgtatctcaattatcttcccaaaggtaattgcccaagcatatagcatttgataaatatgagtatgcatgattctagaatagcatttctaagcaattgtcataattgactagggacttatacgtaatcatggttacaaggatcttaagggtaaacaataatcaaggcatggcataatcacaagtaggatgttcatcattgcatgcaattttatttgtaaacaaaacaatttcgcaattgggatcaacatgttcaaggaatagtgatgacttgcctgctcagaatagtccttattcttgatacaatcttgatcaaccttcacctcctggaagttgcagacgttgcctcacgactgaccgatacacaatttctataatacgcgagaaaaaccaatattcaagcaacaatcaaatatgcacaaacaaaatatatttgttgaggtcgaacctagggttgctcatattattcgcgcttgctaatggattctaatcaaggtaagagctaaagtttcttagtctttctgttgtcatggtggtttagtctagctaatggctatggaaggattatggttacacatgcatctatctaaataaaatggtcatatcctagagattatgttgtcagatggatttaggatcaatcaaataattacagtgaatcatttgtattattattttattgatggaagctttactttgattatcaacatattttacttgtcacaataaattagaaaaggttaataattatccgtgctttgtatgttagagttgtttaggttaatcatattatggttacaaattatcccatcacataattttacaatgaataatcctaatttacaattgaactataattatatgagatcaagatttataactagtatttatctaatattcctgtttatcatatagtccctctaatttaatatatgcaacaagcaaattaatactataccgtatagctataatgggatgtacagtataggtgtgtgcacaatatcttaatattgaatcatttatttgaatagttgctatttactacgagctacacagtacatgtgattttaagtggatttatgagtgagttaccgtctatacaacttaagggtcgatttccaacctaaacatatactactgtacaggaaatgccgttaattaatttcgtgcgggtgattttagtcacactagctctgttattatctctcataaacaagttaaagactcatctacgtgtgttcaacttttagtcacaaagtatgaggctaaacattatttatacaattcggacgtcatgagtataattatatattgacatatattaataattgacactagtatttcctatgctttaattaatttgaaacaatgctgctaattagtttacataggttttacagtgagaaagcatgttaaggacaattatttgacatctactttatagtacaatatcaattttatttattagcacatttttaagttgactattatgcatcatcgtggtattaattatttaataattataaatatattttattaaatagtgaactatataccattggaaagcttatgaatttagatgaatttaggttcaagattcactcaaatcggagctaaaatgaataagttatgctagtgtaaagattcaaatttgaattaacccgagaaattgtaaaaagctactgttcataaatgatttatttttaatccgaaatctaatccataaccctagtgaccgacaggtgggacccagggttccttttctttcctttttctctctttttccttctctctcttttctttcttttcttttcctttctttttccttctctctctcttttctttcttttcttttcctttctttttcctttctttttcctttctccccctggcttctttcttcctccctctctctctcggctcacggcctacctgggcggcgacggcgaccggacgcgagggggggcggcttaccgacggcggcggcggcggcgcaaggcggcgacgctcagcgcggcactcggcgcagtgcggcggcttcaaggcaacggcgcggcggaacgaaggcggcggcgcggcggcacaaaggcgacggcgtgtggaggaggaaggggaaacggaggggaatgggtgtgggtggagaaggggagggggccggggttttatagagcgcgggggaggggttggatgaccctaacggcgacgcgacgggcggcgcgtggggctcgaggcgcgacggcgatggcgcgcggcgtgacagcagtgacgagacgcgacggcgacggcacgcggcgcggcagcggcgacgcgacgggacggcacgcggcgcggcagcgggagtggcgacgcggcgcggcatcggcggcacggggctcgaagcggcgaggggacgggcgcgcggcaacgggacgggcgacgcgacggcgagacggggctcgaggcgacggcggcatgcgcggcgcggcagcgggatggcgacggcgacggcgcggcagcggcggcgcgcagctcagagcggcgacgcgacgggcgggcggcgcggcgcggggctcggcgcgatggtgacaggcgacgcgacggcgacgtggcgcggcagcggcgcgggcgcgaggtggcgatgggacggcgcgtggcgatgggatgcgacggcgacggcgcgcggcgatgggacgcgatggcgacggtggcgcggcacgacagcggcgacggcgacggcgacgcggggcgcaaggcagcggcgcggcagggctaggcgcggcgcggcagggcaggggcagggctaggcgcggcagtggggaggaagagggctaaggtggctaggaactccatcaaacacctcatgtgcaatgaatagtgctatccctaattaaaccctattttagcctatctcctatacaattttaatcctacaaactctaattttacttagttaaatgttaactaaatttaagtactaaatcctcatgaaaatttatccaaattattaccacccatatttatttatttatcgcacaaatgaattctttttagattaatttgggttattgaccctaaggtgaacttatatatttttgaagactttggggtaatattgaatttaatataacgacttgtcatgattaatacattagcagattggtcgagtttagttgtatagcaatatattttgcacggatgggttcaatctatttattctataaatagtaaattgagactcggcacaatattaatctaattgtttaattaaaaactcacataattttataaagcttaatttaattatatgaccattattttatatgagtgactttatcaagtgttcaaatattaatgtatatatattcccatgaaattctcatttgttaataggatcattatagtagtaatcatcatttcatgtggatttataatacttcatgtgagattggatccaaatacattagatttaatcttacaatcccattagttaaacatgacatcgagctatcaacatggttcgaatatttaatatttgatctatgatttataatagaaattaatattttatttggcttgctttcttgcgcactaatgtatatatttattgttcaggtgtacgccattaatttgattctccattgttacaatttatatttggcaagcaatgacaaccataacacccagcatgatgcaaaagtttttaaaaagttcgaaattttagtgatttttattattaggaattttcagaatgttacaaacacataatgcaactatgttagctaatttgctagagaagagaattgagatcattggaaaggagaaggttgttcaagttgtcactgataatggtgctaatacatgcaacagataagcttctaatggagagaattctcacattgtataggactccttgtgctgcacattgtttggatcttatgttgaaggacatagggaaactgaaggaatttaaaaaccccattgcccgtgctaagcgtgtcaccactttcatttatagacatgggaggcttcttagtgcaatgagggagaagacaagtggaaagaatcttttaagaccagctgtcactcgatttgccacaacttatcttactttgaagagcaattatagccaaagagatgaattgagaagcctatttgtgagtgaacaatggactgggatcaaattagcaaaaacaaaggcaataatataagtgactggcattgttctctctaagaaattttggtcctctattgaagattgtatcagagcttcaaccccattacttattgtgctaagagttgttgatggcgatgagaagcccgctatgctagaggtttcaagactaatgacgcatgccaaagagaagatccaattgagcttttttatccagttgtgagctcaattggagaacatttggatttgcgagtcagtttatctgtagttttgctttaaatttctttactatatcagcaagttatttatccttttttttcttcccttgttatttgcatccctgcagatccatacaaagaaaatgaaccagttagtacacaagagattgaatgatgttgtttttgttgcctataactggaagatggaaactaggtttcagcttaggcgtgagaaagcaggaaaaggccagatccttaagtcattgaggagtttgattggaacaatgagtgggataattccttacatgaaccagttgaaggttttcgtggatgtgacattacataggatgatgttgatgaagttgttggtgcatcacgatctctttgagctcgctgttggtatttgatacggtcacagataaatccgcaagcgcacgaataccgctgtagcacttcacctcagagtattccaagggtatcgaatcacagaaaacatgtgcatatatctaggaacataattctatccaaggacaacaactaatggtaggctaaggctaaagaggattcctatggattaatttactagacttgagttaaaggtaaaaccctatcgattgcttctggcactagccctccgctggtctgccaagctgaatccagcctacggctctatgatgtacctgaacatggagggatacaaaggatggacaaggctatcaccaccttccgcctacctcactttctatggagcacacaacaaaaaaaggtaaccgctaacctaaacaccacacctaagttattgattactactctagccccacgcaggaacttccttctttatctagaatcctagtactagagcacttaataattcaactaagcgacgaacccgcaacgatgggaatatatgtcattcaagcaactaaattaaataccataaggagatctcaaatacttacttaagaagcatccgttaagatacaaacgagagaagaaggccgataactccatcacttctccgaaactccagtggaagaagaactccgatatttggggcactccttccggagctttacctcactctttacctaattccacacactaaagagatgcctaaaatatgaaagtgagttgtactccacttgagatgtgtgtttcggaagtgagttgaactcctccttttatagccttcatatgacgcttgaaatggcggt

SEQ ID NO: 9335 - DNA, 5346 bp, Oryza sativa
atcaaaaaacacacaaactcgatcaattccacacatgtagcaaaataagggattcgactgctcacaggctatacagcacggagcgaactaggacgaaatggaagggatcacccgaattccgcgacggatcaccactctccgctcctctccggcggcgccgcggccgccgtgggctcgccgcgacgggaggagaacgacggcgaagtcggaataatgcgaaactgcagccgaggcgaaagccgaggggagagagatcccctctgtcgccccctatggcgccacacggacggccaggatcaaccgatcgccgagatcggacggtccacattgcaccgtccgcgacgaacgggcgtgatgaagcggaggttgcgtacacgggccgaggacccatgtagatccgtgatggcccggagtttgggccttattgggcttgaggttttgtggcccgtaaagggaggggtgtatctgcatatttgacacccgcggcgctgcgctataaagagtggctcactagggtttacctccgcgccgccgcatcctccttcgcaagcctcgcctccactccccgcgccgccgccgccgccgccgactcgccggtcgtcaccctcgccccgcagccatggctgagcaggtaaggcccggcacctcctgttcttccgtcgagcttctccgtcgcttgctataggagtcagttctaggtgggggcacgttgccatgtgatgcgcgtgttgcgatgtgagactcgatttctcagttctcgtgatttgggctggaacgctagcgatggaaagttagtgtgatagtgtcatgaatttgttgaggtcttcttgttagatgtggatttgttgaacggtgggtttgttatatccgcactcgtaattctctcgtgttaaattagcaatagaagttttgggttactggatcgaagttttgctgagatatagttactggatcgaagttttgctgagatgttccaatagattaacgcaaccgtggatgtattcgatgtttgggttcattaccgctgccgtgttcatggtaacgaatgataggtctgtgcttaatattcgtgatgctgcagttgtgtgtttgtcacgttttaacctcttttatggttgatgtggagcttatctgctactgaattagatacagatttgtattcttgtttcccatttgttcaatccaaataagtgatgcaagtggttctagctatgttgtgtagagtgttgatgtttttcatccatttctgttgtgcagactgagaaggctttcctgaagcagccaaaggttttcctcaggtagggttcttctgctctttcaatgctttatgtattctgtgagcagttcacatgtcttaacgatgtttttctgcttcattttagctcaaagaagtctggcaagggtaagaagccaggcaagggtggcaaccgcttctggaagagcattggccttggcttcaagacccccagggaagcaattgaaggtacaataggttatttgcctctttgtttagctgattctgtctaaaagttgtatgctgtacagaagaactttggtgttttcactgtagccactgaatgatttgtagtgcgttaactttaaaattgtcactgaaagaacagttgtttgtcatgcattgacagtatttgttaagttgtttttatacactactattgccggtatgtttgactagcaatttaaattcatctgaatattacagacctgagataaatgctactatttgttttaagtattgaacagttgattaactgcaattctttctagggacatacattgacaagaagtgcccattcactggaactgtttctatcagaggcagaatcattgctggaacatgccacagtgccaagatgaacagaactatcattgttcgcaggaactacctccattttgtcaagaaatatcagaggcaagtaaactaccatggattatatacttatgtttcctttccttttctccgttctaacatagggtgcaaacctcccaccttgcaggtatgagaagaggcattccaacattccggctcacgtctccccatgcttccgtgtcaaggaaggtgaccatgtcatcattggccagtgcaggtaaaacttaactcccataccttagtttttgactccttagaatcatcttaaataacagaggtgctattagttcaaacattgtcagttcacccagctagtactgtgagatttggttgctgaagtacaatttctgcattttcaacaggccgctgtcgaaaactgtgaggttcaacgtcctgaaggtcatcccagctggatccaccggcggcagcggcggcaagaaggccttcaccgcagcatgagcttgtactcgcattattcatgggtagtttatagacagatccttttgcttgaagtcctggcagggctggtgttttgaccctatcgatttggatattgttcccaacaaaacgaagtcttatcatcagaacgtgttttatggaatctactctatgcaaagttttgttaagatgcctgttaatgctcgatatgctgtgatccttgattttcctggctggctatgtgttgacgcttgtttgttgtgtttcttcgaaagagtattggtggatatgctgtgcctgtgcatgactgagattctgaataaggttttcccaaacccaaacctgacctaattcagtttttttgacaaggcttgaatcttataagtttatcaatggacctgacatcttcgccgcgaggcgaggggggtgtgggcggtggaatccggtggaatctgggcgaggcgccacccgtgccccctcctctgacccccgccgcgcgctgcctcgttgcgttgctccattccgcccgcgcccccgtgctcgtgccagtgtggtgtgcggtgtgccacccgcccccctttcccaatccctccggtctcccctggaaaaacattttttctcttcccaaccactaacacagcaccggcggccattaacgcgctccgccgcctccgccgatcctcggctccggctcctcctgcagacgcgtccgccgcagcggccacggcggtaagttcctcagttgtccccttctccgcacgaatcctagatcgttctgctgcgtggggttcggaggtatctgctatccgatcgcgtgctcgtgagatttgcctccgcttttgattgggagtaatcccagcgagcccccggcgacggcggcgagcgctcgcgaagctgcgagtggaggatcgaactgtcgaacgtcatttcgtcatcaagcatagcacgcttttttttcccctagtctagtcgccgatgcattatcattcccacccatgcttcatcgcgcatcttgtgcttgtgccatcctcaggctccagtaaagagcaactgcaaatcgtatcgcatcgcgaatcacgcatgacgcgtacattagatttttcagttttcccgtttatgtccgcttcctcgaatttccacccccccccccccccttttttttaccagcaatccacgggaaagcagatgctaaagctggagtatactacttttcttgttttcttccctccttttggttcgtgaggtatgcatccaaatttatgtacgcctcatgcctatgcatttctctgtgagggaccactagggatcatgcgggtcatgtttttaccccaaaagagaaaatctgacttttttttctctgcatacaggatgctatgaatttatcagacctttcttcttgatgtcatgagacagtccgcctttattccacatatttagaattttagatagtagtgccttgtggataaggtgagttcgcttgtgctgttttatttgttcatttctggtgaagtatatgcttgccgaactctctaagctggctcaatgcaaagtaatgaatgatgatactacccacttgattccacagaatggtagcgggagagatagctgttctaagatgagactgcggttgcatctgctgattctttgcttgatcattttatttctggtttataacatggcgagttaccaacataaacagacaaaggtaacactcatctacgaaatgtctccctgtagtttgcttgacagatatgactgaccttattatgggttgttgcagttggaagcaaaatcccgtccatttgatacaattacggtatgtaaaccaatcagctccactagaaggaaaagaactttgtgctatgttaatctggaagcatattttcatttgttgctgggacgctgattttgtcttctatgtaaatatttaggtgtctgacaaagtgtcttctaaggtgtctaaaagatctgccaatagggttggttttttaccccatggtatagtggaaccttactctgacatggagttgaagccattatggctcacaagaagtgcgcaatcaaaggtaatttgaaaaccaagcctattcttgtatacagtgtgttgctcagtacaatatatttgttggttctatttcagttttcatacataaagcaggctttagttgctccacctttctgagtacgaggcctgaatatctagttatctgacgctctgcgaattttggctccacaggattctagccagaaggatcggtgcttgcttgccatccctgctggtatagatcagaaaagaagtgtggatgctattatgaagaaggtacttaatttgctacctcaggaagtgatagtttcctcatgatggtaactcttgaatgttcagtttcttccagagaattttacagttatgttgttccactacgatggtaatgttgatgggtggaacgatctaccttggagcaaaagtgtgatacatatagctgcttctaaccagacaaaatggtatggcatctttctgcccttcctctgtgagaagagcctgactttgagtgctcttgctgttgaatatactttgcttcaccttgcgatttctactgatctggtgtcgtcttaattcaagataagataatgaggcatctattttttaggtggtttgcaaaaagattcctccatccttctgttgtctccatgtacgagtatatatttctttgggatgaagatctggaagtagataactttcacccaaggaggtatggtatttcataaatacttgatgttgattttgagcctcacattgcctagctgttgtataaatgatgttgaggttagacatactgaagtgctgaatcattcctagtacaatgtactgaatcccgtaatcctggttcaagaaactttgtataaaattatcagtgcatcttttaaatgtaagaatcaactactgactgactggtatgtgttaggctgcaaaagttaatcttggcaataatgtgatcttatgctaattttcttctcgagta

SEQ ID NO: 9336 - DNA, 1267 bp, Oryza sativa
ttagcattatttgacatgtagaatccaagaaaaattccacatgccgattccgattattatttgcatttattaattagggaattagctctaggttaattaagataatttcttcggacgatttatttagccaatttttaaagcaagcaaaggggggaaaacttcagggcgtgacaaacctaccccccttaaacggaatctcgaccccgagattcggaagagctggcgaagaggtgcgggtgggtgccttcaactcatcttctctttcccaagtggcctcttcctctgagtggtggctccactgaaccttgcagaatcttattactttgtttctggtccttctctcgctggtttcgaggatacgagtcggcttctccatatacgtcaagtcttcctggattttgatttgatccggacttgcctgttcctcaagaactctcaaacatttcttcaactgagagacgtggaacacgttgtggatgccaagcatgttggagggaagctcgagctggtaagcaacttcacctttacgttccaagatcctgtatggtcccacaaagcgtggtgccaactttcctttggtttggaaacggtgtactcctctgagcggagtgacacgaagatacacataatcccctgtttcgaaagcgagctcccttcggcgggtggctgcatagcttttctgccgagactgcgcgattctcaatctttccctgacagctctgacttctcttctgcctcattgaaaacttctgtaccaaacaactggcgttcccctgtctgatcccagaagagcggagtacgacaccttcgtccatacagtgcttcaaatggtgccatctgcagactagcttggtaactgttgttgtactagaactcagcatacggtaagcttttgtcccatgctccaccaaagtcaagcgcacatgctctcaacatatcctctagtatttgattgactcgctcagtctggccatctgtttgtggatggtaagcagtgctgaaattcaaccgggttcctaattcttcttgtaatttctgccagaactttgaagtgaattggcttcctcgatcagacacgatcttcttaggtacaccatgtaaacacataattcttgccagatagagttctgctaatttcttccctgagtaggtagtgtgcaccggaatgaagtgagccactttggtgagtcggtcaacgactacccaaatagaatcatgccccgatgacgtcctgggcaaaccggtgatgaaatccattccgatttct

SEQ ID NO: 9337 - DNA, 1026 bp, Oryza sativa
tgtgtgttatatgccttgcgcacaaactgtagatttccaaactgaaaaatgagaatgatcatgtgatagcgtgtatcatgctaatggatgatcatgtttatagttttgtttcttgtgcctgaccttgataacttgatgataattaatggtttcactttgcttacatgattgaaaacacattcttacaaccagtgatattttccacattaggttaataagtgttaagttaaagttggcacaatatccattgagtacttcaagtaatttggagacttaagttattattaagttttattttatacttgctgcattttgttgtgtaataatttattactagcttctaatagttttaatctggtacaactggtcaactgcattgaaatcaggcaccacatcagccaaaagcacaaccatcagttcccaaggtttcacctcctcaacccgagaaatcacctcctaatgcaacaccaccaaaggttgagaggccatcagttgcaccacctcctaaggttgactatgcaactgatctcttcaacatgttatcaatggatggaacaaccgagaaagaagcagagtcatcttctaatgatgatagtgcatgggagggcttccagtgtaagatattatgacttaacatttctattgaggaattattcttgttatatgagcatctttttatgaaatgttctgcgagtgcttcaccatattccttacttgcatactgtggagtatcttttaatttgggctcctgtgttctctttctcaattgttcagctgcagagccagtacctagctcagacaaaaaggattctgctaagccagtagaaagtaagccccagtctacatcaggcatagaggacttgtttaaagattcaccagctgtgacagtatcctcagctccagctgccccacaagtaaatgtgaagaatgatatcatgagtctgtttgagaaggtcagcgccagcattacttttactaatgcttttgtgaaatggctctgtcatttaaaagaaagagcacatctat

SEQ ID NO: 9338 - DNA, 1057 bp, Oryza sativa
ctgattcaatcaagcaagccatacaccgctgatgacatacatgcattaaaaatcttggattacaagccaggtttatcgttttaaattctttcgcaaattagattaattcacagattactaattattgtttgatctgttattgtttatgcatgtatgtcggctgctgtcgtcgccgctggctggcttctttgcgtacatggctggtgtactctgccaccattgctggtggcgacattgtcttcaccaaccggctgcctccgtcgccgctgactggtgtcctcgcctatatggttggtcggtcacaccaccgttcatgggcgtcaacgtcttcatcgaccggctagccttcgccgccgccgactggtgtttccgcctgcacggctggcctattatgccgccgctgttgggcgtctacgacttcaccgccggcctgcctccgtcgccgccgagtggtgcctccgcctacacggttggcctattatgccgccgctgttgggcgtccacgtcttcaccgccggcctgcctccgtcgccgccgagtggtgcctccgcctatacggttggttggtcacaccaccgttcatgggcgtccacgtcttcaccgccggcctgcctccgtcgccgccgattggtgcctccgcctacacagctggcctattatgccgccgctgttgggcgtctatgactttaccgccggcctgcctccgtcgccgccgactggtgcctccgcctatacggttggttggtcacaccaccgttcatgggcgtccacgtcttcaccgccggcctgcctccgtcgccgccgattggtgcctccgcctacacggctggcctattatgccgccgctgttgggcgtctatgacttcaccgccggcctgcctccgtcgccgccgactggtgcctccgcctacacggctggcctattatgccgccgttgttgggcgtctacgacttcaccgccggcctgcctccgtcgccgccgagtggtgcctccgcctacacggttggcctattatgcccccgccgttgggcgtccacgttttcaccgccggcctgc

SEQ ID NO: 9339 - DNA, 1230 bp, Oryza sativa
tgttgggcgtctatgactttaccgccggcctgcctccgtcgccgccgactggtgcctccgcctatacggttggttggtcacaccaccgttcatgggcgtccacgtcttcaccgccggcctgcctccgtcgccgccgattggtgcctccgcttacacggctggcctattatgccgccgctgttgggcgtctatgacttcaccgccggcctgcctccgtcgccgccgactggtgcctccgcctacacggctggcctattatgccgccgttgttgggcgtctacgacttcaccgccggcctgcctccgtcgccgccgagtggtgcctccgcctacacggttggcctattatgccgccgctgttgggcgtccacgtcttcaccgccggcctgcctccgtcgccgccgagtggtgcctccgcctacacggttggcctattatgccgccgctgttgggcgtctacgacttcaccgccggcctgcctccgtcgccgccgactggtgtcctcgcctatacggttggttggtcacaccaccgttcatgggcgtccacgtcttcgccgaccggctggccttcgccgccgccgactggtgtttctgcctacacggctagcctattatgccgctgctgttgggcgtctacgacttcaccgccggcctgcctccgtcgccgccgactggtgtcctcgcctatacggttggttggtcacaccaccgttcatgggcgtccacgtcttcgccgaccggctggccttcgccgccgccgactggtgtttttgcctatacggttggcagacttcgccgccgttaatgggcttcatcatctacaccactggcttggttccactggcgccgactggtgtttttgtcaccatcgatggactgcttcgttcccacatcggctacttttgctgtcaccgagggaatattacaaagctaagtcatcatttattttattctttatatgatattttgtcttttcctttgcctcactacatcaactggttcgccgttgactagtgagtcgggggctatagatgttatatcgtattttttaaacaattttcataatatttatcttgattgcttgcgacataatctgagtacaaaagtacctatcgagttatggagttctatcttcctatgctttccgtttggtttgccaatggatggttgcctttgggccgattcctagcacccgggggctcgttggatggaccgagtaacgcaaggtg

SEQ ID NO: 9340 - DNA, 3051 bp, Oryza sativa
  unsure (1)..(3051): unsure at all n locations
ctttactactccaaaaaacttacagaatttaccaagtggaaaacattacaattagtttatcgaggttcataatagatttctgatcatatacatggaggtgatatttttcactctgttagtcagtaggtacctttgggaaggcggaaaaaaatgtgaaatgttaattgtgatcgcaactagatactctatccgtcccaaataagttaatctaatacgtgatgtggcatatcgtagtccgatccagattcgcaatattagaatatgtcacatttcgtattatattaatttattttggaacgaaaaggagtatgtttggattgttttttttcctctcaaaagaaaaaggattttgcatttgaattgtttagcttgtataggagtgtcggtgacatggggccgggggtatcgtgactagaggcttgggtagccgcggtcacccacgtggcctgcccccctcgggggggggggggggtcgggcccaagggtnacgtggccacccttcctcctgtctccccgaggggtcgggccgctcctgtttcggccccgagggctggggcaccccgaccccctgtggttttggcgccacgtgtgtgggttaggtgagcacaccgggctcacctacccgcatttatagcaggttggacgagcgcgccacgccgcatttaatgcagcgcagcgcacgcttatccggtccgtgaccggtcgcggtgtgtgaccggtcacagaccggtcagatcgcgggttaggtggcaacaggcggcctgtcacacgcctcgccccgtcccgtcggaatgatgagagcttcctggctctcgtccctagccggagccggcgtgctaactcctggagttggtatgtcagtcccggtcagatccattccaggcttcagcgcaagtatggcaaggaagtcgctggccattaaatgaaggttgaaatgggcgtccaccggaaaagcgggcgagcggggcaggaggcgtgtgctctgcttgtcagaggtcacttccggctgtagactagccctgattgtaaaaagcatgtttcccttcttaggcagcaggaggcccatgtggtgaccccggaccagataaaaaggaggcccaggcctagaaaaagaaaggagaggaggagaaaggaggggagtggggactctggcgaatgggttctagagcctgaactctctctcgctctccggctctctgtattccttcacgcacagatccaccagaacacaggagtagggtgttacgcttctcagcggcccgaacctgtctacgtcgcccgtgtcttgtgcatttcctctctcgctgacgttcctcagatcgagggcgaagaacctcacttagcgcccccggccgaaccggcaaaggggggcctgcgcggtctcccggtgaggagccccacgctccgtcaaggaggtataaaccaaaaatgaggcaagcacaaatcaaaattgttgaacatgggccataactacctttacagatgcatatacattgcatcgatttgtatggttatgaatggaccaccatgtaccctcatgtcccaagtgtgcttgctgggggaagcatagcatttagaacggtttcgaaatcaagaggcagacaaatgaagtgagctctccaactcagcacaaggcaggttttttctttgttggtacgtacaggacaagagggacaacaagaaaggacccacaataatttatactctatgggttttcatgaccgatttcgcaactagattttctttgttattaataggtgtcctttcatacaaaagaagataaaaatgcaacattgatgacatagttgcttccatctttaaaactattattacttttaagggtgcacttgtctttatcttctggttaaacaaaaattgccataaattgcacatcctgcttaaaaaactatatcataatttttgctggctacttttttccaagtgtttttgaccaattatataaaaacatgtacacacaaaataatacgaatgcatgaaaaatatccttttaacatcagcttaatggctcctttggaacgcatcagcttaatggctcctttaaattcaagtgtcttgttatcttaaatcctacagatagaaaaaaacacaaagaaacagtagaaatgatcatttggattgagtagaaaaaaaaacataggaatcaaacgagactgacagacacagaaattttttttcccaagaggtggcacctcatgttgataatccttcataattcctatgacttgacacaatctaaaagaatttaaaggaatttgagcaattattcctttgttccaaatggttacataggatccaatctatcaaattttttctcaaattcctttgttctaaaggggacagagttgaaggaaaaaaaacaaatccatataatcgagtaaaaattgtaatgcatatacgtgtggtcgcataggtgaaagttattagcattctaagggctcgtttggaatatatgattttcaaaatacgtaaatgaaaaatacaagattggaaggtcctaacacttcaaaccatatgaattgaaaaagttcaaaaaaaaactacaagaatgactgtttagatggagcacgggaaaagcgttggaatcaaaaagagagaagaataagcacaaatgattttttttttcaagaggttagaccttatgttaaaattccttcaaaatttctatgttttgggccaatccaaagaaattttgtaggatttttggatggctattcctttgatccaaagtaccacattggggattttttttaataggattgaagtcttccaaaaatccttaaaaccactttattccaaggagccttgctataacagtaaattgtttattgcaacacaaaccatacatatcttgcgttcgtacaaaaatatatgcacttgttttgctacgccgacaatcccagcctgaaaataatttgattgtcattgctaccacatgagggtgatcagccagcccagccctcccctccaattgaataatcaccaactaaccaacgaccatatcaagaatcccaagctcctgtcagcgttata

SEQ ID NO: 9341 - DNA, 5840 bp, Oryza sativa
atgcagtgccgccaaatctttaaagcatgtatttttgtggtcaattccagaacgtgcgtggggtggttgccttcatggggacgcaactgccgtgaagcataagaaaccactttgccatcctgcatcaacacacattctagcccctggggagatgcatcacaatagacctggaaatctttcgtctgatcaggcaggattaagactggtgcagacaccaaccgccgtttgagttcttcaaaactcctattgcattcagcagaccagataaacttttcttccttcttcaatagctgtgtcattggcttagcaattttagagaagttctcaatgaaccggcggtaataacccgcaagtcctaagaaactccgaacctgagtgactgtccttggtggggtccatttggtaactgactccacatttgctggatccacagctactccttgagcattcacgatgtgaccgagaaactgaactttcttaagccagaagtcgcacttgctgaacttggcatatagctggtgctcttttaacttttcaagtaccagccgaagatgctgctcatgttcttcctcggacttggagtagataagtatgtcatcgatgaaaaccacaacaaacttgtctagaaattccataaacaccttgttcatcaaattcatgaagaaggcaggtgcattagtgagtccgaaagacataactgtgcattcgaacaacccgtaccgagtgatgaatgctgtctttggaatatcctcttcgcggatcctcaactggtgataacctgatcgcaggtctatcttagagaacacagtagctcctttcagctgatcgaacagatcatcaatccttggcaaagggtacttgttcttaatagtgacctcattgagtgcgcggtagtcaacgcacatcctcttggttttgtctttcttctccacaaagataaccggagcaccccaaggcgacgtgctcggacggatgtatcccttctataactgttcatcgacttgcttcttgacttccgccaactcgctggctcccattctgtaaggcctcttgtggatcggtgcagttccagttaccaagtctatccggaactcgatatccctttttggtggcattgttgtcagatcgtccggaaaaacctctggatactctctgactataggaatatcctctagtttcttagtggttttctccactgctacctcttgttcttcaccagcagcctggtttaaactaatcctggcttctgcggcactggagactggaagattaccacctctccttttgcattggtcaacttgatggtgcggctggcgcaatcaatcactcctctgtgccttgccaaccaatccattccaagtatgacatttaggtccttggattcgataagaatgaggttggctggaaaaatcaacccttgaatttcaactgtcacagatgggcagtagtgagttgtggtcatgccacctccaggagtatgaactcgcattggtatcttaagcttcactaaagataacccatgtgcaccagcaaaacgcttggaaatgaaggaatgggttgcaccagaatcaaacaatattactgccggtgtcgagttgacggggaatgtgcccaatataacctctggtgctgactgcgcctcctctgcagatgcatgattaacacgggcctgaacgaacttgggtccagcacgtcttggcttcgggcactttccaaccgtgtgtccgggtttgttacaattgaagcagagttcgggtttttctcccaacctcttgggctgttctggcagagctggctgaactgattgagctggaatctttagtgaactcggagtagggttgaggctgtgctgctcactgttgttgtgactatcactatggtgggtcttattgaagctacccgggtggtagggacggtgctgtcggataatcatggtggaaggtccaccgtgacgtcccatcgtgtaacgaggcttctgacacttccctggggagtcctgaactgggctgccttcctcttacggttcattttgttacactgctcctcttgacgaatagccttgtccacaagcttctcaaagtcctcatagtctctagagatcaactggttggtcaattcatcatcaagaccagacataaacttctcctgcttctcggcatcggttcgcacgtcctcaggggcgtagcgcgcgaggcggttaaactcatgcaaatactctataactgttctggtttcttgttgcagggaacggaactctctcttcttttgtcccacaattccctcgggaacctgtgctttattgaaactatgacgaaactctgtccaagtaacctctgccccagccggacgggtcaccatgtagttgtcccaccaaatagaagcgggaccttgtagctggtgtgtagcaaaagcaaccttctcctgctcgttgcattgcaaaagattcagcttcttctcaatggcatgaagccagtcgtgggcctcgattgggttggtggtgcttgagaaagtgggcggcttgacacgaagaaattctaacagtttggactgaggaggtggaggaccaaactgcaggttctgctgctgcagctgtgcttgctgctgcacctgctgcatcacctgatggtactgttgctgcatctgttgcatcatcattgtcattatctgagtctgattgtccaacacctgagcaattgttgggttctcgggcggtggggacggactgttgtcagatgcaccgttggcacgtgctccattgatcggctcttcgctgccactggcgttgttcgagtcgcgtgaaccattccttatctccatctgaaggggataggtagaaatatgagaaaaggaagaaaaacagggggctcagaaactaatcttgcttatgaatttaagtgcaattatcttaatcttgattaaaacactgaaaaagaggcacgcaactcctaattgaggcagtcataccactgacacatgatatcgaccgccgactaacccacaagcaacaaacctaaacacgaaaactagcaagcaaacagactaagaaggcgataaagctaagggcggcgactctgaagctcggggcggcgcttgcaaacgagggataggactgacatctaaagtagacaagggataggaaccaattcatgctcaaatccgaattaaacaaagcaaaagaagactcaaataaataaccgagcacgatgatttttatgcatagaacatttttcatgaactcaaataaagacactaatgcaactaaacaataaattaatgcatagactagttgcatggaaaatgatgcgcataacattgcccccatcgaatatagacaccacctaatgcataacccccaataaattcccgactgactgtcgaataaactgcaactaaaatttttctaaagccctagattgagctaattttttttttttaaaaaaaaaaaatccgatccgaaagaacgaccaagatttttcccgcaaaccaaagaggccaaactccaaattttcccgaaacaattccaggtgcaaaaaggcatatgcagatgaaaaaggggttcagagggctcttagggtttccagttggcttgtcctacggtcaaggtcggctctgataccaacttgtcacgcccagaaattctcgaaccagaatttctaagctgaatgtgcattaaatccctgtccaggaccagccagggtacacaaacgacaattgttgacatacagatccacgtcttacaaaaatagaaaagattacaaatgcagcggaaaagataaaagcgagctaaaccgggaagcttgacttcagcagcgggcgactccactccacaggcaatccttgacggcagcgacgaaaccaactttgacaaaacagctccaactaggaagatcttcagctctggtgtgggggaaaagagagcaagactgagtactacccactgtactcagcaagtcataccggaagaggaggtatgatgcaggatataaccaaaggaggctagaggttcttttgcataaagctagcatttaaaagcagtagttgaaggcagtaaaacagttgtagtaattaatcaatattaaccaaacactgtccaacgctacaccacgttgcaacaggcccaaccaaccacctgaactacaccagttcattaagctaaactaggggtgagactaatcacggtgaatctggttgatcgcccataaccgcgggcacggctattcgaatagttttactctggccagaggtgtacaactgtacccacaagacacgattccacacatgtcgccatgccccgaagtatcaccatgatactgcaaagggggaaatcgtgacaagaccctccacataaccctcccctaaccatccacaccacgctaaggtttcacccccacccctcaaaaggcagtgggcggtcccctcttgcgccgcggtgaatccggcagctggacaaccggacaccccggccgacccaactccatcacgcccaccctcgccaccggtgcctaggaaagggtcgagctatacttcagatcaagcagttacccactcccgcttgtggtaagcacggtaagtctcccagggtttcccgtgaaccgatccttaactgccatgggtgcgaccagcataaccatgcacccacagcccaccattcagtgtattttaattaactaacaccattgcggtggcaccaatctaaagctataccaatagacaaagtctatgtaataaggtgatccccatttgtgtgctagttgaactaagcatggctaagcatttcctaaaccaacatctagtcattttgatacccaagttatcaatggcataaggtaaacaataaatggctgagtattaggacccatcccacatgacattgtaaaaggatgcaacatttaatagaaatgcgggatatttgtaaattgggtacaatatgatcaaacgtattgcatgacttgccttgctctcgcactgatgagatcacagcaacgtcttcgagaaactgcggatcgacgaaacggccgaaatctacgcgacaaacaaagcacacaagcaaaacaggctataagactactgaagcaggaaacaaaactatttttaatggattctttgcatttttcttgatttactgagacttgaatggacttaaacggagctcggatgaattacttatgaattttagaagataaactgtgtttttactaataaagaaaagtccttaattaattattgcgcaatattgccccagggctgacgtcatccaaggggggggggcggcgccgacatgcgggccccactggcagcggcacaaggggagagggagggggcggctggcaagtgggccccaccaggcggtggctcaaaggggaggcgagggaggcgccggccgggctcggctcggcctcaaagccgaccggcggccatggcgaccggcggcgacacgcgcggtcaccggcggtgaccggcggcgcgggagacggcggcggccagtgcgaaggcgggcggcggcggccgaagatgacggcacacgcgcggagggcggcggcgctcatgggagggagggaaggaaggaggaggagaggggattcctcaccggcgaacacggcggccggcgcgaaggaagaaacggcggcgacgaccggtgatgccgaggcgcgaacgggcggcggcggcaccctaggagagagcatagaggggttagggaagggaaggcgaccatggcggcttgaattgccggccggagacggaggggagagagggtctcaccggcgcgcgaggagaaaagggctccggcggtgattcgcggcaatgaaacggcggccgaagtgcgggcgggctcggtgagc

SEQ ID NO: 9342 - DNA, 3255 bp, Oryza sativa
cagaaggaatgtgcctgatacaactcttgtgtgaacctggacagcaatagctatctaaaagagaaatatgcttctacttttatggagcactcttgtatgtatctatccctggagggataagaaaagagctgttaatttcacccggcactgctttgtttcaatgtaaacaatccttttgacctctggatatcggtagttcatctaatctcatgatgttgaagtatccatatctacgtagtactacttaaaatgttagcagtgatcgtattcgttctacgatatcaccctatctcaatatttggatcccacaatttatactactacatatttacatcatcctccaacaagttcttttccgtttcagtgttggttatcacctaaatttcaaaatcacctacttgttcaatataaaaataataattacatgtgattgacttaatatgttagaaactcaattagctttccgctgcaacatatgggctctcggctagtgtagcagtagtgtttatttgatgccagaccgccagtgtttatttgtggttgaggtataggattcaaccaaggacaagagccgagggaggcaaaatagacttatccttctttctataaagtgaagaccaaaagctcaaacctcgtgcttccactcatcatcaaattgtgaaccgtttgatgaatgcattagatcgtttctcagacgttggatggaatgcagcatagagcccaactcattagttaccgagtgagtctcttcgcctcctcagtgccaaatatagcccacatgaacacattggcccatctccatacacatctacatgtatttagcctgtcaatccgtataaaagagctttatggctaaacgccccttcagttaacatgtgctacctaaattatctacaaattttagatagggctgctaaaaagaatttctccaagaaatctatttgttttttcttgagattgtacctcctatctaacaaatcgatgttaaccaaatccagcagcaacacgcggggcatcctctagttactagaacaattttgctatatatttgttgataaattttctcccaaaaatttgatagatgtaattacagtacaatcgtagtgtaattacactgtaactataatgtaactttcaaaaatttctccgtaacatattatttcggtaaaatggaggtcatggaaataaattctttgacatatgtgtgtgttgtgtttttttcttcctcaccagaacaaatcttgtaatagatctcacgattcagaattacgtgaaacttacatactccctccatactcacaaaggaagtcgtttaggacatcgacacggtctccaaaatacaactttgacttcttgtttctataaaaatattcattgaaaagtgatatatgtatacttttatgaaagtatttttcaagacaaatctattcatataatttttacattttcaaactcaacaactttagagttattcatgatttatattctcaagatttgacttaaacattgtcctaaacgacttcttttacgagtatggagagaatacaagttacactgtagttatatgcaagttacaatataattacattacgattgtactataattacatctgtcaaatttttaggacaaaatttatcgataaatatataggtggtacagtaccgttacggcccaactaattacatgggcttcactaactacagtagattattatttaattcaatttagtccagtataagttgtcactgtcgctgctaatccgatcgcccgaatgccactccgcgcgatgcttcctctccctctcctcctcgccgcgctcgccgtcgccgctgccgccgcgggcgcaccccgcccccacccgctcgaccccctttccgccgccgagcttaccgccgtccgcgccgcggtgctcgcctccccgctcgtcccggcccgcccgctcaccttccactacgtcggcctcgacgagcccgacaaacccgatgtgctctcctacgcctacggcggtggcggcggcgcctcgcgccacgccctcccgcgccgggcgttcgtcatcgcccgcgccggcggcgagtcccacgagctccgcgtcgacgtcgccaacgcctcctccccgtccgtcctctcgcacgccgtccaccgcggcgccggcttcccgacgctgacgctggaggagcagttcgcggcggtggcgctgccgccgaagcacccgccgttcgtggagtcggtgcggcggcgcggggtggacatggacgacgtgctctgcgcggtgttccccgtcggttggttcggcggcgacggcgagccccgccgcagcagggtggcgaaggtgctctgcttcgtcgccggcgcgacggccaacttctacgcgcggccgctggagggcgtgacgctggtggtggacctcgaccggatggccatcgtcgggtacagggacagggtggcgtacccggtgcccaaggcggaggggacggactaccgcgccggcaaggccgggccgccgtacgccgggccggcgccggcgcccggcgtggtggtgcagccggagggcaggggcttccacatcgacggccacgtcgtcaggtaatcgctttgaccattactagcagcttgttcaagcttgtacttgtgccgtgtgatgcatccacgtatcgttgtgatattttcaatttgaactattagaagctcgtgcaccacgcgtgagaaatcccaaggatagtcgccgtcaggggacggcgatggcctctattatttttcctctttttgaacttgacgacaagccatataagagtcgatccgttcatgataattccatatgatgattgatagcgagagcattgttatggagatggattttcaatcactccaggaaatatctccttattttttatatcatttaaatagtcactaaaaatttgaataactttgacaacatgagatatatcattccacaaacatacaaaatcaaattcaacttctacaagttgtaacaaaataacaaagtaaaatgaaaatgattaatgtatatttgcagctatatttgttacagcttgtagaagtcgagaatttgaaattacatgtttatgtagtgatatatttcatattaatctatcttatatttttttcaacttttttatggttgtttagatgatatgtaagaaacgaggaatattcatttgagggatgaaaatacttttccattgacatgtacaatgcattaggatagatattgatatgtacagcgcaccagcata

SEQ ID NO: 9343 - DNA, 1396 bp, Oryza sativa
attattgttttgatttatgtttaggttcttcctgatgacatccgtcaagcattgctcgttattgttgaatgctgcatgaagcgtgattatttagcagcaatggaccaatacatcaagctggccattggcaatgcaccatggcctattggtgtcactatggttggtatccacgagcgttcggcccgagaaaagatctacacaaacagtgtggcgcacattatgaacgatgagaccactcgcaagtaccttcagtcaatcaagaggcttatgaccctttgccagcgacgttatcctgctctgccctcaaaatcggtggagttcaacagcctggcaaatgggagtgacctgcaggcccttttgtcagaggagaaagatccaggaaaccctcctagcgaggataggcttcgactcatgccagcgtcaaaagagtgatgcttcaacgcacaagcttggatcacaaatagaatatttgtaatctgtgtaatgtgtaaaccaaattttcctgctcttattttcatttttgtactcttgcaagaatctgagaatattgcctgctaatcaaattactgaagaaagcaatatactgtctgcttctctcctagaagagttcactggctaaggttccatgtgtaagtttggttgaataaaaccattctaatgtctttgctgtgcaacaaaggtgtatgctggcaaacttattagattcatcaggttggttaagaaccgagtagtcgaaaaaaaaacttgctgtatttatcacatgaaagagaagaattcaggaagcacgtgcttgagatgtgcaacaagattatctggacagctacaacttggatttttcctgaacctgcctagtagctcactgctgcctggtactcgtgcccattaatttcgtttgccttgttttgcaggtgtagttcagcagctatccctgcctcgcttctgctggattctgggtaagtgagcccactgcatcagcaacaaatgatattttgcttatcatatgaagggatttttggcgcgaatggattgttttgcctaattcttacgtttttagcagctgtgctgaatgcttgtttgtgggtgatgttaggctccatgcttttgatcctctttatctcttccctgacaacaaaaaggaatgttaatacttccatcacctctcaagtctcacctgaatatcgaggggggacatttatataagaatattcagagccatgtatgctctaggtgatgctctgcaattggccctcagtctagctatgatcacagtatatactcattttgtttttctgggctattacttgacgaaacagttgtaggcagacggcgtccgctgctttcttcctggcgctgcagaaatgtttcaagaacatgcttaattagcccatcatgatcg

SEQ ID NO: 9344 - DNA, 4359 bp, Oryza sativa
tttgtcatacaagcctcacatgatacttccagatttttgatctcctgaaatttgcaaatacaaataataacaacagtaatttaataaaagatatcaaacagcataatatttcattgcacgaatccctgggaacacactgaaaaaaaaatgtggttctagccctactacatgggggctcctattttgcagatctgaagtgggtaggttcaaacttttacagcagcagtagtggtagtactatcatattctcttggcatgcactgtacacaagccttgtgcttccatacatttgtatagatgcagcatcaagttactgtagcatatcacacaaggggtgaaaaggacaattgcaccttgggctagcagcagtagagacagtgtaggaaaatagcattgtccgcaggataggcctgggccgtgcatttatcagttactcctaccacattttgcaacttcctttgctcattcaggtgatactcgatctcctacttgtagcattgcatggttgtacatgtggttaatttgaatttaaaccaatctaaagttagaaatccctgaaaaaaataatactctatccaaaatataattatttctggtgcatagtcataaatgtttatattttagaacggatggaattatatatagttataagttttcagcggaatatttgtggacatacttgtgcacttactaaagtgaagtactgaagatgatgtgtctgattcaattcatcatgccataatcacatttccttgctggaggagtatccatcaagcgttcagtagtaaaacctatgtttattattattttttacctaattgttaattttcaagataagatgaggatctttcctctaagaaagagtggaaaattcagagaaaaacacacctcgttgcaacctgcaagtaaactgacctacaaggactgaaagttcagttattagcctaatgtagaggttagcgttgggatgttccaatttacgagctgttgttattcctagaagcctaaaaagccactaatattgattttaaaacagacttgacttaggagtgcattagctaaaactgcaagtaagcgcaattctttctgtcaacttggaagagttaaaagcacgcttcaaatcatcagcacaacacttccgagttcatctggaactcttgcagtcatcatgcccatccttttcctcactttctttttaatgtgacaattaaattaatatcggcgacctgtatctgtcaaaccgaaattctacgggcaaagaacaccaattattttcctccactgaagttacgtcagaaaatggagtctttggtagcaaaagcagtacaaggcgatgcaaacttcacggaggaaaaggcacagtgcagctgataaagatgcaaccctttttttcgcctaaccatctgtcatgtgttgtgcatggacaggaacagagatctcatctcatctcatcaggtagccatcaccaaacaaaggacaaataatacctcgacagggaggaaatcattgccagtgcagggacaaaatcaactgagcaggatagtagataggagggcatcaggggcatgaatagctttgattccctgtgtaattgatactaccttggttttactatgtacaaatgggccccagaaattgtagctggggaggcattacattggagagctagtcatgcatttcctttttgtgcctttcaattaagtacagcaataagtagcgctccacaataatgcaggggccctaattctcctgtaatggcttgatgggacaggttatgtacaatgttttttttttctttttggaaagcgcaggactgtacaatgtgacaactatatcaatgtaaattcttgaagaataccggttttccagctcgttgtaacttctaaattaaccatatttggaattgccaagtcaattgtatcctcctcaggtgtgggaagaaattgatggcatgaatgtgaaatttgtatattagaaagaatgatctggctgaattaatttgataagccagtagtttcagaaacagtttgtatcgtcgctgacaacttcttccggatctctagctcttgttgtctcttgagataactttgtgctgtagaagtaattatctgaacgatgaagttcatgatcaaaagccacaccacggtattccagatcaaagagaatgatagattccacttcgtttcctacacatacataattaagatatttaggaaaaataacaaagaacaagaaagcaaatgatagcaggttaagaaaaaaaacagcagtaaatcagaagagagagatgctatcatgatcatttttgtaattatattactctgtaatttatgttaaaataattgtcaaccataaggataaattttacaaagtgtgatcttaagagtatgtaattttgttacaaaagttatggaagaatataaattattgttgctagaccatcagctgctttgtcattcagaagttggaagttagaacacatcctttcatgaaaaacagtgacatacattacaatgaaatcaacagaatcaataaattttgaaaacaacacataaccacataatgatgatcaaactaaaagttttgaaacaagtacgcctgatgtttgagatttgaagtgttcaaaacttccccaaaattaaaagaaatctgtaccttcacaacacttgatgctgatgcagcaacactggatgataaaaacttgctcttggctgtcttcaacttggcaactaaagagggaaggacggatgataccataggaacattgccaaatacccacataattcttttctccaccaaatcaagaagttggttattgcagagagtaattactaatgttgtctacagaagttatttgtgaagtatggttagataacttaacaaagatgttacaatgcatggaagatactgaaaagaaaatgctctgcaagagaatttttaagtagcaaacctggatataaaccttaataacagcctttccaattaaagttgctagaaagaacttccagaatgggatgttaaattgcccacacaaaatgccagcaagatcgaagagggggtttggcacctaatggaaggaaaagttaagtttcttcacatgtcatatctaacaagagaagaataatatgcaaaacataactgctctacattgtgacgaagcaaatctatttcttttgggaaatctcgtttgtgtgtgaatataatgagttcctcaagcatttcgagtggagttcacctaacaagttaaagtgtttaggagctacaacctacaaggcaactggaagtttggtaaataacaaattatgactgaaaacaaataaatgtacacaagaaaggaactaaccgaagcaagtaataagatggtagggaagttaagatactgtgagtgagacataagccatcttttagcccgatgcagagttgaggatagaaaaccttctcctgaaacggaagcatccaactcttccagctcatctagtttgcgtcctgacatgctagctggggttcatttatagtgagtcagttgcatcaagaatttcttctgacccaagattaaaaaataaactaggaaaaagtagtgaaaatactgcatcttagcattactgtattagaacttcaagatggaaccttatggtgcagaacttagcagaatattaagaaccatatatcactaatgtatcctacacggcatagtatttataatcagcattgcatcaaggtttttgcaggagtcacttctgcactggctggctagaaacaaagcctgaaaatgactcttggttctggctgagaagtgcaacacaaaaacttcccgctgtcttgataaaaacttcaattttatttaactctgtcagggagtcagagtttttgtattcctctcccctttcctttcctcggattgtaaataactaaagcttcatgtttattaatatgcagtagtcaacattccagaagtttcttgctcacaaaacaatatacataaattgctctgctgcataattcgacacatatcaatcttatcacatgttcatgtacgtttggaaaggttgaaagattataccaaattttaggttattcaaaactgtcatgttctctagtgattaatattgaagataaaaagggacatagtgtgaggctgtgagcatgtgaaaagcatataatcaagtggtgctatagcagcaaagcagtaagacgcaacctgctctcgagaggaaatatggaggaagttctccaagtgcagttccaatgccccagagaacagcttcaaggtgaacttcatgcagtattttgctaaatggaattgtttcctggtacattggcggtccaaattctagacagtctttctccaaccatgaaggt

SEQ ID NO: 9345 - DNA, 1688 bp, Oryza sativa
cacccgtcagcgagggtggcgggcgggcccgcctgtcagcggcgcgcgcgcgcgggggaggccgatgggccgcgggggaagagagagagagagggagggactgggccgagccggcccaagaagggaaaaggggagggggaaaagacttttagggatttttttctttttataaaacccttttaactttgtttatttcttttcacttattatttgtgctctgaaaattccactaaaatttatttacacattttaggcttttaggaaatatacaaaaatcctccaagcctcatttgacttttatctttgcacattttaattgttggaggctttcacatgaattttaattattctttgcacaatttcgaggatgagttttagagtcgttttgggacgcgacaaacctaccccccttaaacggaatctcgaccccgagattcggaagaactggcgaagagatcgggatgggctgccttcagctcgtcttcacgctcccaagtagcttcttcttcggcgtggttgctccactggaccttgcaaaaacggattacccggttcctggtcctgcgctccatggtgtccaggattttcactggcctctccacgtaggtcaagtcttcgcgaacttcaatttgctctgagtcggcctgctcggatggcactcgaagacatttcttgagttgagacacatgaaacacatcatgcacgttgcccaaggaggcgggcagctccaactggtaagcgacttctccgcgtcgagcaatgatacggaaaggacccacataccgaggtgcgagcttccctttcgtctgaaacctgtgtacacctcgcaatggtgtgacccgaaggtacacaaagtcatccactgcgaattccaggtcacggcgacggttatctgcataacttttctgccgggactgtgccacctttagattatcccgaatgattctgactttagcttcagcttctctcaggatatcagtcccgaacacttggctttctccaacttggtcccacaaaagcggtgtccggcatttgcgcccgtacaacgcttcataaggtgccatttgtatgctggcttgatagctgttattgtaggagaactcggcataggggagactcttatcccaggtcttcccgaaatctagtacacatgcgcgaagcatatcttctaggatctggtttagacgctcggtctgtccatctgtctgcgggtgataggcggtgctgaaatttaatcgggtacccagctcttcttggagcttcttccaaaagtgagaggtgaattggcttcccctatcagatacgattttcttgggaacgccatggagactcacgatcctagcgaagtagagctcggctagtttgttccctccataggtggtcttcacaggaataaatcgagctaccttggttaatcgatccacaactacccatatagaatcatatccaccttgggtttttggaagtccggtgatgaaatccatcccaatttcatcccatttccattctggtacttggagaggttggagaagtccggccggtcgttggtgctctgccttgacacgctggcacacatcacacagagccacgaactctgcaatttcccgcttcatgctaacccaccagtatttctccttcaaatctaagtacatctttgtactgcccgggtgaatggaataaggactttc

SEQ ID NO: 9346 - DNA, 8875 bp, Oryza sativa
caagttaccgaatgttactagttactacttactatttcctccgtttcacaatgtaagtcattctagcatttctcacattcgtattgatgttaatgaatctagacacgaatgtgaaaaatactagaatgacttacattgtgaaacggagggagtactcgtgtattactttcgtccacaaatatttttttagctacatacattcacaaagtaacgagagctacattaggtttcatgtggtgaaacctattcatctaagttaaagttctaaatttaatatagacaagaaaaaactacccatacgttacaataagtgaaggctattttaatatattattgttagaatttttgtctaaaaaatatatgggatttttattttgatagtattgatatctaatttggaacccttattaagatgatggtcatatcatgtacgcctgacgagaattctaaagcaattaagaatcagactcccatcctaggtttgcatgtgagtttttttaaaaaagatttcttatatgactccttatatattttcaaaagcgaacaaacttagaaaccaagtcaaatacgaataacatgctaaagtatcagcgaaaatatttttaatttttataataatggagaagagatagagataccaataccgaaagagaaaatgaggggaaaagagaagagattgaaagaagagggagagaattaggattatcgggaaaaagaaaaagagaaaagagtaaaaaaaaagacagtcaagggaagagcacatgacttcgagtggatgcacgcgggatggtacgggtcgattgggttgtgttgggctaggagagggatgggtgggattaggctggggaggaggtgtacagtactccatccatctacttttgataggtatatttccaaatctgaaaaatttacttttgaaatgcatattttaatccaaccacctatcatcttaatgactttctcggatttaatgcgtgactttccattctttcacataagactggttacatgggcatcaagaaatataaatattaatgaatcgattgtttacgatgaataactagtaacatgtttaaatggatgataagtagaattacttatccttggtcattgtgtgaaatatgactataaaaagtagatggatggagtagttattttaggctcgagctgaactggatgcggacgacgtacaacctagacaccgataacgaaataaaattccgacaaaaacatcttcaaattttataatagtagatatatgatatgctctcatttacacataaacttttaagtaattttaagtttagataacatatctgttaatatctgttaacagtgaggtgtttatggtaatttcgtcaaatttaaaatatatccatttagtttcttacaagtgctaataatgtgtccctgtattcacaggggattagtatgcacacatgtatatgaatttgaatatctattgtattgtgcttgtatgagaaaaagacgcatggtcgtgtcgcttgtatgagtatacgtcttttaccctttccacgcgcggagcttcgctagctgtattccggctgtacaacgttggacgcacggccaggggaagaagagtgtagaacacgcggtgcatgcgatgcgatgcgatgagctcactcgaaccgcgaccgatcgaaacgaccgcgcgcatgacgatgacgtgcacgcacgtagcaatcagtcaaacacagccaccaaaaaaaatcacagcataatccaaaattcgtcttgcttaatttatgcctctactttgcattactttacagcctgtgaaagtgagaacgaatgtttttgtcacctgcatgccgctgatatttgacgcggccaaaacacacccgtctgccaaaataaaaccacacgtttttccctctacgaaatactacaaccgtccaaaaatactcaacttaaaagaggatgtaacctcttctgatacaatgtatttagacaaaaagctatccagattcattatactaagagcaagtttaatagtatagccaactaatagctccaatttatctatagctaatctagtagctcatttatacaatagttacgtactacactattaatacctggtctcacctgtcatacacatattgcgtctcgaagtccgtgctatagctggctacaaatgtatagcccgctgctcttctctctccttatttatcttattaaaatatgtttgcagctggtttataatctgctattgtacctgcttaaaagacgtggttgagtttttttaagaacgaaaagagtactaatcaggaaatttgaatttggttgtgacaagaaaaggatcttgttatcaagggtagacgtcatgagattgagaaggatcacgacatgtaaactccatgtcagtgactcggtcgcaatttcgcagtgcttaggtggtctttgaatttagggatttaactttagttttttatttagacactaatttagagtattaaatatagactatttagagaactaattacataaatgaaagctaatttgggagacaaattttttaagtctaattaattcataattagagaatgttttactgtagcattatattctaatcatggattaattaggcttaatagattcgtctcgcgaattagtccaaaattatggatgggttttattaatagtctatgttaatatttataattagtgtccaaacatttgatgtgataggaacttaaaagtttatagtcccatctaaacagggttagactatagattttgcagggggccagtgctggatacaacggaggaaacaaacaaagggaagagatggcaggaggtagtagtagcaaggatcctctgtaacaaccatatctacaacgatcgttgcagattcgactataatttgactggccccagcaggcaatggatgctccgagtggaggagcagggagttgcaatcatgactaagagaaagctaataggatttgtcaagtttgaagattttcgaaagagatgtcaagtatatatgaaaggcaatactgcaaaaatctaaaaatgtgccaaattaaggtggtacattctctcatacaatttatgcaatatctgatcaaataaagctcgaactctaagtagccgatgtattagaagattggaacccttgatggatttccctttcgatataatttggttaacagaatttaggtcgaatgtccataatctcctaaccttagagcatctgtagtgtgaacaaaaaatcgattttacgacaggagaaccaaatcatgcacattgtagctgtcgaaccgtaggtgtcaaacaacaaatcgaactccacattggagtcgaactgaaagagtaaattaatatactgtgcatgcatgcaggtacggttccagtgattggctcattccctttttacagatcccacaaaacaattttaacattatagctatcaaactgaaattttgtttggctcttctattagattgatcaaaccaaacactacagatgcccccagtgcctttgccaactgttagataagtgtagaattttgctttcacttttgaaatggaagtacactaatatatttgggaaatacaaagcataacttttaaaaaggccaaatgcgttttacactaaacttagctggtgctctgctccgctcacagaaggtgggtacgcagaagatcattgcggcagggaagtagtagtaggtcatggtcaaccttaaccataccctaccatgacagcagcagcccaggcccatcaatcgcccacagcccctgcaggcccgggcccactcgagcagaggggcactgtgaaaaaggcccagtcggccccaccacgtcatggggcgccatgcacgcaccggtcagacgacgcggttgtcggcctggccggggtgcccagccacgtgggcagcccgcgcgctaccgacagcggccgtgacccgcggggcccggcggcgcgcgctctcgcgcgcgcgcgacgtcgtcgagaccgcgacgccgaccgatggcgagcgcgcccgcgcccccgccccgcgcgcgcgccgcgccagccaccatgcgacgacgtcgtacacgcacagcgcgccgcgggcgcgagcgcgcgcgctctgcagcgtcgccgccgccgaacgccatgccgatcgatgccgccgggcgcgcacgcgcgcgcgcgtcaccattgtgatcatggcgcgcgcgacgtgacggcgacacaagccaatccatcgctagcgactcgcttagtactattaattactccactaactagcggcatgtacaagaagcggtaggagaaatatcgtgtttctgtctaatcttttctgtggttgtacgcttgtttaatcctccttttcgtaggagttaatgacgatagggctcgatcagagaataaaaattgggttggtgcgctgatcactttcgcggcgagtgttgctgacttgcagcaacgcgcgccacttgccgccgttcggttggcctccgcggcgggggatgataataatggataatgctttatgcgagatacggctctgttggttttgcatttctttttcgttagggtggtgagtgcaccggagccaataaacaggtttaggtggaggactcgtgtttttttttaaagctcagccatacgcccatacgataattatttcatttgttcttttagatgtgcctactagttcgtgctagtaatctatagagcacttcaggactagatagcgagaaatctgttttaagagatcaacacgacacccctttgcatgcgaccttgggcgagtggctagctaagcttggactggttcctaagattgccactaaaaacatgtgtcaaatggttgactgaatatatatgtaaggtgtcagacttgtctcaagatataatggtgatgagatccttttgggacgcacctgatcgattctatgaatggactacaactcttttgaagtagcagatcatactagtgagcaaacgcttaataatgtcactcattccctccgtctcagaaaatacaatctaagataggaactgttatatatcctcggacaaccaatcaagacaagcacttaatccagattcgttgttcttgaatgcgtcacattctattctaagttaggttttttttatggagaaagtactttagattataaacaaaacgtatataatgattgagacagctatgtaatatcatttatgtacacagccacatcaactaagaacaaataaaaatggcatgtacaagagacaatatgatatctaatgtcactcctctcaactgtttccttgtaccctatattatctgagatgcctctttgcaaagatacatctcctttctcttctttctttatccatcgacacttcattaattaattgcaatgagtcatatggggtggggggtgggggggggatggaggaactaagaccaattaaggactaaaaatatctagcagtagctggtctagagctgattactggttaccaaacgatgaattcagattttaaaaattcgactattatggataacctattcgatttttatattactgcaatgttttccctccaactcgtaattcataaatagtagggctggccagccagttggcaattgggagtccaactcagaagacaatattgtgcataattcagttggcaattgtccggttaattttattagtaggacaaattcgttatgccagtggcacctagttcggtaacaaattttggtgttattgtagaggttggatatagcgttttcatatcaaacactcaaaagtagtttagaggttttcccctgtgtggatattatgggtaccccatacccatacggcatggttatccgaccagtcataggggataacttatatctatagaatatgtaatagatcatgactcgggtattacgtttccttatatattacggaacagcctaaagtcctggtttgataatattgtaaagtagatttaggaaaccgataccgtattggttaaggtttctatcttgtaatcctgccccccaccctatataaggtgggcaggaggccctctagggggcatgagacaacctgatcgtcagatctataatacacccggcggattcaaatccccaaacaggagtagggtattacctctcattgagagggcccgaacctgtctaaatcctttgtctccacatccatccacttttaggtctcgtgcgctaccccgttttattattgccgaaatcatgtttcgacagttggcgcgccaggtaggggttgcgtcgagtttcctatcaacgagcgcgatggaatcaatttcatgagtcgccgacttcgctttcgctttgggagttttcacttcctttccgtcgaccacttcttcaagctcctcttctctgacttgatccaaatcagtcagggggaaactcaatctgatttttatcattatttatcatattgatttttaatctcagattaatttcttgctattttttgttgttgttcgcatataactacgcggcactattgaggcgattgatgctggtcatggactcgaggcgtctcagctttccggtcgatcggccgcgagtccactccgccggcttgtcctcgccaccgccattgctgatagcaacaacgacttcaccgccggcctgcctccgtcgccgccgactggtgtcatcgcctatacggttggtcggtcacaccaccgttgatgggcatcgtcatctacaccgccggcttgcctccgtcgccgccgagtggtgcctccgcctacacggctggcctattatgccgccgctgttgggcgtctacgacttcaccgccggcctgcctccgtcgccgccgagtggtgcctccgcctacacggctggcctattatgccgctgctgttgggcgtctacgacttcaccgccggcccgcctccgtcgccgccgagtggtgcctccgcctacacggctggcctattatgccgccgctgttgggcgtctacgacttcaccgccggcccgcctccgtcgccgccgattggtgcctccgcctacacggctggcctattatgccgccgctgttgggcgtctacgacttcaccgccggcctgcctccgtcgccgccgagtggtgcctccgcctacacggctggcctattatgccgccgctgttgggcgtctacgacttcaccgccggcctgcctccgtcgccgccgagtggtgtccccgcctatacggtcggttggtcacaccaccgttgatgggcatcgtcatcttcaccgccggcctgcctccgtcgccgccgattggtgcctccgcctacacggctggcctattatgccgccgttgttggatgtctacatcctcaccgttggctcaccttcgttgccgtcgactggtgtttccgcttacacggctgacctattataccgccattagtgggcatcttcgctttcaccgtcgaccgccttcgtcgccgccgactggtgtcttcattattattgatggacgactttgttcccacattggccacttctgccatcaccaaggggaatattacaaagctaagtcatcatttattttattctttatatgatatttttccttttcctctgcctcactacaccaattggtcttccattgagtagtgagtcgggggctacagatgttatatcatattttttataatatttatcttgattgcttgcgacataatctgagtacaaaagtacctatcgagttatggagttctatcttcctatgctttccgtttggtttgccaatggatggttgcctttgggccgattcctaacacccgggggctcgttggatggaccgagtaacgcaaggtgctaagtattactcggaagaaatcaaaagcatagagataatataatttattttctgctcttaataattgcaaaagtacctgagtagtaaattctgatccgtgaaactttgttccattaatgacgaactcatgtcactcatatgcatgtttgggaaatgcctaggccgactcccgatgcttgggggctatgactagtcggacagagtgtttaaacgtacagagtcatctgctcggggaaatcaaaattgacaagaggagaaatacatatttataaatattttaaaatacttgattttttctcgagtattatatttatatcagatactactcatcctatatgtttgttctgcaggatccagatccagatatgcataaaagggattcatggctttaagcttatctcttacgctccaggaatggatcagtcagaacaccaccaccggctcgcctcgaccgccgccgactggtgtttccgcctgcacggctggcttattatgccgccgttgttgggcgtctacgtcttcaccgaccggcttgccttcgccgccgccgactggtgtttccgcctgcacggctggcctttatgccgccgttgttgggcgtctacgtcttcaccgaccggcttgccttcgccgccgccgactggtgtttccgcctgcacggctggcctttatgccgccgttgttgggtgtctacgtcttcaccgaccggcttgcctttgccgccgccgactggtgtttctgcctgcacggctggcctttatgccgccgttgttgggcgtctacgtcttcaccgaccggccgcctcgtccgccgccgactggtgtttccgcctgcacggctggcctattatgctgccgttgttgggcgtctacgtcttcaccgaccggcttgccttcgccgccgccgactggtgcttccgcctgcacggctggcctttatgccgccgttgttgggtgtctacgtcttcaccgaccggcttgcctttgccgccgccgactggtgtttctgcctgcacggctggcctttatgccgccgttgttgggcgtctacgtctttaccgaccg

SEQ ID NO: 9347 - DNA, 9045 bp, Oryza sativa
accctcatgttctttttgagctctgctatttcaggatcacttgcttgagctatgcgaacctgctccaccagtgtgggctgtgcctctagggcagccacgaatccgtgctcaactataccaaggttcaaatgttccaaatcacgttgaacctcacagcatagttcctctacccatgcgacgttgcagtaactcttcctgctcaaggcatctgctaccacattagccttgcgggatgatagtgtatccccatatcataatctttaattagctccaaccatcttcgctgtcggagattcagatcaggttgggtgaagatgtactttagacttttgtgatctgtatatacctcacaacggttactgatgagatagtgccgccaaatctttaaagcatgaacgactgcggccaattccagatcgtgcgtcgggtagttgccttcatgaggacgcaactgccgtgaagcataagaaaccactttgccatcctgcatcaacacacatcctagcccctggcgagatgcatcacaatagacctggaaatctttcgtctgatcaggcaggattaagactggtgcagacaccaaccgtcgtttgagttcttcaaaacttctattgcattcagcagaccagataaacttttcttccttcttcaatagctgtgtcattggcttagcaattttagagaagttctcaatgaaccggcggtaatagcccgcaagtcctaagaaactccgaacctgagtgactgtccttggtggggtccacttggtaattgactccacatttgctggatccacagctactccttgagcattcacgatgtgaccgagaaactgaacttccttaagccagaagtcgcacttgctgaacttggcatatagctggtgctcttttaacttttcaagtaccagccgaagatgctgctcatgttcttcctcggacttggagtagataagtatgtcatcgataaaaaccacgacaaacttgtctagaaattccataaacaccttgttcatcaaattcatgaagaaggcaggtgcattagtgagtccgaaagacataaggtcgcattcgaacaacccgtaccgagtgatgaatgctgtctttggaatatcctcttcgcggatcctcaactggtgatagcctgatcgcaggtctatcttagagaacacagtagctcctttcaactgatcaaacagatcatcaatccttggcaaaggatacttgttcttgatggtgacctcattgagtgcgcggtagtcaacgcacattctcttggttttgtctttcttctccacaaagataaccggagcaccccaaggcgacgtgctcgggcggatgtatcccttctgtaactgttcatcaacttgcttcttgacttccgccaactcgttggctcccattctgtaaggcctcttgtggatcggtgcagttccaggtaccaagtcaatccggaactcgatatccctttttggtggcattgttgtcagatcatccggaaaaacctctggatactctctgactatgggaatatcctccaacttcttagtggttttctccactgctacctcttgttcttcaccagcagcctggtttaaactaatccctggcttccgcggcactggagactggaaagttaccacctctccttttgcattggtcaacttgatggtgcggctggcgcaatcaatcactcctctgtgccttgtcaaccaatccattccaagtatgacgtctaggtccttggattcgagaagaatgaggttggctggaaaaatcgacccttgaatttcaactgtcacagatgggcagtagtgagttgtggtcatgccacctccaggagtatgcactcgcattggtatcttaagcttcactaaagataacccatgtgcaccagcaaaacgcttggaaatgaaggaatgggttgcaccagaatcaaacaatactactgccggtgtcgagttgacggggaatgtgcccaatataacctctggtgctgactgcgcctcctctgcagatgcatgattgacacgggcctgaacggacttgggtccagcacgtcttggcttcgagcactttccaaccgtgtgtccgggtttgttacaattgaagcagagttcgggtttttctcccaacctcttgggctgttctggcagagctggctgaactgattgagctggaatctttagtgaactcggagtagggttgagactgtgctgctcactgttgttgtgactgccactatggtggttcttgttgaagctacccgggtggtagggacggtgctgtcggataatcatggtggaaggtccaccgttatgtcccatcgtgaaaccaggcttctgactcttcccctggggagtcctaaactaagctgccttcctcttacggtttattttgttaccgtactcctcctgacggatagccttatccaccagcttctcaaagtcctcataatctctagagatcaactggttagtcaattcatcatcaagaccagacaaaaacttctcctgcctctcggcatcagtacgcacgtcctcaggggcgtagcgcgcgaggcggttgaactcatgcaaatactctataactgttctggttccttgttgcagggaacggaactctctcttcttttgtgccacaattccctcgggaacctgtgctttattgaaactatgacgaaactctgtccaagtaacctctgccccagctggacgggtcaccatgtagttgtcccaccaaatagaagcgggaccttgtagctggtgtgtagcaaaagcaaccttctcctgctcgttgcattgcaaaagattcagcttcttctcaatggcatgaagccagtcgtgggcctcgattgggttggtggtgcttgagaaagtgggcggcttgacacgaagaaattctaacagtttggactgaggaggtggaggaccaaactgcaggttctgctgctgctgctgtgcttgccgctgcacctgttgcaacacctgatggtactggtgttgcatctgttgcatcattattgccatcatctgagtctgattgtccaacacctgagcgatcgttgggttctcgggcgggggggacggactgctattaggtgcattgctggcacgtggtccattgatctgctcttcgctgccactggcgttgttcgagtcgcgtgaaccattccttatctccatctgaaggggataggtagaaatatgagaaaaggaagaaaaacagggggctcaaaaactaatcttgcttatgaatttaagtgcaattatcttaatcttgattaaaacactgaaaaagaggcacgcaactcctaattgaggcagtcataccactgacacatgatatcgaccgccgactaacccacaagcaacaaacctaacacgaaacctagcaagcaaacagactaagaagccgataaagctaagggcggcgactttgaagctcggggcggcgcttgcaaacgagggataggactgacatctaaagtagacaagggataggaaccaattcatgctcaaatccaagttaaacaaagcaaaagaagactcaaataaatacccgagcatgatgatttttatgcatagaacatttttcatgaactcaaataaagacactaatgcaactaaacaataaattaatgcatagactagttgcatggaaaatgatgcgcataacattgcccccatcgaatatagacacgacctaatgcataccccaataaattcccgactgactgtcgaataaactccaactaaaatttttctaaagccctagactgagctaattttttttaaaaaaaaatccgatccgaataaatgaccaagatttttcccgcaaaccaaagaggcaaaactccaaattttcccaaaacaaatccaagtgaaaaagggcatatgcatatgaaaaggggttcagaaggctgttaggtgttccagttggcttgtcctacggtcaaggtcggctctgataccaacttgtcacgcccagaaattctcgaaccagaatttctaagctgaatgtgcattaaatccctgtccaggaccagccagggtacacaaacgacaattgttgacatacagatccacgtcttacaaaaatagaaaagattacaaatgcaccgggaaagataaaagcgagctaaaccgggaagcttgacttcagcagcgagcgactccactccacaggcaaaccttgacggcagcgacgaaacaaactttggcaaaacagctccaacaaggaagatcttcagctctggtgtgggggaaaaagagagcaagactgagtactacccactgtactcagcaagtcataccggaagaggaggtatgatgcaggatataaccaaaggaggctagaggttcttttgcataaagctagcatttaaaagcagtagttgaaggcagtaaaacagttgtagtaattaatcaatattaaccaatcactgtccaacgctacaccacgttgcaacaggcccaaccaaccacctgaactacaccagttcattaagctaaactaggggtgagactaatcacggtgaatctggttgatcgcccataaccgcgggcacggctattcgaatagttttactctggccagaggtgtacaactgtacccacaagacacgattccacacatgtcgccatgccccgaagtatcaccatgatactgcaaagggggaaatcgtgacaagaccctccacataaccctcccctaaccatccacaccacgctaaggtttcacccccacccctcaaaaggcagtgggcggtcccctcttgcgccgcggtgaatccggcagctggacaaccggacaccccggccgacccaactccatcacgcccaccctcgccaccggtgcctaggaaagggtcgagctatacttcagatcaagcagttacccactcccgcttgtggtaagcacggtaagtctcccagggtttcccgtgaaccggtccttaactgccatgggtgcgaccagcaaaaccatgcacccacagcccaccattcagtgtattttaattaactgacacccatgcggtggcaccaatctaaagctatgctcatagtcaaagtctatgtaataatgtgatccccatttgtgtgctagttgaactaagcatggctaagcatttcctaggccaacatctagtcattttgatacccaagttatcaatggcatatggtaaacaataaatggctgagtaataggacccatcccacattacattgtaaaaggatgcaacatttaatagaaatgcgggatatttgtaaattgggtacaatatgatcaaacgtattgaatgacttgccttgctctcgcactgatgagacctcagcaacgtcttcgagaaaccgcggaacgacgaaacggccgaaacctacgcgacaaacagagcacacaagcaaacatgctataagactacagaaacaggaaacaaaaccatttttaatggattctttgcatttttcttgatttactgagacttgaatggacttaaacggagctcggatgaattacttatgaattttagaagataaactgtgtttttactaataaagaaaagtccttaatcactttattgcgcaataaagcccagggctgacgtcatccaaggggggggcggcgccgacaggtggggcccgcatgtcagcggttcaagagagaggaagggggcgccggcacgtgggccccattggcagcggcacaagggagggaggtggcggcggcatgctcggcatggctcaagccggccggccagccatggggcggcggccgaagacgacggcgcacgcgcggagggcggcggcgctcatgggagagagaggaaaggaaggaggagaggggattcctcaccttcgagcacggcggccggcgcgaaggaagaaagcggcggcgacgaccggtgatgcggaggcacggacgggcggcggcgacaccctaggagaagatggagaggcgttagggatggagaaagcgaccgcgacgaccaaaatggccggccggagatggaaacaatggcgagcacaccggcgacgcggggaaatcggagctccggcggtgattcgcggcaacgaagcggcggccgaggtagctctcgcggcggcgaagctaacggcggtggtgggttggcgcggcggcgaccctagcggcagtgacgcgcggccgaaggcgacggcaagcggcggcgctagcaacaagcggcgcgagcgcgataggaggcacgggagagcgcggcgaatgagggaaaacgaaagagggggctcgggagagtgcttttatgggcaagggaggggaggacgtggccgggaaccctcccgatttggccggcgacgtggggaggagagagagagagaggggtgggattcgaaatcgaatcccgccctctcgagcgcgcgcgcgggccgggagatgcgggggaagaggcggcgacgtggggaggacgcgggagcggcgcggcgtgggcgcgggaagagcggagaaggcggcggcgtggcgtattcggcggcggttgccgtcggaggcgggtggctggaggaaggggacgacctgacaggtgggccccacctgtcagcgtcccggagagagggggaaggagaacgggccggcccacaaggggaaggccgagcgggagagggatgggccgacggcccaacaaaggaaaaggagggaaaagaaaaaaaagaaaaaggattttcctgggattaaaattgcaccttggtgatttttaattggtaaaaattatttccaaggctctgaaaattccactaaaaatcctgttaatatattgtgacatgtggaacccaagaaaaaaatcccacaatgccaattccaattattaattgcatttattaattatggaattagctctaggttaattaagataatttcttcggacaaattatttaaccaatttttttaaagcaagaaaaaggggaaacttccgagcgtgacaaacctaccccccttaaacggaatctcgaccccgagattcggaagagctggcgaagaggtgcgggtgggtggccttcaactcatcttctctttcccaagtggcctctttctctgagtggtggctccactgaaccttgcagaatcttattactttgtttctggtccttctctcgctggtttcgaggatacgagtcggcttctccacatacgtcagatcttcctgaatttcgatgtgatcccggacttgcctgttcctcaggaactctcaaacatttcttcaactgagagacgtggaacacgttgtggatgccaagcatgttggagggaagctcgagctggtaagcaacttcacctctacgttccaagatcctgtatggtcccacaaagcgtggtgccaactttcctttggtttggaagcgatgtactcccctgagcggagtgacacggagatacacataatcccctgtttcgaaagcgagctcccttcggcggttgtctgcatagcttttctgccgagactgcgcgattctcaatctttccctaacagctctgactttctcttctgcctcatttaaaacttctgtaccaaacaattggcgttcccctgtctgatcccagaagagcggagtacgacattttcgtccatacagtgcttcaaatggtgccatctgcagactagcttggtaactgttgttgtacgagaactcagcatacggtaagcttttgtcccatgctccaccaaagtcaagcgcacatgctctcaacatatcctctagtatttgattgactcgctcagtctggccatctgtttgtggatggtaagcagtgctgaaattcaaccgggttcccaattcttcttgtaatttctgccagaactttgaagtgaattggcttcctcgatcagacacgatcttcttaggtacaccatgtaaacacataattcttgccagatagagttctgctaatttcttccctgagtaggtagtgtgcaccggaatgaagtgagccactttggtgagtcggtcaacgactatccaaatagaatcatgccccgatgacgtcctgggcaaaccggtgatgaaatccattccgatttcttcccactttcattctggaatctgaagtggctgtagcaaacctgctggcctttggtgttctgcctttactcgttaacagacgtcacagagtgctacgaactcagctatttcccttctcatgctgacccaccagaacttttctttgaggtcttggtacattttggtactgccgggatgaatggaatattgagtttgatgagcctcggttagtatcaggtcttttaattccttgttttcgggtacacacaatctttctcccatccagattgttccttgttcgtcctcaacaaaacctcgggcttttccaaccctcatgttctttttgagctctgctatttcaggatcacttgcttgagctatgcgaacctgctccaccagtgtgggctgtgcctctagggcagccacgaatccgtgctcaactataccaaggttcaaatgttccaaatcacgttgaacctcacagcatagttcctctacccatgcgacgttgcagtaactcttcctgctcaaggcatctgctaccacattagccttgccgggatgatagtgtatccccatatcataatctttaattagctccaaccatcttcgctgtcggagattcagatcaggttgggtgaagatgtactttagacttttgtgatctgtatatacctcacaacggttactgatgagatagtgccgccaaatctttaaagcatgaacgactgcggccaattccagatcgtgcgtcgggtagttgccttcatgaggacgcaactgccgtgaagcataagaaaccactttgccatcctgcatcaacacacatcctagcccctggcgagatgcatcacaatagacctggaaatctttcgtctgatcaggcaggattaagactggtgcagacaccaaccgtcgtttgagttcttcaaaacttctattgcattcagcagaccagataaacttttcttccttcttcaatagctgtgtcattggcttagcaattttagagaagt

SEQ ID NO: 9348 - DNA, 3098 bp, Oryza sativa
gggggcgacgggtgcctcggagccggaggccggggcgggcgccatggaaggggcagcagaggagtgaccggaggcggcgacgcggatgtccaccttctggccgatgccgcagtggcccgggaagccgcagaggaagtagtggtggcccgtggcgttgaggaccaccgagtcgttgcccgtcgaccaggtggcgatcggcttgctcgtgtcgcagttcttgtagtccgacttgctcaccgccatcacgttgtggaactgcttgttgtacgtgaagactgcacggctttttttttttcagacaagagaaggcaaaaaatagtcagtcaattcagcaaaacacgagagagatcaaagttcttttgagttcaatacaaaaaccatgaaaactctgttgttccgcatcttggactaaccatcccttagagggtattgttaaaagatcctcgattcctaatgaaatcgatttagtagtggcttgatggaagcctaacgtttttatttgatccagtatatgggatgtatatcccattccgaaatgatatattaatctgctaataagtcgttcatagcagttccatctatctctttattatgaaagaccagattggcccgttccgccataaataagtacctctttttcggctgagtataattcgacaattcctgagtaggattcgacaatgggcctgagtcagtgattcgaaaacttagttaacttcctttcctaaatctcaatctggattcgtgcggcaaaaatgatgatactagcgaaatcggaatgcccctcgaaaggggcgaatctaacttccttgtttagatagtgtatgaataggcctgactaaatccttgtatggcttcctctatttctctgtaaaaagaaatatgaccaagagtaagactggggtacgtcatgaagctttgtaaaaacagagctagatcatactagtatcatgcatcagcatgatgaaacagatggtcatttgtgcaaaaaagtgatgtttttattttttgtactacttttggttgttgtggaacaagatgaacctagtgcagttcatatctggaaggatcctaccagctaactcgatcgcaatcaccagatatgacatgcttgagagtcactactaaaagctctatcatgttcagttagttatatttcttaatctattccactcctaaaaatccactctctagtgtctagtatccttactaatgactctgactggtgacgactatacttggttagatgtgattgggaatatatgctgttatacataacgataaaaacaataacagcattggtttgacaaaagaaacccacggcaccacgcgtaactatctcaaagatactataaatctagaaccaccaaaatagagctaaacatgtgaaaatcctagagctagctactttgactgatcggatggcatctctccagggcaacaaatgatatgatcgcaatgccaactttccagctcatgggccaaacccaatcaggtgtccacattgcaaaatggcagtttggcaaccctatcataatagaacagcgataatcatagaccctctttctggacgagctatatgcatttgtggttctttgattactctatgcttccaagttccaaaagatggcatccgtgccgtcatcttttcggcccaccaaggaagcctaccaaccaaccatgagattgctcaacagaaaacaatgattcaatgagagcgcatgcatcggtgtgttggccatagggtccaacataattttgacaagctgtggaacagatagcaactgagagcatgaaatatactcctataaagttgtggttgattaggatttgatcatttaattcaatgcaaagaacaaacattaactttcttcagcagaggcaactgaaaaaaagtgcctttggtgccctctttttttaatctcagctaaagaacaagtgccttcaaaatagtcggcacacatgtctaattgtgcaaaagaataaaacgcctttccttaaagcaagaaaagctaatccttacaggaataattgagcaacaaagtactcacaactcacaaggagcgctagagcttaaaaagaaaaacaagtgttatggctgacaaagtgacaaatgactaaggctgtgtttagttgagggggaagtttggattttggttgaaattgaagatgatgtgactgaaaagttgtgtgtgtatgacaggttgatgtgatggaaaaggactgaagtttggatccaaattttggatctaaacacagcctaaggccctgtttagatcctccaaaatggcaaaagttttaccattttatagcactttttgccattttgaatttaaacactagtagcaaaagttggcaatttggcatttggcatttgctagtccatagtagcaaattgtgccaaaaagtgctttgggaccactccctctctctttctctctctcactttagtgctagaatggaaaaactttaacatgcatctaaacaccaactagtacttttgcaatgctaaaacttttgccatcaaaacttttgccatttgtcatttgccattccaaatggatctaaacatgccctaatttggccgtgccttcacgctccaactcacacgcaggcatacagatccttggtgagaagggaaagtactcatctggtagtgcgcgctctttccgaaaccagcatgttctttggtggagaagaaacacaaagaaggccagcgctatctgacgtcaggtatccagatagacctgtttggattcatgccaaaacacggagtactctcgcttaccacaccaaccgcgtgcctgcgtgtcggcgcgccgctacgccagaacgacagatgcgcgtggaacacgcacacgcaccgggtgtggtgcggccgtgcaggccaggcaaacaccgatccggctcgcccggcgaaaaggccggtaaaggccaacggatcccgcggcgccatccacaagccggcgctccgcgccccacgcgcgcaccgagggagagaaggcgactagcgctgcggccagcggcgcgcggcgcgtgcaggcggtgagggccaccagctggtgccgtgtgccgtgtgcgtgctgcaccgaagtccc

SEQ ID NO: 9349 - DNA, 29055 bp, Oryza sativa
ctaatagtatagattagttgcagagtttatggggattctttgattaattgttcaaaagttcagtgcaaatctgagtaattagcttagctagcttggatttgttggttggttatgactggttcttgaattggcgggagtagctttcagtatggttcgcagctgttgctgcagcagttaacatttactacttctactccagtactcaccgtatttaagctagctgaactggcaacctaatcagtggctgaccaacttggcagacattgccagcaagctgcgactactgtcaaaactacttcctctgtcccaaaataaatcaaaacaaatcaatctagaacgggtaatatatcataatactatgaatctttggtttattttggggccgagagagtataactactagcactagtgtaaccgttgatttgagaaaccatcacaagattcatggcacctactagaaggattagcggacacttgctgtccggatcaggtagctagtgtgagggtggttaggcaattatcctgcagtgaaacacctcagttcagtacgcacagggctgggcatggaggtttttcacgcggtggccgtgtattgtgccgtgagccggtgggactgttcttgaattcttagcggtacaggttcacacaaagctagtgatgcggttttgagggttaaccgtttctcctttttttcttttgcctttggaaatggccaggtgtttattcagatatcctgggaaatgaccatgttttttattgataactgaagagttgagatgatcaaatcaatcttatgaaatgagtaacagtagagatgatgataccgaccggtgctagaacatgtagaaatcaattggggcttgtaaaagtaacaaaagtaacaattttactccactgcagagaggctatacagtctggtaaaatcattcattgctccaccttcaccagatctctgaatctagagtgatggtatgaaaaaagtgctctctgaatctgccaacatgtctctacagactacagtatttgtgtaccatggcttctctgctagattaattgaccattgacagacccagccctttttctggagtaacacaaccccaccaacatttacaaagattcagcacagtagtagtactgtactgtagtagtacttgtagtatcatacagtatcaaatgaaagaaagaaaaagatacagcagacaactgaattgattctataccagttttaatgtagacaatttttcgtgtgatggctggtaataggatgccatgtcctcgtcctaggtgaaacaaccacgtcatctcgcgggtaaatccattcatcggtagtgtgattttgtaaaatacacaaccaaaatatatgtacttaagtgttaaatgtcaaaatgtgtgtgattttctgcaacttagaccacaaaatgtgtagttttatgaaatttactctttattaatactatgtctttttgacttttcgcctatattttcttgtcagttaaaagactgaaaatgttttacagtatgagccatcactcccacgagagttcaatgaaattattgaaatggacattatgtaagtggcacttcagtcttaaggagcgaagaatgataattgaagagttgatctaaaagaatactatgatttactactaaagaggtgtttacaaacagaattaggtttaagagcaagtataataatgagctataagcctactataaacttatgtggaggagagaaataacaaaaaatcaagaattttggctctcatgcaagagctagcttaacacaaactcctaggcaaatacattaaatgcataggtgagagatagagagagaagatagttgtagccaaccttatagctaatccattatatatattggctttaagataggctaatagtaggctataagtgagctatatacttatgtggaagagagagataaggaaaagtgggtagtgttggctctcatgcaagagctagctccacacaacctccaagaaatatgcattaaattcatggagtgagaaagagagagaatggaaaaaataaagttaaccttatagctaacttattatacaagttaactctaacattgacttatagtaagcagtgagctttactattaaacttgctctaatatatagatcaccgtagaggccgttgcttcattattatgatgttgaggtctcgtggtccactgtcgatttgcagcacagctcacaagtcacagttctgacctgatcgtctaattttgatcccaaatagctgcaccccaattcttcaatttctgaacaaagacaaactttttttatgaaaagaaaacaaacttaagtgttcttgctgtaatcttgtattgatgcaaaagtggtaacaattaatgattttcttgggtttggaccggctcgcgccatgcattgcaggtcacgagcttcaaatgcggtggcatggcgctcggcttcagctgggcgcacctcatcggcgacgtggcgtcggcgaccgcctgcttcaacacgtgggcgcagatactgagcggcaagaagcccgcgggcaccgtcctcgagccggcgaacaagccgctggaccgcgcgcccgccgcagccgccgccgcgccgccgcgctccgtcaagccggtcggccccatcgaggaccactggctcgtccccgccggccgcgccatggcgtggtactccttccgcgtcaccgagccggcgctcaagaagctgcaatccgcggcgggacgccatgcggcgggcacgttcgagctcgtctcggcgctcctatggcaggccgtggcgaagatcagggcggcggcgtccaaggaggtgaccacggtgaccgtggtgaggacggacatggccgccaggagcggcaagtcgctggcgaacgagcagagggtcgggtacgtggaggcggcctcgtcgccggcgaagaccgacgtcgccgagctggcggcgatgctggccggggacaaggtcgtcgacgagaccggcgcggtcgccgcgttcccgggcgacgtcgtcgtctacggcggcgccaacctgacgttcgtcgacatggagcaggtggcgccctacgagctggagctgaaggggcagcggcccgtccacgtggagtacggcctcgacggcgtcggcgaggagggcgccgtgctggtgcagccggacgccggcggccgcggccgcgtcgtcacggtggtgatccccagggacgaggtcgacagcctccgcgccgcgctcgggagcacgctcctgctgctgcaagacgcctgagcccggagcgccgccgtgccgcgcgtcgtcttaacacgcggcgccggcgaccggcgatccggctggtatgaaatttcgacgagcgtaggacaatcttggcgcctcttttttctctggaatttacgaagtctgtactgtatcatgatgtaccgtaataagttgttcgagtgccagaatggaaatgcagtgttatataccacagtatacttgtcagaaattcagaatacattattgtaagtacttttgggcgtacggtaattcagatcaagcattattattttttagactgggtaattcactgggatcaagcattgttactacggttgaattcagatgagatttataccggtagaattcagatcaagcatttgctactgctagtagtattgcatacggtaatttaatactctggtgaattgcacacagtattttatctggcagaaacagtttttgcacatgcatgtcctccgtctgatgacgttattcctgagtactcattcaattatggctgtgggtcgataaatcgaaatcaatgtagactaccagtacgtgattaatattgcctgcagaaaacacgtactcctaataactgacctgccatggaggcaatgcaaagttgcaaaccatgtactaacgcctgccaactggtcggacatggacgcctgtgacagtgtgccgtcgtgaccaagtgccctagcttttgggctccacaaatatgcttgaattttacacatttttcggaaaattattagacaccttttattatttgcaaaaggccccgtttagatgggtcacaatcttggcccatccaggtagatgggccgagatttaggcccatcaaaacaaggctcaaagagtagtcttcctattgggctggcccaatttggaaccagcaatactaaagcccggcccaagttagcaacgcggcggccgctacaaaaccaatttgcgagggtggctaggtctcctcctctttcgcttcgctgaccccccaaaaccctagctcgagcgctcccttcttccccccacctctgcggcggcggcgggcggcgagatggcgaagtcgctgcggtcgaagcgggagaagcggctgcgcacgctgcggcgggagatcgcgcagcccttctacgacaagaaggaggcggccaaactcgccgcgcaggccgccgcgctcgaggcgcccgcgctgccggtccgcgcgcctccgccgccgtccaaggattccggcggctcccgcgccgcctccagctcggcatcggccatgggtgagccttctctcgtctcagtggttcgtggttgtgggggtaactgtggccctagttttcatgtaggaggcggacagaatcgctctgcgccttatctgttatgtttgggatgcttgtttgagtatcaatccttcaggtagagaatactgcagatttcatctcacgatggtcctggtgcacacaaggttatagctgtagctgcgatcggtggattgagctgaccttccactttattgctttgctcagttagtacatgactatcatgatagttcttgaagtgtatcagcggtggaatttgctccgattgacaatgcgttggtgctatgttgatgtctcgtctggaaacctggaaaaaagcatgttgttggatgccaatttgagtaaatttagctgcaaggagcatgagccgataactgttctgttgtgcgtctttgaaaactattggtgaaacaaatgaaagcttcctttctgaatcgcttgcctatatgtgtgttatgtttggactgaagatgctgttaagttcttttattattaggttgctgtacatctgtttggagtcacttcctcttggtttgcaatttgagtacttgtatcagggaagtgaccaatagtaacatttgtgtgatgtcctgttatgaaattattaataggtaatggaagggtataagtttcaatcaaatttaggtaatggaacatacaaatcagacactgttttgcttcacatgaaatttgcacctgttagtaaacacaaaacctaaccggtagatgcaattttggactcattctcatatatctaacagaaacgactttttcatcaatttgtttctattgctgccttgttgatcaagtatgttgtacttactaaataagcttggtttgttagtatggatccttctgattttccaccatcaaaacacctgattcagagacagatatattagagtcggtttttacattttcacttcaccttgtttcttgactgatggcatgctctctttgtatcaacaaaacagacgttgagatggcggatgaaggaaataacaagtccaagtccttcttgaagccaattggtagcattagcaagaagaaggtacaacttcacttgaagatcaagaaagataaaagaaaagctaggaagaaggggaggtttagtaaaaagtaggtgtcaaagcttactctgttatgagaaccatcaattttggttagtttgaacaatgcatgtaatggtaatctcttgtgttgttgtgcacctaagtgttaaccatccattctgggtggataccgtattgaaatcagcgaaagcagtgagccagtgacaccctattcaggagcttcatccgtattactgatatgatctttttttaagcatctgtgatgagctatatatattcatttcctggtgagtctttgcatctgctctttccgaactattcttagtgataacaaaagggcatgatgttaatttcaccttgcatcttgttgatttcttaatgattcatcatttcataatttggatcattttgccccaatgttggtgggcgcttggagatgggggatgttcttggtttactacatctcatgtacagaacttgtacctatctgttgtattgaagtgcaaatttctttgatccagtactccggtgccagccttattccccgttcctacgatatcttcattaaagaatgccaagtctccaagaacgcatgttccgttctttgacagtttgatagcagtggcatgttgagccgttaggtagcatatgaactgtcagatgctgttgtgcatatgaggttttgtaacatgatcaagtcaacacataattcctggcaatttccatgcactcatgtgcactaaataacagtagttgacttaacatgaaatccgatcagaattcagaaaataacctccaaactgaagaacatgaactgaattttttttggtatcgtatttcagtagctaatttttcatgatactgtatcgattcttaaattcgttgaacccggcacgaacaagctgccttggctgctaaaaatgtcatttgataattatgaatttggtacctgttaaattattgcacgactcgtatcatggtacacgaagaactctggcgttgaatcgatccttgcacgtcttagtccccaacccacacgctcagttgccatcattatccccacccgctgactgacccagggctgcatgtttgttacacctccccaacatttgcacaactcgcacatcaccgaagaaatgttcagacataaaaaaagaagaagaagaaaagaagttgcatcagcaagccagacatactactctctctcggtcccttttcaagtgcagttatagttttttttaatccaactttaaccgttcgttttatttaaaattattaaaaaaaaattaaaaaataaatacacataaatcactattcatgttttatcatttaataacaagaaaaatactaatcataaaaaaaatttaattaagacggactgttaaacgttggacatagaaaaccacaactgcacttaatataggatagaggaagtagtgctttttttttgcaggggcataattatcatatcatggtgtgcaaaggaagcgatgggacaatctcgttatgtttaaattattagggcatttgcaaatttgccaccggttttttcaatattgcaaggatgccactcgaatgatagttctagtggcatttttgtaattttctaatggcagttttgcaataatgattcaaagtagtggtaaatttacaattgcctctaaattaattaggatggacattttccaaaaagacttggagatcggtcagggcttaggacaaaccagtgcacaatgtaacagcgacatatcgcgtagaagaacaattcaaacttgagttatttatttatcttttacgatgtttatgacctcgatttcaagtctacgcccccattttgtcaaaaatattactccttcccccctctgaatgggatggttaaaatgcaaatttaatatttaggtcttttttttctccaataagagttggatgaagtttaagatttttgtgacacgattttcaaactgctaaacgtgcgttttgtgcgaaaactttttatatgaaagttgctctaaaatattatattaatttatttttcaagtttgtaataataaaaactcaatcaattatacgttaataccacattgttttgcgtaaaaaaacttaatcctaatcttcatcttcatcttcagataaaagaacgccacctcaataccactgttcatcgtaagataaattcgttttcgttttcgtggacttgaatttcaagtctcctctccgatggcctctctaccatccatgtcttctccactacgtctcccgcgctaacaacctacaaagatcagagatcgcgagcgcgagagctcgaggtcgcagaggaggagagagagagaaggagatcaagaagcacggcaatggcgaggaggttcgccgccgcgctgtgtctcgcggtggccgcggtgagcgtggccgtggcgacggcgaggttcgtggtggagaagaacagcgtgaaggtgctgtcgccgcggtcgctgcgggggcggcacgaggcggcgatcgccaactacggcgtgccggactacggcggcacgctcaccggcgtggtggtgtacccggcggacgcgaggctggccgacgggtgcaggccgttcggcgaggcggcggcgaaggcgctcaggtcgcggtcgcgccgccccgtcgtgctcctcgtcgaccgcggcggctgctacttcgcgctcaagacgtggcacgcgcagctcgccggcgcggcggccgtgctggtggcggacggcgtcgacgagccgctgctcacgatggacagccccgaggaggagacccccgacatggcgttcctcgccaacatcaccgtcccgtcggcgctcgtcaccaagcagttcggcgacgccctccgcgccgccgcctccgccgccgacgacgaggtggtggtgcggctggactggcgcgagtcgatgccgcacccgacgagcgcgtcgagtacgagctctggacgaacagcaacgacgagtgcgggccgcggtgcgacgagcaggcggcgttcgtcggcgcgttccgcggccacgcgcagctgctggagaagcgcggctacgcgctgttcacgccgcactacatcacctggttctgccccgacgcgttcctggagacgacgcagtgcaaggcgcagtgcgtcaaccgcggccgctactgcgcccccgaccccgacggcgacctcgccgccggctactccggccgcgacgtcgtgctcgagaacctcaggcagctctgcgtccaccgcgtcgccaacgcgcgcaacgcctcctggctctggtgggactacgtcgccgactaccacctccgctgctccatgaagggcgaccactacacccgccgctgcgccgacgacgtcgccaagtcgctcggtgagttagccgccgccgcctcgccggcttacccttcttctcgccgccgccgccgccgctgacacagtggagttcatggcgatggacaggtttgccgatggatttgatcgacgagtgcatgggggatcccgacgccgacgtcgagaacgacgtgctcaagacggagcagattgttcaggttcggtgaccaactgaccagcttgatgctgaaaaatgtagtaggattttgaaattttcggtgtactgacgaacaccttcgccattgctgttcttgatgcaggttggacatggcaccagaggggatgtgacgatcttgccgacgctggtgatcaacaatgtgcagtaccggggtaagaacgatcaagatcacactgaattgtggctaagatcattgttcgatcgaagatttggtgtttgtttctctctgaaacagattgtttgctgttgattttacaggcaaattggagagcacttcggttctcaaggcgatttgtgctggattcaaggagtccactgagcctgatgtctgcctgacaccaggtttgcaatcctcaccagctgaaatcacacttgatcaatcacttgatccaagtactaatcattgatcatgaattcatgatatccactaatcatggcagaaatggagactgacgagtgcctgaacaacaatggcggctgctggcgagacgagaagaccaacatcactgcctgcaaggtaccccattcccaaaattctttgaagatcacaagaaattactgtgatacaaatcaattcaagtagataaaacttttattgactcacttgattatttggcaggacactttcaggggaagaatttgccagtgccctgtagttgatggtgttcagtaccaaggagacggctacacccactgcaaaggttgtactagactactgctaatgtttcaccttcaattcagtgttcttcagaggatcatttcatttcagctcatcttgcacctgaacatggctgaatttcctactgatgtttctgctccactgcaatcttttcagcggtcggaccagggcggtgcgcgatgaacaacggtggctgctggaaggggacgagagacggcaagacgttctctgcttgctcggtactatgataaaaacatgccacctctgtgatgatcttctaaaccacattaggtgtgaccaaaaaatgcttgttggcctatccgccgcaaccgaattttgaattctgaaacttaattttatagttggttttggggtttttatcatcgtagtatgcttttaagcatttggcttttaaatcgtgaacaacacaaatatataagttttactcaggaactatttttggttggttcattcatttctaagccgtagctcaaccgatcagacacgggccatggtgtctgtcactgtcacctgctagcttcagactcatctgatgttttgagctgtttgcaaatgcaggattcagacttgagtgggtgcaagtgcccacctgggttcaagggcgacgggctccattgcgaaggtgatgaaatcacttgtcactctcctgcaaatttcttggtcagaattgcatcaggttgtcgtcgtcagatcttgttcttgatccgttcttcgccattgcagacgtcgacgagtgcagcgagaagctggcgtgctcctgccctcactgctctgcaagaacacatggggttcgttcgactgcagctgccatggcaacaacctgatgtacatcaaagctgaagatacctgcattggtaattcttcgtcaatggagatcaatccagcctcgacatcgtcatcttcctcatctcgtcgctcgagattttgagaatgggtttgtgtttttttggttgcattgcagcgaagaacatgtcggcgtttgggtggctggtgacgacgctggtgctgtcctgcctcgccggcgccggcgtcgccggatacgtgttctacaagtacaggctcagggtacgctggatatgatcagacagcgtcatctgaacatttttgtcagaaaatgttcttcttccaaagatcatatccattgctggcgttgttactgattttgctcttgttcttgttcgtgtgcagaggtacatggattcagaggtgatggcgatcatgtcgcagtacatgcctctcgagggccagaacggcgagaggctgccgctgagagaggaggcccaggttgagcatgcttagctaggcaggtactaacaacttcctgtctgaactctgaacagaaattgtggccaagtagttactgaactcatatgtttcagcattatttgtctgtgattatagttccttctctgattctttccatacttgcagttgcagaggttgaacattttggcaatgtccattcgttttgagacgccaagacacatgacagcgacgaatgccgcgatgtacatggcgaagttcagacatcatacttgatgacaggggttcttgcagtttctgcttggtgcttttgtagagaactgaaccagataggttcagagtttctggtagaagaacgggataagtctatgtcaagccggtgcaccgcaaagtgcagactagacaagtatagctgctgtaatgcagatttgttagaatatattgtgaataatagatcaacaatcttcctaataactttgaatcttgaacgcctgatttgtggcatcacttcattaacaactgaatcagttgaacttctaagtggtatctaggacgcacttgcattgcattaccttatacgaatgattatcattctacaataatactactacaacacgatcaaaattttgttacctcgcgatccacacacaacactattctactatccttgaaaacttaacagagccttcgtccacaaggctggtttgctttctcttcttggatagcctctggaaaccactctgttcatcaacaaactgagcagcggtcctcgctcgtagttcttcaagagtctctccttccttagctcgctcgatcacctgaatgcaaccgcaggaaggtcaaaatacaaatttcatcgcattgcactgcagtatatggtaggttagttcgaagaggaaatgtttgatccgttaccaaatgtcgcccgtagagatgagtgctcgcaagtgcttggagagcgttctgcgcctcttgctttgtgacgaattcaacaaatgcgaaacccctgtgactcccaaacttcataggcagtctgaggcttttgatctgaaattatgttccatcgatacacgtaagcacaaacaagagaaaattccttgtgttctcaacctgaaaacataagcattgatcaacctgaaagcagctaactcctttttgtctatcgaagagaacagaaagcatgaacatgataggtgttttactattttcatgatatattgttgcgtgatattaaattttattccacagactactatcctggacacaaaaggacaattacctggccaaatgggctaaataattgccgcaagtccttttcagttgcttcaaatgctacattccgcacgaggagttttgttgaactcttatccttttcatttttcttagtctgaccatcttttctcccatgacacagttgcaagatcaaagcatgtccatccaaaaccgttccctattaacacacacaacatacagcaggctgaacatcaacagagatcatggtgcggaaaagagagaagagaggaaaacgaagggtgggaggggtacctgtagatccttgcagacactggttgcagtttcaactgagtcgaactcaacaaagccaaatcccatcgaaacattcttgccattcttaatgtgcttcttaacctgtagagatatccaacaaagatgtttgagaatgagatctggaaaactccattcaatgcccataagcattgcaaccataccgttgcacttttaagacttccactcttcaattttgtgctgaaatgctgcttcaaggattcatccgatgtcttgaaattcaaattcttgacaaatacagatcgcgactgcaatggacagttgtgtgttactaagatttgtaattatttgggcctaaagcaaatagatgatatttaaaggcttgcacatgcagccacaaaaactcgcaggcaggtgcaaccacaagaaaacacgaaacagcctctagcatcatacagtaaaagcggtccaagtatataaggaacaccgagtgttattcagacatgaacagttgaacacaaatgccaaaatccaacttggacatggccacacgggagtcagtgacagttaagagatggttataataaagatttaagtcaagagaaagttccaaacctccaccctgtcaggatcaatctcttcagcactcactccttccacagtttgctctacaattgctttagtaacaatcctgtcaccaacaacatccttctcatcatcttccacaggtgctgaggtgggagataaaatattttcaggtgcccactccaaatacagtggagtatccctgcagtaaatagtaacaccaacttaggaaatatacatgtgcagatttcacaatcacactaatagctagaattatataacattcacaaaaagtcagaataataaaacataaaaaaaataaaccataaggatgacagggtataattccatagagagcatatcgatctataactagaaagcattacaacacccttagatcaaatagactaaaatacaagcatcaagtatgaatatgcgtctctcatgctactaaaatacaagtatcagatatgaatatgcatctctctctcttgcgacatgcatgccagtgcaaataggatctagctgtatcaacgtcgataatgggttttttctttcagttcctaggcaaactttaacttagattaccaggcacatgcatatgaaaagtcgattaagaatggagaaaacaaactaaagaaaacccctcattcttgaagtaaatatcgatggctgcctaatttatttaaagaaaatatgttaactatcatgcattattctatcttaacagaaaatttactacattgatttatcctaaaagctcaataaaactgtattcaaactagtcattaagagtattagatgtggactagcactattgcagatacttacttgtatcttgtgtacagtaactttttgaaagcatgccgagcttctgtcgcttcaacaaaaactacctgacatacaaactcaaggggtgaaattattcgcaatacaggtaataatgttcacttggtaatttgtagagcaaaagaaatacaaaagtgaaacattccagacagtaatgtaggacactcaaacactcaaaagtgtcatgatataatgaccaatgaccaatgaacaattgaacaaaataagcagaaatagttacataccaaggcaaacactctggttggagggaggatgattttatccaggcttccatgtttgcgaaacattgtggcaagatcttcctcacaagaactatatggcaagttctttaccaatatcacatggttgcttcttttaaacttctcatttcttttggaagcaagctcttccagtgcagcaacattaactccagaccttgataaatatttcttggtctctgcaatgacatgtgtctcaccaagagcaatacgaacagcaaggtcatctgcttctctatcaagtaattcacttttactgattccattcttccttgctatgttttcagcaacctaaatgtgaatgagtttgatcggttagcatgatacacgagagtttgattgttttttttttttcaaaattcagcaaaactatcctaaccctaaaaaggatacaaggaaatatttgaatgcagtatagggtaaaattagtagctaagtacaaaccatgtcaatgaaaaaacgttgaacacaagcaaaatgcagtaaatccacatcaaggtatcaaacattaacatacagtatcttggcgcatataaaagctgttccaagctctcgtatccccactgatttcagaagctttcctctgatccaacttttgttgtttgagactcattttcttctcttcgtaactagatctgaaaattttaaaacaaattttaattattgaataattaattgaagagaagaatggccacaagggaaacttcttttcttactcaatctttttattatttagtggcttagcagccttaacacgcaaaagtcgcccctgaaaacttgagttgtccaattcaagtgccctacaaggcaaaaaaatattagccaagccaaacacataagaatcaaggatagtctcaatattttgtgatacttttttgttctattcaatcatttaaattatgttctgattcctgaagtttgcagaagtgtatttttttttgtgagctaaatcagtgttacactgttccagatttagtccatcacaattaagcattggattataaatgccaacggtttgaggcaaatacaagacattgttaacctcttttttccttctaatttcattccttcctaataattctgtacaaccaagtacatagagggctagcagaatacagggtgtgagtataaactgctactgaacaatatgcgtctcatttataagagtggccaacagtaatggattaaattatcagcagtaagctaaacaacaataagttcatctacatttgaaatcataaacttgctgaccaaatttacctgactgctgagtctggaaggctaaagagcacataacctcttccagttgatagctttgtggttttatcaacgacaatacgtgcttgatcaacatcaccatattggctacacagctccactaaatcaccttcactgaaatcatacacaaaaatactcttttaagaataatcaggcagccatagcttcgattattccatatgacacacaaacactgatctcagaaaggacaagcaataacatacgtagttgcatatggaagattgcagaaaaataaacggccagtctccagtgccaacttcttctcgtcagtaattaaagcagcttcttcatcttccttttcttgattgtcatcttcttttagttggctgtcaagattttcaacctctttgttgtcagagtttcccgcctcttgcacagtagagccttccagagtcatttccttatctacattttttttcaagttcagactatccttctgatgagctatttcatccttttcatctgcatcgtgtgattcatcagatgagtcttcatcatcagtgctgtggtccgattgatcaccagaatcttcgctatcagattctgaatctgaccaatttttcttgattttactcttaaagaagtccatatctgtcatatctttgccttgtttactttctatttttagctcttctgaagcctcttctgaggaggaatcatcagattctgactgatcattcgccatttcctcatcagaagaatctccagaagatgagtcattctcagaaactggaacattcttctgaggtttctcaggcttttcactaactaccatgctatccttggcagaagcatcaagggtacccatcgtatcattagcccacatctttgcttttgagcggggctgcataacctcaagaaactcttggaacttgggatcactagcggcactgcctttagaacctcccacatcatcagatactttttggcccttggaacttttgagtggtgcactaacatctccagtcttagtcttgtctttgctattatattcaggcttctttaaagaatgacggctccaagggcgaggagcttcaggatcaccaatcttacgagcaacctgacacacaccggaggaactgttaagtctgtaaggtaaggaaatgcttatttccttacattaacccaccatagtcatattcaatcttctataggcaattcatcaagtggatagcagtccaatgagggaaaaaactaaaaatagttgaggaatacgggaagtacctcgcaggtgatcttacaagtgtcgatgtatgtgttgttgaaatacttgagtgcttcctctgcctcctcgttagttctgaaaccaacgaatgcaaattgcctgctctttccatccctacccaaaagaaagacatcaaactttatgccttgctcgcactacatctataaccactgaaaatattttattcaagcagcagcacatgttgcatgtgttaatggtgtaaatcaggtacatcctatcttcgaaagcctagcatcatagccagaggtgacaaccaaactcgaggtttcctgacctaaagggccaaactttttcgagatcaaggtccaattttgaaatccaacccacaactgaacagaacaatgcaggatagtgagactttgattctcttgcccatcatcgcaaaaaaaaaaaaaaaaaaaaaagagcacaatcttttgtataaactagcaaatgctcatcctatcgttatgtaggaatatatacatccagcaaaaagaacaaaaagaagcatttattttgctggtcctctgcagttacacgaaccactaagacagccaccaagctgccatggaagcagtagcagcaacgacctaagcctctaaacgagcagcttcctctcgattattacttacttggtgcggatgaccttggcgtcggtgacctcccccttccgcgagaacacctcccgcagccgcccctcgtcggcgcccttgggcaggttcttcacgcacagccgcgacgacctgcaccaccacaaccacaaccacaaccgccgccaaatcagccaccgagaaaacaaaaacagcaagacacgcagcagtggactcaatagagaggattcccccacatgccgatgccggcgaagtcccccccccccccggcttctgcggcggcggcgaggtcggaggaagaagaagtgcagaggcggcggcgctcgaagcctcccaaactccgcaaacaagggttgctcttgcgcttgcgcgacgatgaggatactgggctcccgacagtaaatgggacgtacatgggctggatcagccagccaatgggcctcgtcgcggccggcgagaggagaaattttctcatttttagttttatttaatttcaaaaattgtttttattttgaagtattacatatctcttctttgtataaaggtaatgtccactaaatgcctaaagctcgacatgcaagcatgtcacatcaacacattaagcatacaaagctcaacatacgagcatatagtaattatatctacaatttattttattctaaaactaaacatgcacatgctaaatcatcagtctcaaataatttttataatatttcaatctaaatcatttcagcatttctccattatctaacatatatcctgcagcaaagcgcgaggcatatttgagcactctttgcgagagatattttaaaaaacacccttcaaagaattttttttaatggcgtggcacacagcaattagtgtatgctaactatctcacggagcatcccacattctacaagcgatcccttgcaactttctaaaatctctaggagtgtgataagggggtcacatgtaaaatagcattacatgttagaaaattgattcactggtgccattagtgtcataatacagtaatattgcttaactcctagtgttatgtttgttgcctaaacaatataaccatggatttcacatgaggttgtcggggttggggcttttaactatttgccactcttacgagtggtgcttaacgatttgccactaggcccacatgtcatagacacgtaaaggcccacatgtcattaatagggtgtagtaaatcgttaattgccatgtcagaagagtggcaaatagttaaatatcccgtcggggttagctgacctagcgattgtgttgtagctccaccactacaagcggtccctttggaagccctctacggcaaggggccattttgcaggcaccttcttacactcttatgtaaggacataaagggggccacctgcagtagccggtccttcttcgttaagctgttaggggtatagattttgtcggtgatatgggaccggggatacgcacagtagagggaagtcaccttcccatctggccacgtggccgcacggcctggccttcccccgccccctcggggggtgatcaggtaacactgaggtggccagggggcctcggggtgccatgtcacgcccctcgggccctcagcgcgtgctgccctgaggcccccagccggccatcacgtggcggggagagtgggcggagcaagagcgccgctcaccgctttcaatgcgcggcgccccaaccgtcccatgctgcatttaatgcggtgtgggcgggcgtgcagcaccacccgattgacccatgtcaatcgggcttgaccggtctgtgaccggtcacaggcgattggactggtggcaatgcccccacgtcccgcccagtgtcaggcggagtgggggcaagtatgccccgtcccatcggcacattgccgagagcgccccccctccccggcgcatggtgagcccgccaaagactccatacatttaaaagagaatgacaggagtgtcccccgtgtcaggcggaggacggcgttgagccccacctagagacgcacaaccaccttgcttccggttgaaggcacggatggcggtctgatccaggttaggtgggtccccctcccatggaggggtacgcatagacggtgcatgtggtatcccttgaactataaaaggaggacctcgcccaccgagaaatgggacgactctcaatagcttgagccctaaaggaagaacagttaggtttccccaggagctcaagacctcttgcaagaactcatcataatcccacgcataggagtagggtgttccgcttcccagcggcccgtacctgtatgatcccttgtcttccacacagactcgtgagcgatctagtagttagaccacaagcggaagtgcgctcttgaacatcgcgccatatcccctggccgaactcacaaaggggggtctcacgaccacccgctagagaggataactcctcgacagatttgtaatactttaaaaataaaaattatttgtgaaaatattttaataaatgaaattaaaaataaaaaactagatgaaaacgaagcggatatggacggataatgctcataccatattcgttttcatattctttaccggatacaaaaacgaatacgaaaaataatacggattatctcgaatatgaataacaatcgaatatgatcagacacggatatggaaacaaatttttctcggaacatgaaaaccaagtcaagttctaatagaaacaaatatcaacatatatattagctcattttatataaaatgaattataatttataaatatctttttaaaatttaaataatagtatggactagtgataagagataaactactattaaaatctataaaggtatattgaaggtcatagagttagaaagaaatgagctatgtctcatggcttctgcagatatccaagggacatttaacttcttgccacttttaagatgtgtcaattaattatttgccactcgttgtctatgacatgtgggtccagtggcaaataatttagcaccactcgtaagagtggcaaatagttaattattcctatcccgaatagaactgatcaccggatatccgaattattgtccatattcgacgaaaaccccgataccatatccatatttgtatccgaatccgagctatccgatccaaaatgtatccgtatccgtttttgttcggagcggacggaaactatccgctccatttttatccctaccccatgcgttgctgcagaagttttgtacgatattagtagaaacaatatgtatgatagttgcactttgtatagttttcatttctgatcgactattgagaaaaagctaaaaacaataagataatgtggtatataataatttaaatcatatatggattgatcgttaaaagataaaattaaggtgatcttgctctatcagaaaagaaaaggaaataataaccatccaaacacgaaacggaagtgatatgattttataacagaatagaaagataaagatgataaatataattaagatgatgtgatctataaccagattagagagaaatagcattaagaagaaggaggggaggtggggtaacgacgccgcccggcaccgcgctcacgggcgccgtcgccgtcctcgacagcggcggggggcgagcacgaggtactcgaggcgagaccacgcgagaagccccactcggtgccccgggaaatggctgcaagcaagcaagcaaaagcatcaccaacccaggcgacgaccggcggcgagccggagaccacaagcgcccccgcgctaagcacgccaaactcgtgcggggaattctgatgagcagtcacaaattctgataagaacgtggagagcgcgaacaggtgactgctcaggatttgttctgatatgtcaaaaggagatgctcttatcatcaaacagtgccttgaggtataatgaactcctataataattgttcccttctaaaaaaaacactcctataattgtatgtagatcattttgtttttgacatgtgacaggttatattggataaaagagttaacggtggttcaaagtaccacataccctccgtactcgtaaaggaagtcgtttaggacaatgtttaagtcaaaccttggaaatataaatcatgaataacttttaagttgttgagtttgaaaatgtaaaaattatatgaatagatttgtcttaaaaaatacttttataaaagtatacatatatcacttttcaataaatatttttatagaaacaagaagtcaaagttgtgttttggagaccgtgtcgctatcctaaacgacttcctttatgagtatggagggagtaggtaagatcatctggtctaaaatgaaaagattggttaaaagatgttagattaatgggctaagcctaattaaatcctaataaatttcattgcccacattaagtgttatgggtaataataccaccttgaaaatataagtgaagaggtctcaatttaaaaacggagctagtagagagtctctgttgattggttgactctctctcccgttttgtaacggatggtagaattgattctgtattgacgagcgcgtcaaaattaaacactgagaattgcttccgtattaacgagcgcgtcaaaatttaataccttcagatattaggtatctcgaggtgtcaaaattttttagtataaaatttatgtccctcaagatattttcttaagtaccataaaatttcttgatatatgcatttttacagaactacaaattaatgctagaaaatgtaatatctttcagtatcttttttataacagtagaaactctgattttctttcatcctttaggctaaaaagacgattgaaaaaattattaagccagagaagtagtaactgtacgatgatttttctatgtgagataccatactgatgtcttcgcggtagtaatacagcatgacatctcctagcatctaaaaaaagtatgtgaaatggacattcttctagtagcccccagatcttgtagacaaccccgtactgtacgaaacagaggtttttctcctgtacatgtgtcccatgccaacaacaggaaacttgtcgaatcctaggctttcctctgttgcttggttgcattgcatgcttctataaataaactgcatcaccacctttgtccatcacacacagcttcggctgaatcactaacgaggccattatcatcatccatggcgttggaagccagggccgtgcagatatctatcccaaccgatgcttgctgcttctccggcggcaagtcctcccacagaatgtcaccggcgacccagttggtcagagccccgcagcatgccgtcgctacaggtacagatgattgtttacagagataaattcagtctaacatattacaaagttgttaaaagatgtagtagcttaaaacaagttatatttaagtaatgctgatgtagaaagtttctgaaaaaaaatcgtacttatggaagagtgccacaaataatccgtacataatccttcagccgtatagcaactcgtttcactattattggtgaacgatgacacctatcttgttcttattatactccctccgtttcaaaatgtttgacatcgttgactttttaacacatgtttcactgttcgttttattaaaaaaaattgtgaaatatataaaactatatgtgtacataaaagtatatttaacaatgaatcaaatgatatgaaaagaataaataattacttaaattttttaaataagatgaatggtcaaacacgtatttaaaaagtcaacggtgtcaaacattttaaaagggagggagtaattcctctttatttatttttctttctaccaacagcatacgctgagaagagtttggaggcaggaggaaatgcagcaagcttgccaaacaacatggtatgagtttccctggtgatcttttgatctcttattttcttcccctgttatgtctgaaactctgaatatgacaagatcaggctcatgtttcagttagaattagtgaacgtcgtcatgcaccagaggaaagcaatagaggatacaatgaggaagaagaagaagcagcagcttcacaaattcgagatgttgccgtctccctacgacacggcatgggtggccatggtgcctctgcccggatcatcatctcagcttccatgcttcccacaatgcgttgagtggatactacagaaccagcagagcaatggttcttgggacctcaaccagctggactcaatcaccaaggatgctctcttgtccacactggcttgtgttcttgcactcaggagaggtaacaaccatatatatgcaattttttatatatcttttttttaagataatggaaatcatcttggtctttccttcaaagaagctatagccgactactgcaaagtttgcagattgaacgactgcgagtgacaattctttttatgcgcgtaccttttttttaagataaagttgtgtatttttacctgcaagttcttttgtttagtactccctccatcctaaaatataaacatttttagcatagtgccaagttaactatttttaactttaaccattaatagcaaaaaaaaatcaatcatgtaaaattgatgttattaaatttatcattaatcaaaatattataatatgtaactctttttatttaaaacattttatttttatagatattgttagtcaaagtagtatctcgaagactgtgtcgaagtccaaaaaatgtttatattttgggatggagagagtatcttaatttggttgttatgatcaagttttggaaatgtttgacaaaaggtggtgatgataacaggactgctttttattggaaggaatttctccattgctatggatgagcagctggctgctcctattggattcaatataacttttcctggtatgcttagctctgtaattgagatgggtttggaggttcctattggacaaaccgacgtcgaaagagtacttcatctccaggaaacggaattgaaaaggtccacaaaattatattttattttgtcattttggattttggtgcacatattgtagcacttttcttgttgtaggctgtttccttttccagtaatcataatatttagggaagtgggccatattaccattattgtctatttgtgactatgatgagtttggaatttcttatatctgacaaaacgatatccacgggatacttcatctccgagaaataaatgccacaacaatttgtgttttattttggcatttctttctttttcctgaatgagattggcaatttttatcctcatgatctaaactaaatacagtagtcttcttcttgtaaatagtcccctttcataaccataattgttagtaaaatgggccaccttatttcaccaaactagtctagaaattccaaactttgaaatttttaatagcatctctaagtaactgactgaaattcctattttgatttaaagagaatatgaggagaactatcgtgggagaaacacatatatggcatatgtgtcagaaggattagggaatgcccaagactggaatgaagttatgaatttccagaggaagaacggatcattgttcaactccctttccataacagctgcggtgttagtccataattatgatgctaaagctcaccgatacttaaatttgcttctgaacaaatttggcactgcaggttggttttaacacttctccattccaagttgccaagaatttcttcctaaagtgcatactattagtaactaatgccattttttttattttttcatttatgtttgaaaccgagtgcagtgtatacgaaaaatatacatcgccaactttccatgcttgatgcgcttgaaaatatgggaatatctcggcattttgatggtgagatcaagagtatactggacatgacatacaggtatcagcccaagtaaccttgagtaaggatcagttgtctgcttttttttttcttagctcatgcaattgacaacagccagtttgcagttgttggttacagagagatgaggaagttatgctggacatcacaacatgtgcaatggcatttcgtattcttcggatgaatggatatgatgtttcttctggtatttttctaattctggatttttttcctcgttaaccgtgtttaatcttaggttatcttcgatcgttttgacacaattattttactctattttaattattattattattttactctagttgacacaatgatccatatgaaaattttggtgcagatgacctgtgtcatatcgctgaagtttctgatttccatagttcgcatcaaggatatttgagtgacacaagaacattactagaactatacaaggcttcagaagtcagtgttgcagataatgagtttattctagatagaataggctcttggtcaggtcggttactgaaggaacagcttagctctggtgcgttgcaaagaacttcatcaatatttgaagaggtagtttcaagaacataaatactcctttgatattgtgtgattgtgtctacaagagctaagttcttcttacatgtttttgataccatgattttgtatttgaaggtggaacatgctcttgactgtccgttctacgcaacattggatcgtctagtccataaaaggaacatcgaacattttgccgcgatgagctatatatcatatgctcaaaacaacatacctgtaagcttcctgtttcacaaaaaggtaatctagtgtactttagtacaacattcttaaatgtattgctgaaacaggccttgtcaaaccgctcaagatcttgtagctttgggtgccagaaatttcagtactactcaatctatttaccaggatgaacttgagcgtatagacaggtaaatatgacagttactctctcttttcatgtacaattgtacaaaccagtaacattcagcttatttctgcaaatttcaaattttgatgcaacagttgggtgaaagagaacagacttcatgagctgaagtttgcacggcagaaatctgcttatttctatctctctgctgctggaacggtttttgatccagaaatgtctgatgctcgcatttggtgggctataaacggggtgcttacaactgtcgtcgacgatttctttgacgttggaggatcaagagaagaattggaaaacctcatttcactagtagagatgtacaatcctttacatccatgattttagcttactttttaaataccattttcttaggcttaattcaatttttgcccattttgccaatggttgtcacaggtgggatgagcatcacaaagaggagctctactctgaacaagtagagattgtattttttgccatcttcaattcagttaatcagcttggagcaaaggtttctgctgtacaaggccgtgatgtgaccaaacacctaatagaaatagtaagtttttgtctgcaatttcttttgccaaaatcttcagtttgtagtatttatgacaaggtaaactatcaccaaacagctactcctttgctgaaaagaaaatttcagttttgggtgttagagcaattcaaatttcttctgcagtggctagatttgcttaggtccatgatgaccgaggtagaatggaggatcagcaactacgtgcctacaccagaggagtacatggaaaatgcggccatgacatttgcattgggcccaattgtgctcccagctttgtatcttgtcggaccaaagatccctgaatctgtcgtcagagattcagagtacaacgagttgttcagactgatgagcacatgtggtcgtctcctgaatgatgttcagacatacgaggtatatgcaacgatctgccattactcccaacacaaaaagatcaacaacatacataagcaaccatttaactatatgattatgacccagtatttacgactgtttgggaagcttttagctgttatggcttcttttagaatctctccagctccctaaacattccaaataaaatcgataaaataaactactctattcgtttcaaattataagatgtcttagactttggtcaatgtcaaactgcttcaagtttaactaagtttatagacaaatatagtaatatttatattaccaaattagttttattaaattaataattatatatatatatatatatatatatatatatatatatatatatatatatatatatatatatatatataaaataaatttatcttggtaaaaaatatacctattttttataaacttagtcaaacttaaaatagtttaactttagccaaagtcaaaacatcttataaatgtttatcagaatcttaagctcctacaaacataaagcttactaattggtactcacaattgatcttgttctaattggcactcacaattgatcttgttctttcgctgctgatgcagagggaggatggcgagggcaaggtgaacagtgtgtcgctgcttgtcattcagagcggcggttcagtgtccatcgaagaggctagaagagagatcatgaagccgatcgagagatgcaggagagagctgctggggctggtgctcaggagaggcagcgccgtccccgggccgtgcaaggagctgttctggaagatgtgcaaggtctgctatttcttctactcccgtggcgacggcttcagctcgccgacggcgaagtccgccgccgtggacgcggtgatccgcgacccactcgatctcgccgccgtcgtcgcaagccaagaacccatatatatcattcctgcttcgtgactcgtgaggaaattgaactagagatgtgatcgtggatgaagaaactgtgaacgtgttggagattgaacacgggaccttagggttgaaaccacgtacccctttctactgcactatcaagtgcatctcctgctctttcttttatgagataacggaaatattttaagtctccgtacgcatgtagtcattagttagttaattctgtttggacgcctagtgcccgcagcgtgaggataagctcgcagcgtgcggatcgtggggatggaagcggatcaaaccgcggcgtgggtgatcaaaccggggaaacgctttctatcttgcgtgttccagcatgttccacttcgcacaactataaatggagaggagaaaaccccgaaaggtttgcatcacaaatcctctcgtgttctcattgttcttcctcttgagttgagtgtccgtgttctagctcaggttctcaccgatcatttgtccagggaaacctgacaaatggtaccaaagtgggattcaaggcttggactcgataacatgtacttgagagcgtgttaatgcctcatgggtacacatactcgccatgctagcggtcctcgtcaccgatcgggcgttctcctagaggctccggcagccgcccctcgggtaacagctagagtgcccataggcagatgggctagctatacaccacgtggtcaaggaggcgagaggctctccaattatctgttactagcaaagtcggactacaatgatgtctttgttgatgaagatcaagctacaaagcgtgttgcatgtagggtatcatcgagttgggccgcatcgagctccacgagatgtgatggcgtcggatgccatctacagcgtcgtcccaccaaagatgat

SEQ ID NO: 9350 - DNA, 12947 bp, Oryza sativa
tagtaatagtatgaaccaatgtgacagtgtgctgattattattattattattattatatctgaaacctgatgctctgtgtccctgattgaattaattattgtgatgaaatgcagcacaggaaggagctccaggcaaggacaagggaccagctccagacattggagttatctacgtctttgtacgacacggcgtgggtggccatggtgccactgcggggttcccgtcagcatccgtgtttcccacaatgcgtggagtggatattacaaaaccagcaggatgatggatcttggggtacaagaggattcggcgtggcggtcacaagagatgttctgtcgtctacgttggcgtgtgttcttgcactcaagagatggaatgttgggcaggagcacatcaggagaggtacaaacgactgtgcatttacctgtcgatgtttgttttaattgactctgtatgtatctacacatttaaggcttggaatgtcttaacgctatgaaaatggtactgtcaggactagattttattggaaggaatttctccattgccatggatgagcagattgctgctcctgttggtttcaacatcacttttcctggtatgcttagccttgccatggggatggatttagaattccctgtcagacagacggatgttgatagacttcttcacctccgggagatagaactggaaaggtctgttaattctaacacgaacatggatattgtatgtcattagtatttgtattactgttgttacgagtatgtaaagttagtatgcaagggttgattgtgtggatgaagttttaccatcaggcgttctaaaaataactgtcagcttagttttattccctagttccccctgcattctttttgaaggaaggaatataatgaccttctcctctctttttttccaagatcctatatttggaggaaatgatcaatctcggttttaatagtgcctatgagtaacgcactgaaaatctgatatgattaaatgcagagaggctggagaccattcttatggaagaaaggcatatatggcttatgtcacagaaggattaggaaacctgttggagtgggatgagattatgatgttccagaggaagaatggatcatttttcaactgtccttccacaactgctgccacattagtcaaccactataacgataaagccctccagtacttaaattgtctggttagtaaatttggcagtgcaggtgagtctgcacgcattttcttgtcaagaactttctacagtgtagactgctcctaaatacatagtaatacatttggtccattgcagtaccaacagtgtatccactaaacatatattgtcagctttcatgggtggatgcacttgaaaagatgggaatttctcagtattttgtcagtgagataaagagcatcctagacacaacatacgtgtaatgactttgagtaagtattttatctatctttaatagttcaaacttaattttagctagtttgcagttcatggttagaaagagatgaggaaattatgctggacataacaacatgtgcaatggcttttcgcctgttaaggatgaatgggtatcatgtttcctcaggtgtgttctaaggcttgaaaggaatattttttttgttggtttcgaactatattctacctttggttttcatttaacatgctgaattattttttatttaacatgctaatttaaatgcggtgcagtcgagttatctcctgttgctgaagcttccagtttccgtgaatcacttcaaggatatttaaatgataagaaatctctaatcgaattatacaaggcttcaaaagtcagtaaatcagaaaatgaatcaatcttagatagcataggctcttggtcaggtagcttattgaaggaaagtgtgtgctctaatggggtgaaaaaagctccaatctttgaagaggtgcttgcatgaagttttgaatttccatttcattcggaagttcattttgtgtttaagtatatgccttttgtgatttcagatgaagtatgctcttaagtttcccttctacaccacactggaccgtctagatcacaagaggaacattgaacgttttgatgcaaaggattcccagatgttaaagacggaatacttgtaaggttttcattgaaaaggtctgccaatctgagtaatatatatgttaggcaccaattccactatgttgtttactcaggcttcctcatgccaatcaagatattctagctttggctgttgaagatttcagtagttctcaatctatataccaggatgaacttaattatcttgagtggtaggtaatccagcctgctgtcaatctgtcatgttatgctcctttattgtactaccttggataaattgcaaaattttgtttgcgacagttgggtgaaagatgaaaagctcgatcagctgccatttgcacgccagaagttgacatattgctacctttctgctgctgctaccatattcccccgtgaattgtctgaagcccgcattgcatgggctaaaaatggtgtactgacaactgttgttgatgacttctttgatcttgggggatcaaaagaagaactagaaaacctcattgctttagttgagaagtacgtacaatcctaattcattctattcgatctatttgtctggtcttttgtaagtggcgctggttatgcacagctaattcatcttctctgatttgcaaatggctgtctaggtgggatggacatcaagaggagttctactcagaacaagtaagaatagttttttctgctatttatactacagtgaaccagcttggagcaaaggcttctgcattacaaggccgtgatgttacaaaacacctaacagaaatagtgagtcccatctcatggttgatctattgattctgtggtgaatattgctctgttgcatagtgtttagtgataagctcaaactcatctgcagtggttatgtctgatgaggtctatgatgaccgaagctgaatggcagaggacaaaatatgtgccgacaatggaagaatatatggcaaatgctgttgtctcatttgcactgggacctattgtgctcccgactctgtatttcgtaggaccgaagctccaagaggatgtcgtcagggatcatgagtacaatgaattatttagactgatgagcacttgtgggcgtctcctgaatgacagccaaggctttgaggtacccggatccctttctgtgacaaacctccttgtattctcatatttctacaagatttagcatgtaaataaaattttcggttttacttgatgttatatgattgcagctatctcattctctgcccacaaatttgttgactaatctgtataaatgtgatactaattatgaacacttttatttttctgttgaaggattaggacgtggctacagttcgacccaactacccaaagcttgcaaacttattctaacaaataatttctctattgctgcagagggagagcctggagggaaagctgaacagtgtctcactgcttgttcatcacagtggtggttctatctccatagacgaggctaaaatgaaagcccagaaatccatagacacttccaggaggaacttgttaagattggtccttggagaacagggtgctgttcctaggccatgcaagcagctgttctggaagatgtgcaagattgttcacatgttctactctcggactgatgggtttagctcgccgaaggaaatggttagtgcagtgaatgcagtcgtcaaggagccacttaaactcaaagtgagtgatccatatggctctattttgtcgggcaattgagtgcttctccgttctgttttatcagggatatcagcaacgagctttatacaggttgatatttcttttctttttctttacgataagggtttaaatcctagtacccacgattatagctgctgtgtgctttaagtataataaattttacactcttaccatttttttttaatgtaaatgttggtatatattggtacctgacataatcagaagcaccaaattatacactccttttgtcccagaatataaaaatcgtctagatttgtagtactagaaaatgtctcatccaataattcttaactaccgtcaaatacatttttttaaaaaaataaaattactctttctgataattttgtgatcacgtggcgtgcatgctatttcacaaattttcttctacggtattttacaattgaaaagattgcttgctacattcagccccatctacgtgctaataccaatcttgcacgagataatgatgtatgtgatggttggcatgacttttttcattgttttttttaaaagtacattaatttggcagtagtttggactctagactgtagacagccttattgcaacctatagactatagttttataatgcattggcacatgcaaaaccgagtactccctccgtagtcgtaaaggaagtcgtttatgacagcgacacggtctccaaaacacaactttgacttcttttttctataaaaatatttattgaaaagtgatatatgtatatttttatgaaagtatttttcaagataaatctattcatataatttttatattttcaaactcaacaactttcaacaacttgagagttattcatgatttatatttccaaggtttgacttaaacattgtactaaacgacttcttttatgagtacggagagagtatatatttctctattgctttaaatgcgaagtccgccaccatcgtactttcccacacacaaaaaaacagtcttgaaaaaccaccttacccaataggtatacccacgttaaactaaaccccataaattcatttatctatgtttctttatatcccgctgcaacacacggatatatcactatagcattagttaatagaagaaaaactgaagtgagctgaaacaaaacatccttgtctactccactatgtccctttttgtaataaataaaacgaaatggcagcgcgaatgctgaacaaacgacgtcttatgtgcgcctgatgagtgacatgctatttttagtagtttagtatatatgatcacgctataaacgagtagtccacatgcacaatggactgaatctcaccgacgtggataagacttgatgtgttttggaaaatactccatataaaagtaacatatgaatgcattcccttagtgggaagaatatagtacttattatattattattaggaaaggaaaaaaaagcactttgatgtgcaacaagctaattaagtgcaagtgttaggtggtgtttggatctttgatgtgcaacaagctaattaagtgcaagtgttaggtggtgtttggatctttgatgtgcaacaagctaagtaagtgcaagtgttaggtggtgtttggatctagggattaaactttagtgcttgtaacaaaatgagtaaaaaagttgatcagatttgaggggaaaaaaaagaacataatgagatgtcctcttgtaacggtcaactagagacaacggacaacggacataactcacagaacaacatacattttgtgtttgccagtagtaactatagagaggaggatgtatctcactagctacccaaaaaaaaacatccctgcctgcacatcacatcactgttggttcggtgtgaatcggcaacgatactctatatatcattgttggttcactttaatttactgtttaaaccagagtaaacaatatcggctgtgtttagattcaaaatttggatctaaacttcagtcattttccatcacatcaatctgtcatacacacacaacttttcaatcacatcatctccaatttcaaccaaaatgcaaactttgcgctgaactaaacacaaccatcggttcggttgaggcctagaacaggtagagatacatcattcctggttcataagaaaaacgtgtattcatactcaacgggttagattatttttgagaattacacagtacaacgcagacacttacaatgtacgcacactcacccctacgaacgcacgcatgtaaactctacccctatgagcatattcgaagactgggccggcaaatcctagagattgacgaagtcaccacaggcgtctcactgtcgacgggtacgtcgcctagactaggtgcgaactactgtccagagaatatcgagccggcaggtattggtactcaaattatagtttttcaagaaaaataataaaatttttcatatgaagtctgatgaaaacaaactttacagagatgcacttaatagtgcagtggcaaggggtgtgtggtttcaactcaaaggtcccatgtttaatcctcaacacgcttataatttcttcttaaaaaagtttggagggtcgtctctccctcgcaacacgctcatgatttcttcttaaaaatgtttggagggacatatctccctccaaatcttgttttttaaacaaactttatatcgaaattatagagtttggcgatgataaatacacgttatagaacttaagttctctaatctacttcgattttttttttagtttttcaaacaacttcaaatgcatggagacaaactccatatgaaaattttagatcttcacgagattcgcaacttcttagttgataaccttttcatttaaaatcatttacatagcttaatatgttttcaagacaggaaaagtcaaaagaaaatattatgcaatatcaaatagctagcattcgttattctaccttccgtcaaaacatgtgcgcgcttttgatactgttgagttgggtatcatggagagcagatccatacgatcatatatttaattgttcaatcacatcaccaaaagaaacaggttttcaatatatattgaagtactataaatcatgctatatatacccctcttcccctccacaatacaattcaattccctcctaggtttgttatgatccatttgacacacgaacacacacatacactacactctccctagctatctttttccaaattctgatcacagatcaattactcttgatcgcccatttattacttcttcattttaaaccctcttttcgtttaattaacgtggcaaggagtgatatatacgatgctgccgtgcttgttcccggcgtatggtagcgtcgtagcctgcaaaccttccgcgatcgatcggtcgccttttggattgttgtcccagcccaaacaaactaataggactcttattcgtcgtcctaaggttactaaaggtacattatgttcatcattttatgcttactgtaaatatacagatgtgtaaggccggccatatattaatttcattatgtaatataaaagatacatatttatttatttattagtacaataaggtagttttttttaattccatatatattttctataaactttactaatggtcaggactgcctaccaaagaaagacgtgggcccaaaagataacttactgtacttcattttcatttaagagcaatacaaatccatgttaattctaccgatcgagataaaatttcgaaagaaaatttgtgtaaatattaacatccgtagaaggactggttgcatttgggattttctttcggatcgatacgaggacaatgccgctaataaatacctaatatatataagttgcatatataattgcattgtttgaaccatgttccacataaatatttcaacgatttatatcacatatcttccaaattacagcattcatggcgatcgaggccatgcggcactgcagcagcagcagcagcagcgaggaaggaggagcggcggcgacgacggcggccagatcagcagtacgggagcgcctccaattagcgccgccgtcgccgtcgccgtcgccgtacgacacggcgtgggtggccatggtgccggccctccgccgtggcggcggcggcccgcggttcccgcagtgcgtcgcgtggatccagcggaaccagcggggcgacgggtcatggcgccacgcggcggcggcgcaccagcagctcggctcctcgccggagatcgtcaccgagcgcgacctctcgtccaccctcgcctgcgtcctcgcgctcgcgcgatgggacgccggcagtgagcacgtcaggagaggtatagtagtagctcgttgaattctcagtcatctgatcgaccaatctctgatcagatctatcgatgatcgcaaatgatcagtgactgattgagctgctgctgggatcgcatatactcccttcatcccataaaaaataaatctaagaccgattcgtagtattaggatgtgtcgcatctgatactaggttgtttttttatgggacggagggagtacacatgtattgatgctcggttaaaatggagaatggattcttagagcctgtttgaagctgaagctcaaccaaacagtttcagcttcacctaaaataggagcgaagctaggtagagcactctcataaaatgctgattttagctaggctactccacaaccacactctagacctaactcctaaaggtaaattttagaagttggaaactctaccaaacagacccataattcatgagcggatgtctcctatgtcctatctttgtttttttttcacatcatctaaatatgtataatttttttataggatagattaatatgtgtgatatatcactccgcaagcatattaacctagctatatcttatcaaatttagataacatacatagtttgctggtaaatgcagggctgcagtttatcgggaggaacatgtcggtcgccatggacgatcagacggctgctccggcgtctggttccgtcgtcagtttcgcagcgatgctccggatggcgatggagatgggtttggaggttcctgccgtcagccaagctgacgtccgcgacaggttaattgatttgcatgtgaaagaacagcatttcgttcccgcgttactgtttgtatttttcagggtaacgtacggtacggtcgagcttcagaaacaagttgattaaattgtttaatttgctacctatcgaagatggattctgattcttgattggagagggtgtcacacatattacacgtttttactgttttcaaattcaatttaaaaagcgaattgagcatctctctctaatcagctcctaagctaagttcatcgttatgtgggggtgagtaagtgtttggtgatgtgagggtgagtatacgcaaggcgcctgcgtttatattttgtgtttcgagaaaaaaatatcaatttaaaaagttaaactgcgttgtatacgagcgcttacaatatttgtactttgtattttgagaaaaaaaatcaatttaaaggttaaaaattttataatataattaagcacgacatacacatatgacccgttagaataattaaatcaacttgaatttgtattttagtgatccatgcatattgtgagttgtgaggaatatcctcactagtgaagaaaaaacactttcggtacactggcaagctcctgcatttttcgttgggctggtctggctctagatgttcttgaagaagaaaccgtgttatttattttttttattactctctctaactaccaatatttggtgtttagggcgagataccatcgaactaattctatattaaattaagtttatggaatctaataaacttgtgtgttactacttttcaaagcaaacattatttgagaaattgttttagttaaagtttttaaattttttaaactactagtaagtcttattataaatgttatttttttatgatgggagggaatacttatttatctccttcaacttcatgagtcaggacaaggatctcaacagattaatttacacgtgagagaactacatttcggtccccatttttttaattttctggtacgatgtatggagcttgctagctaccttccaaagatgggctctaatacttcgagaagacgtccttttaaacacttttattttccaaatgcagtaaaaaggctataataaactatgataatataggtgtgtatgctatatatgttctgtgacagtgacatccaccagctcatgcatgctctgggggaaaaaatacattgacgacatggtagactatttattaatatcaagattaaaaaaagtagccgtcaaagtcacatttcccaaattaattaagaggtcaaaaaccatatagagaaaaggaaaacgcagtagtttgagaaaggggagataaagaagattgggaagatacgcaaaacaaggtgagccattagcgtatgattaattgagtattaactattttaaattttaaaaatggactaatatgattttttaaagcaactttcctataattttttttgaaaaaaacacaccgtttattagtttgggaagcgtgcgcgcggaaaacgagtcacaatcttcccaatctcctttgaaagaacgcagccgtcaagtcgcatcttcgaaattaattaagaggtcaaaatcatctacagaaaaagaaaactactataagtactccttccactttatattgctttgattttttttttctaaatcattactccatccgttctattttaagtgcagtcgtgtatttctgtgttcaacatttgatcatctgtcttatttgaaatgtttttatgattaatatttttattgttattagatgataaaatataattagtactttatgcgcgactttttttttagttttttcatagtttttttaaataagatagacgatgaaacgttggacacagaaacccacaactacacttaaaatagaacgagggagtattttaaattttgattaaatctataaaaaagtacagtacaaaataagtatagtatcaaaatatatatattaaatgttagatttaatgaaactaatttgatttagtgttatagatgttgttatgttttctataaatatgattaaattaaacttaagaaaatttggcttagaaaaaaaatcgaaacttcttataatatgaaaggggggaggagtatcaaaactatatcaacttgatcattacaataacaatcttgctgtgtaaattaattcagagatgctggggtgatctgccacggtggaagaacagaatatacggcttatgtctcagaaggattaggcaatattcagaactggaatgaagtgatgaaattccaaagaaagaatggctcactgttcaactccccttacacaactgcagctgcattagtccacaactatgatgccaaagctctccagtacttagacatgcttctggacaaatttggaagtgcaggtaactgcactttgtcaatggtttaataggatacgaaatataaacatttgctgaatgcctaattaatgtcagttaaaatttgcagtgccagcggcctatcctgcaaatattcagtctcagctctacatggtggatgtgcttgaaaagatgggaatatctaggcattttgttggtgagataaagagcatactggacatgacctacaggtactaagtactaccttaagataataagattagttgtttggagaccgtggttaattagcagttcaggtaaatgactaaatttggttgcagttgctggaaacagagggatgaggaaattgtgcttgacatgcaaacatgtgggatggcatttcgtatgttgcgtatgaatggatatgatgtttcttcaggtactttattctgctagaacctaaaaggataactcggtactttcttttacctacttaagaatcataaaaaaaatcaattgctagctcgattttatgattcttgagaagataacgggaggtagccctttgatctttagtttcagttccttgtaccaagctaatgtattgcattttaaaaaatgtggtgcagatgagctatctcatttttctgaaccttcaagtttccacaattcacttcaaggatatctgaatgatacaagatctttattagaattacataaggcttcaaaagtcagtatcgcagaaaaggaggtgatcctagataatataggctcctggacaggttgcttattgaaggaacaattgttatccagtgcaatgaaaagaaatccactctctgaagaggcaagttgtcaagtgtgaatttctcatctccattatttatccataacgatattattataattattattttgtattttcaggttgaatatgctcttgaatttcccttctataccatcttggatcgtctagaccataaaagaaatatcgaacattttgacattacaagcagtcagatgctagaaacagcgtacttgtaagtttttttcctttgatgaaacaagccagttccatcaaacctgacctattcagacaccagaaatcaatatatatttttttgccgggtcggccgaaaaatcgaccaaccagaaatcaatttgtcatgaataattaaatatttctgaaactaaacaggccatgtcattccaatgaagaaatcatggccttgggtgtgagagattttagtagctctcagtttattttccaagaagagctgcagcaactcaacaggtatgtacatctgacatttattgctcttttttatttcctatgtaaaccaacaaacttgcagataatttcgttacaattttttgctgcagctgggtgaaagagagcaggttggatcagctgcaattcgcacggcagaagttggactacttctatttctctgctgctgctaccattttcactcctgaactgtcagatgttcgcattttgtgggccaaaaatggcgtgctgacaacggtcgtcgacgacttcttcgacgttggaggatcaaaagaagaactggaaaacctcgtcgcattagttgagaagtaaaactaatccttaaaacaaattaatgtcttaaccaattctagttcctcaggctaacaaaaatttcagccctgataacgcttgtgatattcatatctaggtgggacaagaatgacaaaactgagtactactctgaacaagtagagattgtgttctctgcaatttatacttcaactaaccagcttggatcaatggcctctgtagtacaaggccgtgatgtcaccaaa

SEQ ID NO: 9351 - DNA, 9772 bp, Oryza sativa
ccgggattctcgaccgcgactcggtcgtatatattcgtacgacggtacgaggaatcagcgatcgaggagccgaggaatgttattctccaatccgtttttttttcctttttacagtttttgttggtcttggcccgagaattgatattgatttgttcgtagcgacgaattctgtgcttgtttcaacgttatatcgttgtcgctctgtcagcagcaacaagctaggtcgggaggaaggggaagacgtcgcgttccacggtgagttggagatcgatcggtgcacgtcgcgtggaccgcgacaaggccgcagggacagcgccgtgcgtgacctcctgtcgcttcgcgtagggtcatgcattgctgtgcctgtgccagtatgcgacaccaacctttgccaatatagcgtcaaggccgccccgcgcgtgatcgacaactggtgccactttgctctcagtttcaggcggccatatacagtcgcaaaccgtgacggcttcattaattacgtgcttccattttccattgctagtctcggaatgccatttatatttagtaaactttagccacttctacttcaataaactaaaaaaatattataaaaaacatactatcttatcaaagttatcaccgtcgttcgtatggaggttgcagtttcaaagtggaaacattaagaaactaggtggctgatatttttagccatgtaccgttgccttttcgaccaagagattattgtttctactttttttttaatcttcgatcatcgtcactcatgtggaagttagaatttcagagtgaaagcattaagaaataaagtagctgagtgtttttaatttgtaccctattatttcagatcactgtcacttatgtggaaattgtaattttcaaagtaaaaaaatcaaaaaataattaggtgactgagtttttccttatctatgcgtcattgcctttccgattaatgtttacctatcctttttttcatctctaaccgtcatcactcatgtggaattaccgttttcgaagtgaaaacataaagaaatttaggtgggtaacttcttacttttttcttatctacatgatatgccattgccttgtcaaccaacatattaactaggtgataccccgcgctttgctgcgagatttatggataagtatatattaaatattgtcgaaatgatgaaagttgaaatgttgaaaaaataatgtgagtaagatgatttgacacatgcttgttgatgatgtgttatacttacatgagatttaaaataggctagaatagtactttctagtgagtgaagatgttgcatgcttgtataggattttaaatgggctagaatagtaattgctagtgggtgatgatgtggcatacttgcatgttgagttttaacttttaataattgttagtgggtaccgactatatagaagactatatagaaagtatcgatgtgtagcagcactcactcatgctttgccaggtgaaagagaaaaaaagttattccaacttaaaacaaagtattgtaatttggcaaatatctacaagctagtatagatataaaaaagctaatgtgcaaaggcattcataaaaattaaaatacatttaggtgaatccgtacatgtaaaaatccacactaaacttaaatcaggttgcaataaaaaactatcaaattaatttgaaatacaagcttatgcatgcatgttacttatatgcactacaaattaaacaggagtgtttttctgaagataacttccatatgatgcatgcgactgttagtatagggtatatagcccattctttgactgccaagtgcaaacggaaatgttggaatagtgtcaaccattcagggcatgcgtggactattccaaatctaatacaggccattcaacagtctttgcacggttattctaaaattaaagcacctagagggtgaccatagttatgcatcgaacaaaatctaatcttataactagggcaagaattctccagtgaaattcaaagcattggtcttaattccatggtctaaagaatgtatggatttaaaaatgtgaaacatttgtgtggagattatgggtaccccatacccacacgacatggttatccgactagtcttaggggatagcttatatctatggaatatgtaacagatcatgacttgggtattacgtttccctgtatattatggaacggcctaaagtcctggtttgataagattgtaaagtagatttaggaaaccgataccatgttggttaaggtttctatcttgtaatcctgccctccaccctatataaggtgggcaggaggccctctagggggcatgagacaacctgatcgtcagatcaatacacactcggcggattcaaatccccaaacaggagtagggtattacctctcattgagagggcctgaacctgtctaaatcctttgtctccgcatccatccacttttaggtctcgtgcgctacccccttttattattgccgaattcatgtttcgacagttggcgcgccaggtaggggttgcgtcgagttatctatcaagaagcgcgatggaatcaactttacgagtcgccggcttcgtcttcacttcgggagctgcaacttcctcgccgccgacgaattccctaagcttttcttctccaactcagatccaatctagccgggaagattaatctcggcgatggatccaatcaccgtcgccgccgagtcttttctttgatcggcaagaccggacgtcagtcaccgagttttgttcttgatcagcaaaagatttgaagccaacagctattatgagcctccataagtagttgttcctgtcaattctattttatgcaatgagatcaaatctgtcgccatgtgctgtcaagcaacagatcaagcatcagcagaaaacatgcatgcaaagctctgaagcatcggcgtctttcctcgtcgacatcaaaatttgttggcgagattcaatttcggaatcgatatggactccaacccagctgattggagcaattgtcgcacaagggcatcgatcaagccacttctgtccaagccatacatgcaggtgcatgatctacctagacagatacatgcacgcagcgacctttttgctggagtctctgattcaatcaagcaagccatacaccgctgatgacatacatgcattaaaaatcttggattacaagccaggtttatcgttttaaattctttcgcaaattagattaattcacagattactaattattgtttgatctgttattgtttatgcatgtatgtcggctgctgtcgtcgccgctggctggcttctttgcgtacatggctggtgtactctgccaccattgctggtggcgacattgtcttcaccaaccggctgcctccgtcgccgctgactggtgtcctcgcctatatggttggtcggtcacaccaccgttcatgggcgtcaacgtcttcatcgaccggctagccttcgccgccgccgactggtgtttccgcctgcacggctggcctattatgccgccgctgttgggcgtctacgacttcaccgccggcctgcctccgtcgccgccgagtggtgcctccgcctacacggttggcctattatgccgccgctgttgggcgtctacgtcttcaccgccggcctgcctccgtcgccgccgactggtgtcctcgcctatacggttggttggtcacaccaccgttcatgggcgtccacgtcttcgccgaccggctggccttcgccgccgccgactggtgtttttgcctatacggttggcagacttcgccgccgttaatgggcttcatcatctacaccactggcttggttccactggcgccgactggtgtttttgtcaccatcgatggactgcttcgttcccacatcggctacttttgctgtcaccgagggaatattacaaagctaagtcatcatttattttattctttatatgatattttgtcttttcctttgcctcactacatcaactggttcgccgttgactagtgagtcgggggctatagatgttatatcgtattttttaaacaattttcataatatttatcttgattgcttgcgacataatctgagtacaaaagtacctatcgagttatggagttctatcttcctatgctttccgtttggtttgccaatggatggttgcctttgggccgattcctagcacccgggggctcgttggatggaccgagtaacgcaaggtgctaagtattattcagaataaatcaaaagcatagagatgagataaatttattttctgctcttaataattgcaaaagtacccgagtagtaaattctgattcgtgaaactttgttccattaatggcgaactcatgtcactcatatgcatgtctgggaagtgcctaggccgactcccggtgcttgggggctatgactagtcggacagagcgtttaaacgtaatgaatcatctgctcggggaaatcaaaattgacaagaggagaaatacacatttataaatattttaaaatacttgattttttctcgagtattatatttatatcagatactactcatcctatatgtttgttctgcaggatccagatccagatatgcataaaagggattcatggctttaagcttatctcttacgctccaggaatggatcagtcagaacatcaccaccggctcgcctcgaccgccgccgactggtgtttccgcctgcacggctggcctattatgccgccgttgttgggcgtctacgtcttcaccgaccggcttgccttcgccgccgccgactggtgttttcgcctgcacggctggcctattatgccaccgttgttgggcgtctacgtcttcaccgaccggcttgccttcgccgctgccgactggtgtttccgcctgtacggctggcctttatgccgccgttgttgggcgtctacgtcttcaccgaccggccgcctcgtccgccgccgactggtgcttccgcctgcacggctggcctattatgccgccgttgttgggcgtctacgtcttcaccgaccggcttgccttcgccgccgccgactggtgtttccgcctgcacggctggcctttatgccgccgttgttgggcgtctacgtcttcaccgatcggcttgccttcgccgccgccgactggtgtttccgcctgcacggctggcctattatgccgccgttgttgggcgtctacgtcttcaccgaccggcttgccttcgccgccgccgactggtgtttccgcctgcacggctggcctttatgccgccgttgttgggcgtctacgtcttcaccgaccggcttgccttcgccgctgccgactggtgtttccgcctgcacggctggcctttatgccgccgttgttgggcgtctacgtcttcaccgaccggccgcctcgtccgccgccgactggtgcttccgcctgcacggctggcctattatgccgccgttgttgggcgtctacgtcttcaccgaccagcttgccttcgccgccgccgactggtgcttccgcctgcacggctgacttattatgccgtcattgttgggcgtctacgtcttcaccgaccggccgcctcgaccgccgtcgactggtgtttccgcctgcacggctggcctattatgctgccgttgttgggcgtctacgtcttcaccgaccggccgccgcatccgccgctgactggtgtcaccgcctgcacggctggcctgttataacgccaactgatgctatcttcttcacggctggctacatcgctgtcactactaataggcatcagtatcttcaacacaagctgcctacgtttgccatggctgccgactggtttcttcacttccatggctgcatgattctgccagtgttgattggccttaccatcttcatcgccggtcgtctcgtctgctgctgactagtgcccttacctctacgtctggtttatacagctaccactactgatggacatcatcatcttccgtcgccgactgattatgccgcctccgactggtgcttttatcttcacaactgcgcgtcttcactaccggtttgcttctgttgccgccgatttgtgttcacttcattacggcaatacaactttgtcatcatggtggagcgacttcatctttattatcttcggcaccggcaaactctattgttgctacttcgcaagttttactacatcaccaaccatgacgttgttgtgaatctcgacatctcggcatgcgatgccgtgttattttactacaacaagtggctctccaacattcatgatttctacttggacatcttcaacacatatcttcaatcaagcaataactattcgacgacaagatgctacagttctcgactctatgttcagttgtttcccaactaatcaaagagtcgggggctacacaaatacaaggctcaaaatttgacaaattttatgtcaagctgaagaaatcaattcatcaaccaacgagtcaactccaggagtcattatcttcatctttgatttggagcagacattctacttcaacaacttcaaatatttcggtttagacgagttgggcaacaacatcaactctcctccaattatttgtcttcacggttggcctactacgcaactgccgatagaggatctcatcgttatcatcggctgctacatcgctattgactggatcaccgacatcgtcatcttcatcaacatcttgtcaagcctcttcaacatagcctactctgctgccgttgatgggaaacttcgtcatcatagtcggctatctctgttgccgctaatcatcattaccgtcggatgcgtttgtcgccgccgattattttcttcatcttcatgattggtggatttcgccatcaccgttgatgcgcgtctacgtcttcatcgtcggtttgcttttgtcaccaccgactgttctttcgttgttgttgggcgcctacatcttcactgctagctgacctgactgttgccgactggtttcttcgcctccatggttatgcaacttcattacctttgattggtgtcactgtttttactaccactgacatcttccgttacttctgatgagcaatttcgtcttcatgttggtcatttcatctccatgccgactgcgtcagctattgccaatagacaattttgactatgacagaaggacaagctatatgctcaggggctcatcaactcaagcgtgaggattatatctccaatttggacttgttccggatacattccacatggattcatagtcatgagtctattttctatgctcaaagactggaccaattattattccccgtaagggctatcaaccgaatacttgcgccagtcgggattcaattattatatttattttggagtatcccataagggataatcattcagatcagaagctattcatatgagctacacttggtctatattacccggaagatttattactcgggagcatgttacatgcgtcatcctttaaagggtgtcgaaggcatattttttggcctaggcctaatatgtctgcagcccatattttcaggtgtggcctgtcacgttcttttagggacttaggcacttttcgcttaggccaaagtgcgcgtgatcaagtgcccaataccttaaaatccttttataccgcagttactcgactttttaggagttggtacaatgcatcttaaaaggtgtcaaacagtaaagctttatatagctgccccgctgacttttttatatagtcaaggtgctgtttgggtttatcaagcaattgattggatacaatatcattgctttttgccacgtaagtgtgcatttttattgaccaatattatggcttaggctgattatatattatggtcatttttcaggcggttggtaaatcctttatgagtttacttactcggatgttataccacatgtgccatatatttccaggtgtggtgaaacaatgtgtcttttatggacttaagcacatctgttaaagcagtgtgcgcatggcgtatgcccaatactttgaaaatttctttattcacagcattcaagcttctttatagttgttttgctatgtgaactttcaaagatgttgtcaactttaggttgtacgcatcatattttgccaagcagtcggtatatcacttggatcatattattcggggattcacaccgcatatgctatacattgatatcaagtcacttggttgattacaattatcaaaaccactcggttggttagattatttattccttgactatatgtttggttggttcaattaaccacatagtcgggggctacacctattaggtgcatctattcgatgcacctgactatatttttcagccctccacagtcttcagatttggtaaaagtactcgggagaccatggcgaagataattgaagcactcggctttggagtaatctagttcgagagaaggttatcttttcggctgtgaaggtctcaggggctactgtggagattatgggtaccccatacccacacgacatggttatccgactagtcttaggggatagcttatatctatggaatatgtaacagatcatgacttgggtattacgtttccctgtatattatggaacggcctaaagtcctggtttgataagattgtaaagtagatttaggaaaccgataccgtgttggttaaggtttctatcttgtaatcctgccctccaccctatataaggtgggcaggaggccctctagggggcatgagacaacctgatcgtcagatcaatacacactcggcggattcaaatccccaaacaggagtagggtattacctctcattgagagggcctgaacctgtctaaatcctttgtctctgcatccatccacttttaggtctcgtgcgctacccccttttattattgccgaattcatgtttcgacaatttgttttcttctaaattaagatccaaattagaggtattatgaaaccatgtgcagtgtggtatagcgtggagtggaaacaagagggggccgggtcaattcttttccattgtatctatgccgtccttttccctcttacacgatccatctctcctcaactttacatttaattacacaagtaactaattaattaagggagagagaaaagacaccatgagtgcatgaccatgaggggtgccctttgtggaggggtaaggtatttacgtagttaaaggcagctttggaacatttagatttaaaaatactccattcatcccaaattataagacatatttttttacatagtctccaatgatatactttgatcattaatttattccatactatattccaataaatatgaaattagcatcacacgaaaataatttaaattataaaactagtgatataacatgcataatacttagcatatactatatgattagtatgattagcagttaaaagttaccgagtttaatttttattataaaaaaagggtgccctataatttgggacggaaggaataataggtattagtgttcaattacagatcaatgtaaaactagagatattttaccgtctttaagggagtattatatatagtttttaacatttaccccaaggtatgtactcccttcgtttaaaaaaaaagacaacctagtattagaatgtgacatattctaatacaacgaatctagacatagagtatgtccagattcattgtactaggatgtgtcacgtcgtaggacgaggttgagtcttttgggacggatggagtatacatgtactcctacaagacatgattcatgcacgcgtctaatttaagcagcattatatctaaagtaagtttcttttatctagtactttatatacaaatcttgagcactactgcaatatctttaa

SEQ ID NO: 9352 - DNA, 26634 bp, Oryza sativa
acatggggatgtatagttctttcatgcattgttttgtttttttatatagactatctttaagttagtaaaaagctttgctctctctcttcatttaatatcttccaaatagaaaaatatgctgacatggatcttttatagagaatctcttatagagaggttatagataacaattatgggggctcgaagcaatgaggtccaaacgatgcaataggaaagaccagttcattgaatggactcgccaaccattgaaaagctttgcaaattttgccatttactcatcagtctggcactctcccgttgatacaaaggcgatgcacacacagggtaggcagacaccgagaccaattttggtgttcccccccccccccccccccaccaccaaccttcttgccttgtaaccatcgcgcataccaagcttaattactgtactttgcctacacctatatatttcttccacacatacacatctccattcccctctctctctttctctaccttcctctttgctttgccatttcaagtctagagagagagagagagagagagttgctggattggacgccattgatgctgtagcagagaggtgccaaggtccaagaaagtgagagagagagagattgatgaagaacatggaggctgcaagaagaggaagaagaggaaggcaaggtggtggtttgctgctggtggttcttgccgctcttctgcttcttctccttgcattggcgcgcggcgcgagcgcgtgggcccacggcgggctcgccggcggcgccggcgccggcgccggcgagcggcggtacatggatctcgcgatgaggaggatggagagcgtcagatcttccttcgtcgcgaggagggaattagcaacggtcagtgtagtttaactaactctactccatttcatggcttcctgctgcttctgcttccattactgtgttgattgcgtcatttcaacttgttaattgcaagcctctctgctgcttccaggcttgcagctctctgctgcaaaaaaaaaagttttttaatgagtagtttgatcattttgttggggagcgtttgttgtgctgggtacatgttgcaattaattaactgcattacactgggccaaagttagcagtaaaaccatcattttcgaagaacagcaatgcatatgcacacaaagagaagttatcagataattgtgtcggtttgcttttgcactggcagtacattctttttttttttcatttgccttttgcaataaaatgagcagttttattaccccaaaaagcagcttttttcctaagcatatctccgtcatttgtcggccggaagtctctgtccacgctctcaatgaaatctagccgtcctcaaagaaatgtctttcattcataaatccgcattcacatgcccaacgcattagctcatgcatcagtaaaaaaaaaaactgcatttgcagttcatattttccaacttttggtatgcacaaacgcattacctcaacgttttttctttttacacttttggtattcccatgcacaactctttcaagagttcaagggcgtcatattttgactgcatttgtcatcaactttggaaaaagaaaaaagaagatctcccattttctcacaatttcgtcaagaacgttaggtatactaccaatctagcaatgtaccatgaaatgcttacacggcagcgaagaaattgagaagttttctcctcagaaaatcctgctcactttccaccgtgttcggtagcaggtagcactagtagcaactgcccccacataaatgtaaaaaaaaggaagtaaaaattaaaatcaaaagcttcgcggctactcgtgccaaccaaactttgaactttttaccggtgctaactttgaactttctgagttttttttttaaaaaaaactttgaactttctaccggtgctgtgctgtcacgtctgacatggcgagttcgtgcattgcagtctacggcggcgagctcgtcgcgggtgtaccacgtgacggactacggcgccgacccgaccggcggcgccgacgcgacggcggcgatcaacagcgccatcgccgacgcgttccgccgcccctccaacgccaccatgaccggcggcatccccgacctcggcggcgccgagatccacctcgacggcggctcctacctcctcaagggccccctctccctccccgcctccggcggcggtaacttgaaggttagtaatgatgtcacgtgagtatttttatttattacttcatccgtcctataatataaaaaattttagagggtcataagatacatgtttcatgtttagatttatatgtttagatttatagtataatgatatgtcacataccttattcagagataccttattcagagggagtatatatcttttcctaactcattagttgtatacatattaacagaaactagatatatgaatcatttttactatgttaaaaaaattgcactatcttcgtcccaaatgttagtacaacataaaatgaaaaatgaaatttgacaaatcatttttaagaaattctttcagtcccaaaataagcacagtaatgagtttccgtgcccaactttaattgtccgtcttatttatttttttttgaaaaaactaaaaacataagtcacatataaagtaatctaatatcaataaaaatattaatcgtaaaaattttcaaataagatgaatgattaaagttgtacgcggaaatttatgattatgtttattttgggacagatggagtaatgaatttggacaaactaatactttgggatgtagaaggtattttgacatatgggtcccactgagggtgtatgtacacgtggcagattcacagcgggtcgctgcgggcggcggacgacttcccgacggaccggtatttgatcgagctgtcggcgaaggcggccggcggtggcggggggagctcgccggcgatgagctactactacgagtacgtgacgctgcgcgacctgatgctggactgcaactaccgcggcggcggcgtgcgggtggtggactcgctccgcgtcggcgtcgacaactgctacgtcgtccacttcgcgacggacggcgtcgcggtgagcggcggccacgagacgttcgtccggaacaccttcctcggccagcacatgaccgccggcggcgaccccggcgagaggtcgttcacgggcaccgggatccgcctcgacggcaacgacaactccgtctccgacgtggtggtgttctcggcggcgaccgggatcatggtcaccggaggcgccaacgccatctccggcgtgcactgctacaacaaggcgaccgggttcggcggcgcgggcatctacctcaaggtgcccgggctgacgcagacgtggatcaccaactgctacatggactacaccggcatcgtcgccgaggaccccgtgctgctccacgtctcgggctccttcttcctcggcgacgccaacgtcgtgctcaaggccgtcaatggcgtggcgaggggggtgcagatcgtcggcaacctgttcaacgggagggggaagggggtggacatcgtggagctcgacggcgagttcgcgacggtggagcaggtgtacgtggcgcagaacgcggcgacggggatgacggtgaggtcgacgacggcgcgcgccgcggcggaggggaacgggagctcgtggacggtggacttctcgccggtgctgctgttcccggaccggatcgggcacgtgcagtactcgctcgccgccggcgacgcgttcccgggccacgctctccggaacgtctccggcaaccgcgtcgtcatcgccaccgacgccgccgtgtccgccaccgtgcacgtgctcgtcgaccagaacagcagctgaagaacaaaaaatcaaaatgctgctgctgcctgccgcgattgcgcgcgagcaaggcgttagattcgtttgttcttgcgattcaccggcaaaattcgtctatatcagagagatggcaaaattggcaatagctatagcttgtatttgattgtttctgaagatgattcagaatggatcacttcgtcagttcatcgtgcttccagtttccataaaatgcctcaagattcactgattcagccaagatttcattttttttctttttcggaaaaaaatggaatcaagagcatgcagggatgatcagaattatgacgacaaggagaacagctggtcattctttcagttacaaactgaattcactgacaagaatgatgcaattgctactatactgtactccgacgtaggagtactgtatccacaagtagtagtacttgtcccatttgttttgctggtcacccgtcagtctcaagtgtaatactctgtactagcaaaaggcaattcattcatgcacacgcttgatcatgcccaatgccccagggacccaaagtactaagcaaaattatgtggagcaataacaacttttaacaggtagctcacctgttttcctggctattatttcgatctgtcggtcggcactggctatttcttgatttcttcttgcgtgattcaactgcaaagacatgtaggtagcttatctgattatctcttctcctaatactatctatgaaaaaaaaatgttgttagcactgatatttcctcagtaaaatgtgagtaattaagcatcagaaacaaactaaatggtccaccaatcttgtttcttcttgttgctattgtctgtttaccatctttaattgatgtgtttcaacattagtaagttgtttcagagcagccaaaaggaaagcgatcactagctgctgaaattttgaggtgaaaggcagctaatcactttcaaaattccaaaatggactctttccttcattcccaattgttgatatgccaaggactttttgagctgttcatggggttagtttacctgctttctcttgtcagacgtcagtgtgtgcctcctctttcttgatcttttcttcagaaaccttccaaatggagtacttaagctgaatttttctgtataaagtagctcaacagtttctcttgacgaatcttgtgcgtttacacaccaataacttctaagttgtagaccaaccaaaggtaagctgcatttgaaaactgaaactcttcaaacgaagaaataattctggaagctgattttgccaaaggtcttcatttttactgagttattcattaggcttttttttcttcttcttgagttataatgttctcaattttgccacttcttgcagagttagccattgggctttttttttttaaaaaaaaaaccccaaatgctacaaaaagttaaaccgatacatgtgccaatttctgtgcttttggcattgtcaggtatagtgtggagaaggtggcaactctatcatgtccttggtcccagaccatatgaattatggcatatggaaatcttgatttcttgggtcactggtccaatatttttctttttctagaatccactaatccaatattatactactagtactaagctatttaaaagtctcttactagagttggttagagttgcacaatttcactgtcaccatgagcttactttaagatttggcaatcctgtacatatgatgcattgtcttttaagtttcactaatcactgtcaaaacacgagaaaaacatggcattattttgctgaaccagtcaaacagttaccattaaaaaaagttaaacagttaaagtagggggagagaaatatggtagtagctcaagaaaaagtcatgaatccgttaatatggttcattctttcgcttatttgtagaataagccaaaatcatatttgcaaacaaaaaataatttgtgaataaaacttttatatacgtgttcttagtgatctaaaagcaaatgctgaaaaataaattacgatgagaaaacccaaaaatcaacaccaaatttaaggtggaaaatttaaattttggctgataaatataagcataaagaaaagatgaggcccgtcctgtggaattcagtgtagaaattcagattattcgactggtgatccacccaagtcgataaacatgcttgtagcatggtgataaatgccttccggtgagaagctaccgaccagggttcaaatcctatatatatatatatttttacataagaaggtataactggcttaccttatagtcatttcattgatagaaatcctaatctcgcataaaaaggggatttgattcacccaaagtccatgaactgtgttgcatttgtgtcctcctttcttggaacaggtccaaagatgtccatttgagatctgcatggcatccgtgattgcgtgaggattagtctgatagggtagttagaacaaaccttgttaaggacctacttgactttgaaccgtattgatagttgttggtgagctaatctgacgaagtgaagcagacagtgatcatttgaggtcaagaactgatacgataagtacaaacaaatcatcaacgaattaagctttttgttaagggaagtaatgcatagtacggtacttgaatgaataaagtttcaaacagcaaaaatcttaactttgggaagcatagatatttgtcattttctgtaccatacaagaaaatttctcgtccttcacctgaaacttgcttgcaacctaactctggtagagccaggatataacaatggtttcttttagataatgggatataacaatgatatgcttcctctcttttccatggaaggtgacattttcttcgcttttcagtagcaaacttcagtggacgcatttttgtgcagatgcagacattcagaatccagtaacaaattgcttgcttttcacaagccaactttaaagccatgtgattgtttcagatggtgacatttagtatagattagagattaatattaaggtgcagtatgtctactaaggttcatagtggttcatatatatatatggttatttcttgcagcagaaaacacacaccaggtcgaaccaaacagcaagccaacatgcttgtgctgtattcagagctccagtacttgtacactgaaccaaaacgcgagtgaatattcgttaagctcaaaggcatcccacatctctctcccttgataattcatggatgccaacagtatttcacagccgaatatactctctcagcaagcagtacaaaaattgccaaacagaggggctgatatatcacaaaatgttcatggcaagttggcattttggcaaccttcattttcataatttaggatattgaaagacctgctaagaatagccattaacttttgagacttaagagactggtagatacattctagaatgcgtagcaaagattctgagacatagttatctaccatgtattgtatctaaaattgttattctagagctacagtgtaccaagattaatagcattatgatttatgtatccaccttctatacatcttccctaagaaagctcactaccaagcagctagccctgaagctcattccatcctatgaacaagtaagcagaccttcaatggcaatgccagcaggatcattgccttcccgctccacggtttccaccaccgcctggtagagatttgcccatgagcacccatcaccagtactcccaaccatgtcccagaacgtcaaattggggcttggtgggcatgaggcgacgacaatgtcagcaatgctgcctactttggctgctggccggggaaagtccagtgccaaattatcgactttgtgctcgtaaatcttcccgttcctgtcgaccttgtatctcgaggtgccactgaagcaaccgtatgattcccacgggacacgcggggttccccacagctcccaccggacaactatcgagttctctgtcagttgccaaatgcgtgatatgtcaagcccgatttcacggaagagtaggcgcccatggaatctgagagcccagaagattgtcttgtagttgtcgattccatggaaagtgttcaacggatcgacgaatgttatatcttcactgcagtgtgatgcaaagagtgtttttagtgcccattttacaagaataactgtagaatatatcaacaaaaataatataaatatgaaactacaagaagtacacttgtcaagtcaacaactagtgttcttcatacatgactagaatcaagaatcatttggttacacaaactgctgtaattgctggtgatatatggactgctacctgtcactgctctctgaaagtgtaaacttatcagttgattcaattctcagtctccatgtttatcagttgattcaattatcaatcttgaatatgacactctcttttaatggaaatcttgacaatgataaattatcattctaccaatcatttcctccgtttctatgttgactgacacatcattttccatgattagccaactagcacaaacactgaaaacttcagcccagttttagtggaagctttcagcttcagttccccatggacatttattcactgacgaactagcaaactaaaaattctcactacagcaacaacgataataataagcaaaagtaacaaactcaaaatctatagcaataacgataatacgaagaaagtaattagcgaagattaatttttaccggtagatgtcgtagttgggttcccggacgaacaccgccggcaggtcgtcccgcagcgtgcgcaccgccgtcccaaggttgaggtaataatccgacctccgcgggtcctccccgccgccgccgccgctccggccgccaccgttcttgctccggctcttgggcgtcgggacggcggcggcctcctgctgcgaggcgccgagcaggagcaggaggttgaggtggctcggtgccacggcctgcgccggctggagcttcccgccgccgggaaggccgagctgcgacttgagcgggctcggcggcgacttgcaggacggcgtggtgagcttggggaggaggaaagccatggcgcgcctttcttgatctttctggctagcctacaagtagcggattccttcgcctacgagctccatgtagtagaagcttccaaattggccattgggatgttcttggggagggagaattgagtggctccgatgggtgcagcgaaggcgaaggcgaaggcgtgtgtgtgggagagagatggggtccgacgtggagccagccagccagccgtcgaggtggagatgatccggggtttcatccttcgttttccttgtccttttgtaacaaagaagaaaaaagaagaagtaatttttgctacattttctagtagatagttttctttttctcctgattacgcgagacacaccactacatatgcagaccgcatacacgcactataccgtaacacatgagcttatcaccgttacatatgcaggccatatagacgagaacacgccacgcatatagaccgcatacacactctggtgaatgtattgtaatatgcgactatacctgtaacacattctaaaataatagatttgagaccgaagttaaattttcacgacctcttttctgtagtaaataattagttgatgtctcaggtcttgctaggaaatacatggagaaatacatggatgaatgtatgctgcatattgcagaaatgaaataaagtggaaatgatatggggtgataattcgatatgcttatatattaagctctagaatgtattaaataataaatgctatgttatatttgtatgtgatttaaaatattttgatagatttgcatgttaaactttaaaaagctagcgggattcaaatatataaagatattccatggtgagcgcacttctatctatcatgctctaggcgttgactagatgtagcatggtcatttgataaagtaccatactctacatcttattaaattttagcagaatatgcacacttgtttttgtttttgagaggatacttaggagggtgtaggtacacatgagttatatacaaagacagcctacgacatggctggcctgtacaaacattacttgtaaacggttgcacatcacaccacaattaaacatcatcacccaaaggcagcatacaacatagtcttctttcgtgtatgctcctcatggaatcaattatcaaacctaaactcttcctctttttttcttaaacgttggaactgtcaaagcaaaagcagttctggtgcaagaacataaaaaggagctttcttgctgtccttgtttccacagcattaaagaataagcacagcacccttaacagccaatgacactaacacacaaacagttcctcttgttttcgaaggttggactaaccatgctacctatttctagcctaaatacctaggagatcttccctacttgcaattcacgggtagataaggttattattgttgtgaattgcagcaatcagactgatttatatccccatcatgtgatccaggcctggctgaggagcagctcccatgcctgcgcctgtcacattaagaagcaattgctggagccagcgccttgttgtaggatcatcctgtggttgtcaaaagttggtgtttcaaacctttcatttagtattaatttatcaagtacaggaataagaaattggtggcagctgatgggttaatatcactcaccctaagacagttattgaacgtgccatccttcagcatgtcagggaggcaagtttgtagtgcagcacatgccctgcatagacgccgcgtagaaaaaaatagcctgttcagaatatttaagtaaaataatttgatagcacacaaatggcagcacagacctggaattgtctgacagcctaaggtaacatcggataatgtgcttcagcaaccttgtggaaggctgctcagcaagtgaaaccaccatgtttgctaaaacactgcctacagcaaagaaacgctcagcagtggcacaaatgtagcgcaatccaacatcatcgaggagaatcttctgaacaatgaaggtggccacctacaaaaatatttgactaaatcagtgaaataataatggttcattaggcctagcttggcaaatgagatttatttctggcctcatttgaactttgagctctcatcaacaaaagaagcttaagttcctcatgagctaccaacttaactatacctgtgtacctgtgtacaaacttaactatacctaccaagtttaaacagttaggtttgggtcataaaaaaatggaattaaaagtggcagcaccatatagttgccaaattgccaacctcctctcaatacatatagcacaatccaccttttaggcttataaaacgaaaggtggcatttgagcttaacaaagggaagcctggttgagaacaagaaaattccaaagatgagcggcagcctgtaataagaagattctaaagatgacaggtggcttacttcacactaacctggacaggctatcattattcatggtagcagaaattttaacctagccaagctacgattcatggtaacaaaaaaaaaaattacacacaaacttcagacagcatcatcacatacttaaagaagaaaaagatgatggtatttagataaacatgagatggttagcgacatacagtttttgacagctcacttcccatttccatggtacgcaaacacagaggaattatttcagtttgcagcagaaaactgataacttcagtatcatcaacctgcgtgtattacatgtgaaagaagctttaattccatttgaaggaaaaatatctaaaaccagttcaacacgaaaaaaagaaggtagaaaacatcaaagagtacacatgtttgtttcaaagtaattcaacatattacaaggttacaaattctgttttgtgcatttttcctcagaaccctgccagagggctagtttccaataaccaagctctgtgtctacttatatataaaattggtttgcatccaaacttaattcaaatttctacaaccccacatcattcccccccaaaaaaaacatggatacttggtagttacagtgctacaggaaccaggcaaaccactaaacagaagtaaatggctggttaccacgaggatcttggaaatcttttgcttacaatttatgcttgctgttctgcctaatacaagaaggatgcattcttataaggcctcatgcctaactactgaataataataacatggctcttcgccaagatggcagaatagaattactgaaatgtgtcaattgtaatatatatcatgttcgtatcactgtttaaacgattaactcatgtaactacatagatgaattaccttaacaagtgcaccgatgacacccaggctggtgagtcgcaggtattcaaaaggtcttgtcttgctggtagtattcaagaatgggtacaggtacaggggaatatgagctgaaaagaacaaaagaaaatgagagagggaaatggaatttttcacagaaacaaaaacaagagctaaaaggttctttagtgtgttattttcttatgaagattaagactttacctcgatttttgttagcacgcttttcaaactaataaactgtgtgtttcgtgcgaaaactttctatatatatgttgctttaaaatatcaaatatatctatctgtcaagtttgtaataattaaaaattaattaatcatgtgctaatagctatcttgttttacgtgctccaactttatcttcatcttcatgagtttcaaacactagtactacacatttaggaattaggatacgtcaaatatagattacaaaagcatgatcatacacgcatatgagagacagagatgcaaaggaccatgaccattaccagttaagaaaaggatcctggtctcagggtgagatgcaacacactgaaattatttttgaaaagcaaaaaagaaagagttaatcagcaaatctatgtcataaatccaacttgggtaactcaaaaggcaatttctactgtaaaatacatcatgaaatgcaagcaaccagaagacaacttttccagcattaccgccctatttcataagattatgtacctgaagaagtgcaagtgcattgcagactcggttcgatgcacctggtgacaatgttgggggtgaaagtgcagagtagattgacacaatttcctgtatgtgttggcaagtatggatgcaccaagtgagtaagattgctgaaatttgagtaagtttggattctaagcaacaagtgctaatttgaacagcatacaatatttgacctcaacagcaaactgatgacttgagagtaggattaaaactataaattatttgtgagtttaatcttcaagcatgcaaattgtaaacatatacgaacaggggaatcatgcagacctgaagaagtgcagcaactgttccaaaagaatgccaaagaagtggggccagatcttgaaatatctctcttttctgaaaagaaaggattgaattttttttgaccaaataaactggcttatcatgttaatgactggaacatgaagtctacaattattttgatcaggaaaattacagaactaattaggtacaaaacaaaaatttctaaattagttactacaaagaacatagggttctaaaattttctttagcaaaacattgctgttgacaatgaagccatctgctctggaatatggtaaatctacaatccaggtctgtgtgtatgagcggtaatctgtataaacactttacagcgtaaaacgccttaaagagttaatggaactctcgaaggctacccataataaactgagtctaattcgctattgtgctacccaataataatggtaatctagcgggaagccgggaagtttcaccgaccacaataattagagatgctaatgttatcttgatcaaaacgtagtgtaatagcccatttcatgatagatgcgcatcaaccatacggtaaccctaacaccaaatcaccattcaccaaccctaaaaaaaccattgacattcacaatgctaaggcgaaaccttcccccacaggcagtgtgaattccacaaattaccaccagtgccccagatagggtaggctatagaaccctagaagaacgcgcgctggaccttcgagagctcgaggagggcgttctcgcgaagctcggggtcgcagaggtcgagcaccagctgctccgccgacgccatcttcatatccttggctggctgccccaccccgccgcccacgccaccgccgccgatcggagaaggcgatggcggcgaggccccggcgaaggagggcggaatggaaagcgagggctgcagattcgccattatccccacagcaactgcacaacaccaacgaaaccaccatcaccatttcttcccaaaccacaaaattatccaatcaaaaaacacacaaactcgatcaattccacaaatgtagcaaaataagggattcgactgctcacaggctatacagcacggagcgaactaggacgaaatggaagggatcacccgaattccgcgacggatcaccactctccgctcctctccggcggcgccgcggccgccgtgggctcgccgcgacgggaggagaacgacggcgaagtcggaataatgcgaaactgcagccgaggggagagagatcccctctctcgccccctatggcgccacacggacggccaggatcaaccgatcgccgcgatcggacggtccacattgcaccgtccgcgacgaacgggcgtgatgaagcggaggttgcgtacacgggccgaggacccatgtagatccgtgatggcccggagtttgggccttattgggcttgaggttttgtggcccgtaaagggaggggtgtatctgcatatttgacacccgcggcgctgcgctataaagagtggctcactagggtttacctccgcgccgccgcatcctccttcgcaagcctcgcctccactccccgcgccgccgccgccgccgccgactcgccggtcgtcaccctcgccccgcagccatggctgagcaggtaaggcccggcacctcctgttcttccgtcgagcttctccgtcgcttgctataggagtcagttctaggtgggggcgcgttgccatgtgatgcgcgtgttgcgatgtgagactcgatttctcagttctcgtgatttgggctggaacgctagcgatggaaagttcgtgtgatagtgtcatgaatttgttgaggtcttcttgttagatgtggatttgttgaacggtgggtttgttatatcggtactcgtaattctctcgtgttaaattagcaatagaagttttgggttactggatcgaagttttgctgagatattgttactggatcgaagttttgctgagatgttccaatagattaacgcaaccgtggatgtattcgatgtttgggttcattaccgctgccgtgttcatggtaacgaatgataggtctgtgcttaatattcgtgatgctgcagttgtgtgtttgtcacgttttaacttcttttatggttgatgtggagcttatctgctactgaattagatacagatttgtattcttgtttcccatttgttcaatccaaataagtgatgcaagtggttctagctatgttgtgtagagtgttgatgtttttcatccatttctgttgtgcagactgagaaggctttcctgaagcagccaaaggttttcctcaggtagggttcttctgctctttcaatgctttatgtattctgtgagcagttcacatgtcttaacgatgtttttctgcttcattttagctcaaagaagtctggcaagggtaagaagccaggcaagggtggcaaccgcttctggaagagcattggccttggcttcaagacccccagggaagcaattgaaggtacaataggttatttgcctctttgtttagctgattctgtctaaaagttgtatgctgtacagaagaactttggtgttttcactgtagccactgaatgatttgtagtgcgttaactttaaaattgtcactgaaagaacagttgtttgtcatgcattgacagtatttgttaagttgtttttatacactattgccggtatgtttgactagcaatttaaattcatctgaatattacagacctgagataaatgctactatttgttttaagtattgaacagttgattaactgcaattctttccagggacatacattgacaagaagtgcccattcactggaactgtttctatcagaggcagaatcattgctggaacatgccacagtgccaagatgaacagaactatcattgttcgcaggaactacctccattttgtcaagaaatatcagaggcaagtaaactaccatggattatatacttatgtttcctttccttttctccgttctaacatagggtgcaaacctcccaccttgcaggtatgagaagaggcattccaacattccggctcacgtctccccatgcttccgtgtcaaggaaggtgaccatgtcatcattggccagtgcaggtaaaacttaactcccataccttagtttttgactccttagaatcatcttaaataacagaggtgctattagttcaaacattgtcagttcacccagctagtactatgagatttggttgctgaagtacaatttctgcattttcaacaggccgctgtcgaaaactgtgaggttcaacgtcctgaaggtcatcccagctggatccaccggcggcagcggcggcaagaaggccttcaccgcagcatgagcttgtactcgcattattcatgggtagtttatagacagatccttttgcttgaagtcctggcagggctggtgttttgaccctatcgatttggatattgttcccaacaaaacgaagtcttttcatcagaacgtgtttatggaatctactctatgcaaagttttgttaagatgcctgttaatgctcgatatgctgtgatccttgattttcctggctggctatgtgttcgcttgtttgttgtgtttcttcgaaagagtattggtggatatcctgtgcctgtgcatgactgagattctgaataaggttttcccaaacccaaacctgacctaattcagtttttttgacaaggcttgaatcttataagtttatcaatggacctgacatcttcctatcgcacctaagctttgggaggatgctaatatctggtacaacgtttacatttcacaatcaaacacaactctgaaatgttcgaatatctgaaatgttagcctggtacaccatttacatttcacaatcaaacacaactctgaaatgttcacctttgtccttcagagaattagagttcagatcaacgaaaaatgttcagtctcgtataactgctacagtcttgcactccaagacgatgcgatcgaccacaaattaacgagaaatcactgccatttttttttagcatagacgatccatcaaatgagtaatgcttgaagtttaattcgcacgaagtgcaggttggggtgatgattgttagtggtaaagctgcaagaacaccgctctgagcttcttcccggccggagtttgggccttcttgggccgatatttacggcccatatagagaggggtgtatctgcatcgctagggtttgcctccgcgccgctacctccttcttagcaaagcctcgtctccactcccctcccctcccgcctctccggatcccccgcgcgccgccgccgccgcccgcccgccggtcgatacccctccgcggcagccatggctgagcaggtaaggctcctcctagtcttaccctcgagcttctccgtcgcttgcttagggtcagttctatggtgtccttgttatgtgactcggatcttcttgtcggtgttgctcagtggtattgcgtgatttggcctggaattgtagggagtgaaaactggtttggtagccttgcacatcagtatgttggtcattattgtcgattgtagatttgatttggggttctagcctagtctcatgagtttgttgaggttttcttgttagatatgggagtagttgggcggtgggtttgcatagtaccattctcaactctcacttgatatgttgtgacttgtgagccatgttcatggtagcaaatgccaggtgcagttttgtggttagtgtggagcttatctgttacagagttagatataggtttgttatcttgtttcccatttgttcatgcaaacgagtgatgcaggtggttctagcagattttgtgtagtattgatgttttacatccattcctgttgtgcagactgagaaggcattcctgaagcagccaaaggttttcctcaggtagggttctgctgctccttcaatcaattatgtactattctgtgagcaattcacacgtcttgacaatgtttttctgcttgattttagctcaaagaagtctggcaagggtaagaagccaggtaagggtggcaaccgtttctggaagagcattggccttggcttcaagactcccagggaagcaattgaaggtacaatagagtcttgcttctttgtttagctgttaccagaattccaattcattacattttagattcttgcttactatcttttgtgtgctgtagagaagaattatggtttgttttactgttaccactgaagtgatttgtagtgcattatgaacattaaaaattgtttctgaaagaatcgttgcttgtcatcagttgacagtatttcttaaattcttttgatacactgttgctggtatgtttgactagtaatttaaatgcagctgaataatgctatttcttttatgctaattctttcaagtactgagcagttgattaattacaattccttgcagggacatacattgataagaagtgcccattcactggaactgtttctatcagaggcagaatcattgctggaacatgccatagtgctaagatgaacaggactatcattgttcgcaggaactacctccactttgtgaagaaatatcagaggcaagtaaacaattatggattctacttatgtttcttttccttttttttccccatttctgacttgggttgcaggtatgagaagaggcattccaacattccggctcacgtctccccatgcttccgtgtcaaggaaggtgaccatgtcatcattggccagtgcaggtaaaacttaactcccataccttagtttttgactccttagaatcatcttaaataacagaggtgctattagttcaaacattgtcagttcacccagctagtactatgagatttggttgctgaagtacaatttctgcattttcaacaggccgctgtcgaaaactgtgaggttcaacgtcctgaaggtcatcccagctggatccaccggcggcagcggtggcaagaaggcctttaccgcagcctgagcttgtactctcatattcatgggtagtttataggcagatccttttgcttgaagtcctggcagggcgtggtgttttgaccctttcgatttggatattgttctcaactaaacgaagtcttgtcatctgaacatgttttatggaatctactctatgcaaagttttgttaagatgcctgttttgctcgatatgctgtgatcccatggccgtgtgactcgagaatacttgcttgttcagcgtttgcatgactgagattctgaatagggttctctataacctgagcaaaatcaggtgttcaatgacaaggggaccagcttgagaagtttatcagtggacctgacatcttcctgtcgcacctaatctttgcaaggaaataagatactcccttagagcaggtacaatagcaggctataaatcagctgcaaacatattttaagcagataaatgaggagacagaagggcagcgggctacagatttgtagccagctgtagcatggactccaagacgcagcgtgtgtatgacaggtgggaccagatattaatagtgtagtatgtaactattctatgaatgagctaatggattagctatagatgaattggagctagtagtgggctatactattaaacttgctcttagtagttccagaatatagcaatcatgcatgctattatcctagtatttggacgtgtctaatctggttttaggttactatattttactaggatagaggaagtatgaacttgcgaatgttgacctgctaggctgctactcccccttatcaaaatataagcatttcaccatgagatcaccattactctcaggataaaaaaaactgagattaccatttcaccatgaaaaacacagctctgaaaattcgtcaccttttcagtaagagttcagacatgcaattctcgtatgatcgcttccctccactcctggcaccgatccaagacgagaaatcactgccattttaatttgcatagcgtgatgatccatagtcaaatgccaaatgcttttccagtttgattcgcgcgatgtgcaggttgttgtgatgattagttgggtgttggtatagcggctaattaagctgcaagaacaccgcactgagcttctttcctgccggagctcccggtatcctgctggttccctgaatattcagagagttggacagttcaaatgcatgtttctctgaaatgaaatcatgggcattcaaagatctatattgttttgaagggggaaaaaacatctacagattacatgggagcaacacaggactacaggagaaaccaaaatggcactgccacacaaatgtttttgtgtgaaaatcaagatggccttagaattttgggggctacattacaatactcacagatgacacaacataaaacaacccggccaatatctgaggagctcactgaactgtacagcatccattcatcccatgacatagggaaaatggaaaccctgtgatcttttttttttttctgtttgagatgaaatcctgcaatcctttctctgccactgttccacaaatttgaagttacagagctgtttgtgtcacaggtcacctagaaggaaatctcactcggcgcatggaatgtccgtccgcggcaaatggcttccaagttttctccagcataggagctaagtggagaaacttccacacctacaagcaaaatcaatcatgacaatattagtaaaagaaaatatcatttttccttgttttttgttcttggcaagtttctgaatgtattggacaggagaaaatttacctgtcatgtacaatgggacagaatgggtcaagaagccaccagcagcaactacccatctactatggagacgaagcagcatcagctttgcgctatcaggggtatcataagacgcgccattcgcattctttacaggcgcaaattcctcctcccgcaaaacctgaattttcagatatgtataccgatgagtttctcaaaatcataacaaaaagacacagcatgacatctagaatgttataagagcataggcgactgagaagttgaacctcaaaaagtgctgtggatggggagtaactgaacgcgtcgaatatatactgttcaagcttcaagcccattgcgtacccatggatggaagggatcttcttctcagcaagatgataactggacacaaaagttttgtaaatttcatgtgctacaaatacaatagaatgaatgatggagcttgcagttttaaacatggctctcactttcttaggaagagtaagaggggcataacgagaaaatagataactactgtaatttgcaaagaaagtaaacacaatgaattcctactgcttcagacttaaaacagttatagaagcactcacgtactgtccttctcaaggctgtttgctacttgattcaaaaaatccaaagtgaacatatgcaagcaaatctgcagtgagataagaacatgcggttgttatacacctcaagagaaagtgcaaccaggagggattgagaaacaaaggatagaacatacattgctccaacaataacgaaggcgtcccgttgactgattaatttcagtagccatagctgcgtccatttcactatactcaactacagagagaggtccaccacgtcctcgtcgaacaaatactccaacattctcttgtgggtaagcctgttcagcatattatttactatcaacatggtgcatattggattaatgatatgaagcatgagaagtatttgactgtaccttcctaacaacctttgcagcagaagatacagctttgtctatgaagtaacctaggaacgtcggatcagcaacgcggacctgcatacataatattgataagcgaatgaggagaaaacgcagaaggttatatggattatcctatggggaagttaatgtcctcaccagtgcattgtcaaccccgtagcaatctacatactttacaccccgtgaagacatatcttccagcaaccttctggacttgagggctgtaggatgttgcagtagtgaaaaccaggcatcagaaatgaccatgcaacactacaactagaaatacaatacatctttttgggagattaccagcataaactccaccattgccatcaggagcctttgctacctggtttcgaacagagcatgtgaaaaaaaaaaagaatgccatcatttaacattttaaataggcagcatcaaaacaatatttgtaggtatcacaattgcacttgaattgtgagatctcagaccatgtgtcaaactcgaaaatcaagttgttacaaaccgcagtatcacctcctagtaatacaagatcaatcagtggaagattagaaaaataatagaagatggtaccttgtatggtgtctccataataaatctgccatcagcagaaacacatggaagggtgccttgttggaaaaatgtcacctgccaagaaaatgttcagctgttcaaacctacctattaaacattactagtgaatgggggatcctgttggatcttttgttgaaattccattggaatagttaacacaaatgaaaaaaaaaagtacttgatcttacttggtctgcctctaagccaaagtatttacggctttcgaagaatttgcgagtgatgtcatcggtgaaggggctggtcattatataccaatgaataggtacggtgttatttggacctgcaagttatttcaaatttcagggtaaagatgtgaaacgaaattaaaaaagagagtaaaattgtggttaaaagacattactatcacttgattgagcagcaagcttttgaacacacaaaatccgttcagcttggagttggaaaagcgactttccagacggaagtccgatacctaaagggcagaaataagaggttaaaaataagccatgatatatacatagacagagttggaccaagaattatcgaaaagagcaactgagcaattccacactaatatggatggatagagataaactagaatatgtcatttcctttgattaaatggcattaaggtgatgtagactacatttatcattattattacactctaaaataaacaatctgagagctatgaacaaaaaagattgtgtaaaacagaaataattcagagcacctcacttctttttttggctcaacaaatatccatacatttgtgcgtacaaactcaagtactaatatacaaagattgaagtggaatcaacttactgaaacatcctttaggatcagagctaccaagccgagtcccctgcacatacatgaaaagaaattaaaccataaggaggctgcttctcaatgcacaaactatagaaattgcaaattcaggtaatctttccatcagagcacctgaccaccggctaaaaggacgacggctagcttcccctccgaaatggccttcagccccttcttccaccaccgttctttgtcctccggcaacctctcctccaccttggacacgctggactccggcaccggctcgacggtgggcaaagtgaatcctgcacttagaaagagcataatcacaccataaaactaaggcaattactgataaagtgttctcggtacagttctatcatcttgatgtaattgactgagttcatcaaaagcttccattatctataaataaactaaggcaagtgcgatgataaaaaaatacaattaactaatgttctacattggaaagataattgttctttcccttcaactgagagacctctcaccttgtgatccaagggagcgccggatgatccgatcaatccttgaaagatccaggctctgaaaaaaaaatgcagtatatgtagctccattggtcactgtcgaaatggtaagctcaaatgacaataaaatcatgctgcaggtttctcttgagctattgtacagtgtaagcaatgcagattaagacctatggagagcagataaataattggtcacactggcaacaaagctgtgaaagcgtgaagtaaattatcactcaaaatccaaactccttttccccacaaaccgcagtaaaaaatttcaactgataaatcaactcctgcagaattcacacttagaccaaaaaaccacattcaaagaccagagcttacaggcagaattccggccaaaaaaggggaaaaaaaatcaaacttcttatgcagagttcgtccctgacaaacagaaacggacagagagctcccgacagaaaacacaatcccaacgaaagaatcaaacattcgacgcgaaattccggcgcaaaaccgaatctctctctctctctctctctctctctctctctctctctctctctctctctctctctctctctctctctctctctctctctctctctctctctctcccaaccctcgcagccgcattgagctcactcactcgctcgctcacctcgatgtccctgacgagcagctcccggtcctcgggcgagagctcgtcccagagcgcgaacgcgccctcctgcccgtaatccttcatcctctccagcatcgcctgcggcggcgccgctccccacctccccaccgccgccgccgccgccaccgaccaaccactatctccttcatccctccccctcccttctcctcacccaagaaagaaaatggtgggactagagagagatctgtgactgcagcaatggcgcgctgcgcaagaagaggagaagagatggaggaatgccaactcggacgaacggcgaatcggatggatggattgttcttggatcgccgccggcgtgtgcggtgttcgcgccctttatatacctcctctgattgggcgtgcggtgttccaagctaattttgcttctcttctctcctcgctgacatcgaaagcacaagttttttttttcctttgacacttttttagcagttttttcatatgtgtgtcaaggattaatcactattacttaaaaaaagaattggtgggagatacgaatccctccgaacatttttttaataattttttcatatgtgtgtcaaggattaatcactactacttaagaaaaaagaattggtgggagatacgtcgctccaaatatttttttttaaaaagaaacttataagtatgttagggattgaacaccagatcttagggttaaaactacgtatcacttatcacgatgctatcaaaatgtatctcactactttatctattaattatttcatctacagcttatcagcagtcaaaacaccactaaacaaaaattgtagttaaattgtatttatagatttaaagctaatgctgaaaaatgaatgattataaaacatcaaagcacaagttttttttttattttttgagcagcttctttttttttaaagatagtagaaattttaagaaacactgccaatgatatcacaagtgacaaccataaacgctctcagtctatgcgtgttaaggatcaatcgcctcgtattttgtctattaattttttttctcgaggtactttgtgatctactacctccatcctaaaatatttgacgccgttgacttttttaaaaatgtttgaccgttcgtcttattcaaaaaatttaagtaattgttaattctttttctatcatttaatttattggtaaatatacttttatgtatacatatagttttacacatattataaaagtttttgaataaaacgaacagttaaacatgtttaaaaaagtcaacggtgtcaaacatttagggaaggagggagtattaattactccatctacttcagaaatcgccggattagaggagaagaggggttaactagccggacatacagactgtcggtcacacgggttcaggcaccagcaaacagtgtcaaacccctcgtgactcctgcagcaacaacaacaaagaagaagaaaatatattttataatctatttatccatttcgttattaagagcacctcttgtttaggacataaacacacatgtattatacatttatacccccattccatgatttccatcttgtacataaccttcacaactcatatgtgggaccccagcagcagcaccctggaatgggcccacatggcagcgacagggtattgcagatcgtccgagctttgaaagcgagcagcgaggctgaagctagctagaagaatggtacactctcactcacaggtgagcgtgccactgtactgtgtgtacactaattgtcctggcaaagtcttctttggaggttgctcttgatggcccagacctacctctcccagttgagtgctctgaatcaaatcaatgtggcattcatgatctcctgtaaaaatcttaacaatacaggtcccatatataaataccccatcatgtatatacatcaccatacattttgtattaattgtataaaaatgtataaatggtatgttcctctcaagaatacgttcaatcgtacttgttcagatacatagtcagaaatatttatattttaaagaagagagcattatgttttaagaaattgatcggcatgcggatgaaacatcggttgatagatcatgtaagaatcaatcaccgactttatatacataacaaaaatatttatattctggaacggagagagcagatcatgttttcagaaaccggttggcatgcagatcatcagatg

SEQ ID NO: 9353 - DNA, 24292 bp, Oryza sativa
  unsure (1)..(24292): unsure at all n locations
cagtccatcacaaagcatgacattttattatatgggaatcctcatccccatttctgagtggatcattcctattagcttgaaactggtgaaggggaggacatacattgacttaaaaatgattagatacagtacctttgatgttaaaaatagaaatctgaacatgttaaagatgacttaataatttcagctcaatttatcatgcatttctgttcagatgattacatacagtgcctttgatgtattttaagagagcaaaggcaatgtgtttgtgttatcctcaagctaattaatttactgcttaaacaaaaaaacacagttatctcacctatctatctatatatttttctcaggcgctgtttgtaaagttacggcagctagctagtgttgctggtgatgtcttactgggtaaagagaagatacagaaggtcttgctctcaaggctaactgaaacggttgtcatgtggctctccaatgaacaggaattctgggatgttttcgaggatcaatccatccaactccggccttcaggactacagcaggtatattttctcaagctttcatgttactttggttcaaatactaaaagatcattactttatgatttcagcttattcttgatatgcacttcgtcgttgagattgctgtctgtggacggtatccacacagacctgttcagcagcttgtgtcggtaatcataactagggcaatcgcagctttctcagtgagaaatgttgacccacaaaggtctgtaatcatgctttctgccgttcacattttttccttttatttagttgcctgtctttcatggccgaattgctcagactgttgtcttcttcctctcattattcagttctctacccgaggatgaatggttcctcgacatggccaaggttgcaattaataagcaattagggacttcaggatctgagtccgagcttgaggagcctgtggttgtacatgatgaaatctcggattctgaagagagtagtatttcaagtccatcgacgataggatctgaagattcatttgcttctgcaaacaatgatgatctagaaactcctgtatatttcacggatcccgaggcataagagttatttatgcagggaggtgattgtagttatttaaacatctagtagtttaatgtcctatatacttgcagaaaaattgataatccatatttactgtcctcattttcttttccgtgcataagtatccaggaactaaaaaatgaagtccccatggtttggcttatttcctaataatccaaaacggtttattaggaaataaaaatgaatttgtaggtgaaatttttataaatgtgttcttggtgacttaaaagacaatgttaaaaaagaaactacgttgaaaatatctcaaaattaagcttgaaaatccaaaatttagctttttctttggctgattaggctatccaataggagcctgaacatggtaaatcttcattcaactcttacatggcacataagtacaaaccttcaactggacagtacagccttgaacatactctacttgcaacatatgatttgcttatacttgtactctcaatagccttagaagcacatgtcgaggaggcaacagcagcaaagggcagcacagctgcaaaacaacagaacggttaagtatttcagttcttcagtctactttcgcatatcactactattataaaaattgaagatgtttttgccggtactttgtacgtcgtccgtatatgagtcggtttttaatttcatttgcttttagaaatacatatatgtatttgagtctgtttttaagttcgttcgtttttaaaaatacagaaaggactcctaattgtagcttatgattttgtaaaataaatatccaaacgaatttccagagtgaatttcaccttagctaaactgtacaacagtgataagattaaaatagcttttacccgttgcaacgcatggatattttttttctagttatgaaaaagagtaattgtctcattacgaaaaataggggtaaaaaagtctacttcataccccaattctagcaacctctttttaatcataaataaaccctataacttaggtgttgagttaggttttctataaacgtaggaagatactatgggcttgttcattttataatcgcttttaaccttattaaattttagtaagataacaaactaaatatgatgtcaccaatattatcatactactaaaatttagtagttctagaactttcctatcataaaaacgctagtactaaattttgaaaagacatcaaacgctactaaaattcgataacaccaaagcttgtcaaaagttgatattgccacagtttaataaggttaattttggtaacaaagtgcacagcttatgttgtccctgctattaggttatgatcgattggagtaaacagaaaatggtaggcggtaggctcagccactgcctcacacaagacattattatcagtgacaccgagcttaattaccatccttccaggaaggccttgtcaccgcggctctgtgtctgcgcgggctgcggcgggttcatgcccacgtcgaagttgcccgggtatcccggcggcggaggcggcgcgtagttgccctgcggcggcgccgtgtacggcgcctgccccgtcggctgctgcagtggcgccatcgccggcggtgggtacgctgctcgcaaaagaaatcaaggaagcaaaaaattcgaacaccgaaatcactccatcagtaaaaaaaaaggaagcatgaacgcaaccaagaacagcagaagtctcccaattaattcccaaagtcatctgtagcattaccggtcacgggagccggctgctggccgtagtaactcatgatcgatcagcgagacagtagcacgctagcagtagcagacggtggaaacgcgtgcgcttgggcgagacgagatggagagagcgagtggccggcaacggcaacggcaacggcaacgcgtcgtgtatatatagccaggaggaacaccgaacacacgagtatcgagtactggtcaactggagcagagtctagcggatcaacgtacggtggaatgaagacaacgggggcggcttcggttttgaagctgatcgaaggaagctagatagccaagcgacgacgaagggccggccggacgagtgcctagctaggttggctgcgaattgaacctgtgattgccaattgggcgagagacaaaactgggcggagtcacacaagcagctaggatggagcatgcatggaggaaagaagacgcggtcgtccaagatgtagcgatagtagacactagacacttagagcaagtttatagtatagacactggctctaaatcatctatagttaatgttatagccaatttatacaatagttgctgactataatattaatacctggtctcacctgtcatacacatatttctcttggagtccgcgctgcagctggctacaaatctgtagcccactgctcttctctcttcttttatctctttaaaatatgtttatagctggcttatagtctgctcttacagtgtgttctttccttcaagttcccaacccttctccctcgttttccgcgcgcacgcttttcaaactgctaaacgatgtgttttttgcaaaaagtttttatacaaaagttgcttaaaaaatcaaattaatccatttttgaaaaaaaaaagctaatacttaattaatcatgcaataatgcgtgctccgttttgcgtgccagggaggaggggttctcccgaacgcagctggcagggttgtaactgcaaaatctgcaacttagtactccctcattccctaaatatttgtcgccgttgacgtttttaaatatatatttgaccgttcgtcttattcgaaaacttttatggaatatgtaaaactatatatatgcataaaagtatatttaataataaatcaaatgataggaaaggaattaataattacttagattttttaataagacgaacgatcaaacgtatttaaagaaattcgacggcatcaaatatttttggatggagggagtaagcactaaacagggtccttttcgcaagagttccgaatcgcatgggccgtattatgggcaggagagttagctgggctgctgggctttaattgggcatagtgagtcggacgtaatcacgtaataggctggaccgatggaacctcaagtgaaagcatttcatgctggctcgtggttagtaaaaggaataagttcatctaaggtcccttaacttatgaacgaatccgatttacgtccttcaaccgcaaaaccagatacaacgggtccctcaactatcaaaaccggtgcagattaggtccctcggtggtttcgatggcggttttgactgacgtggcgcctacgtggctaattttactcggtctcgatctgacatggcactgacgtgggcgcttactggcaatttgatccgaaaaaataataaaccccgtgggacctatatgtcagtttcacacacaaattaataaaagaatggcgggcccacgtgggccccacatgtcagtctaactcacccctcctcttctgcttcctctctccccatcccctctttttatctctcttgcgacgacggcggcggcggaaatggagaagagtggccaccggccaactcgctcttgcacgcgctcgccggtagaccagggagctcgcctagctccttcccaccgctcgtcgcccttgtccccgatggccgccgtccgccacccttctcctcgatgaccgccggcgggagaggagggagcggcgcgcggcggcgtcgaccggtgaggagggagcggcgccaccactttcaccagcgccccacagcgacggcttgccggcgccgctcgccgcggtgacgacaatgaccgtggaggcgtggatgcggcggtgccagcgctggcctcgtgacgccctttgctggccgccggcgccgccgacgactcttcggaggacgaggcgccgtcgacgtacattccgatggcggccttcctgacctcgagcacgaacagcagcagcgtgaaccagacgatggcctggaagacggagagctggacaactgttagcattatttttgtgtggcagttagcttcgtgcatgtggctagctagtggctgccgaattaattggatcgcgtgctgcgtgcgtgtacgatgcggctgaagtttgtttgcttagtggtgtgtttgctgggctataaaagtcatataatctcctgagttaagtgtcaagtgaatgagaaaaactagataaggtgttgtcgtcgagaaattcttctgtgtttgtccacaaagattttcgctccagctagttgaagtgcgcgtgttgctgtaatccttggccagagctgacaacgacgagctgctgcgcccactcgccgtacatggcgcgcgccatgggcacgccgacgacgagcgagttggtcagcgtggacagcgagaagctggtgatggaccagcgacggcgcagccgcctttgctcatgaaccgtgcccagacgccgatgacggcgacgggtttgtcctgactagatccagatccctcgggatccaccaagagaggcttgagctcggcagtggcggcgagggggtcgggtgaggcgcgggcagcacgaagtcgagcagcgaggtcggctacgaggaggcagcggcgaggtgctcctgccgctcgtggagctcgtggcgggcggcgaggaggcggtcggagaggcctggggacgaggagagcggggcgagcaccgaagcgagagaggaaaggggagagagatgaagagatgggagatggggagagagaggaggaagaagaggggtgaaatgacatgtggggcccacgtgggccccgtcattttttattaatttgtgtgtgaaactgacatgtgggtcccacggggtttattattttcccgaattgaattgccacgtaagcgccatatcagtgccacgtcagattaagaccgagtcaaattagccacgtaggcgccacgtcagccaaaactgctatcgaaaccgccgagggacctaattcgcaccggttttgttagttgagggatcagttgtatctggttttgtgattgaaagatgaaaatcggattcgttgacaagttaagggaccttagatgaacttattccttagtaaaaccacgtattctctccattttgaaaagcatgatattattgacttttaaacatcagtttgattttattttattaaaagataatgtaatataagttatactaaaataactttaatggtaaaataagccacaaatgatattacatagggtttttttaacaatgaatgatcgaatgtctttcgtattgacttttctttaagggaaaaaggcacagactgccttttcattgaatatagcaggaaaaaatataatccctaggggcgaaaaagggaaaagtacactatacaagatgtggcaggagctcacgcaatcttctggcgctggccagcatccagagcttggcctcttctttgattttggcaagcaaatacgtcgctgtggactccttgtgctagaaaatctgctgattctgctccttccagatctcccgcaccacaaggaggatgagagtgcgccattcttttttgggaactcctaccgtattggccagttccagtttctcccactattcctggaccgactgcgtaggctcccatgccctggttcaagaagatgattctcccaatgatcgaatgtcttccgcattgactagtcagccgaatcgttgctagatactacctccgtcccaaaataagtgcagccatggatatccgtgcccaacgtttgaccatccgtcttatttgaaaaatttgtgaaaaatttaaaaatatttagtcacacataaagtactactcatgttttatcatctaatagcaataaaaatattaatcataaaaaaaatttaaataagacgaacggtcaaacgttaaacgtgaatagtgtaaaactacacttcttttaggatggagggagtatgttaatcaatggccagggttctgatgcaattaaaagccgttcctttatttcagttagtacaatcagagccatttatgacaaaagtataagagcaaggataacagtagagcttacttcctactattagcctatcttaaagccaacatatataatagattagctataaggttggctataattttcttctcctctctctatctctcacatatacatttaatatatttgtcttggagcttgtgataagcttgctcttgcatgagagccaacactcttgatttttcactacctctctcctccacataagcttatagtaaacttatagcttactattatacttgctctaagggcccctttgatttggaggaaaatcataagaattttggaggatttcaatcctatagtaaaatttcctatgaaacctttgaaacaaagcattgaatctaatccaattatttgaaatttctatggaatggacaatactatagagattttggaggaaatttagtaagagcttcaacctcttggtaatttttctttgagtctatctttctcatctaattcctgcggttcaatcaaacgtccattcctgtgtttttcttgtgttttgcaattctctgttttacacttacattcctatcaaaatcctacgtttttcctgttcctacattttctcaatcttgcgattcaaaggggccctaaatgaacctagcatttcttaccaaccaaaaaaaaaagatcttaccgatttcaccctactgatccattggaaatgtatttgaatgtgaacagtgcatcttggatccaaatcaatgctcacgatcgcaagaatgaccactcacattgcagcaatcccagctttagcgtacggagaagaggcaacaccagcaggccggaactggatggaaacagtctgtgtggctcacgagttgcccaatcctgtgctgcccccaatcatgtcaaccaacctgatctgcgtcctgaaatatcatgtcatcgcctcggccccagccttttcgtgtccatctgctatgtgtccagagatttatcctcgtgatctgtctaatgcaaccgcctgtatatatagctgtagttaagtattccatcgtcatatcaccaaaaaggaaaaaaaaatccaagagaaacagcgtcccttctgtattgccgcggttcataatttcatacagcaacccaattgccgcggttcataatttcatacagcaacccaattgcatcagtgcccctatgtggcgatctcgtctgtgcccctctgttggtctagtggcggtcggttacgtttagaagcggccgatccggtgctagccctctcctgggcgtgtgtgttggcgatgtcggcgtgtgggtggtattttttttcttttcctggttacgactctctatggttgtaatcttgtaattttttcatactctatcaatagaacctcgcaccgtctcgtgtgattcgttaaaaaaacccaattgcatcagagcacgaaaaacagttacaaaatcctactctctttctgatttagtataaggcattatctttattcagattcgttgtattatataatgttcaatttattttaggttgtttattttgagacggaggaagtacaccgatacgtgcaaacagtcactctcgcaacagctaagctaatagcttctcaaagtcgttgcgttgtaacaagacaactgaatagggcataaaaccgtgaaactgaacagtacctgttgccagtagatttgcgagttttcgatagagccgacgggtaagctgtcactattcagctattcagctatgacaataatattatcaagttaattatcagaatccggccgtgcaagcacctctccttaattattttgtcatttgtcacctcatcacctcacatcatatcctgatccctggctcccctgtccacaattaaatcgatcactagttgacgacctatctaataatccaaaatttcgatgaagcagcagcaggcagatgatgatgcagattgcgactttgcggatatcttgctcacgaaagttcaagttctttttggaggtagaagagttctattttgtaattgaaatggtgttgttcatggcaacctggagagggaacgaatgatgaagcctatacgattatattacaagcttaatcatcggccaaaatactactcacaggaggaagaacgatcgaatgaagtagctagcagaaagaggataatgaatatgaccaagaaaagctgcgacaggtgaatcgacctggctgctactgcgatcatgtgatcaagaatcggggctctcatggtgggtatcgccggcgacggcgacgtcggcgtcggcgtcgccgtctgtcggctcccacgacgaggcggtgagcagggacaggtccttccacccgagcttgaggcagccgtcctcttcgacgagagtgtagcccttccatgggtacatgccaagaagcagcctcgcctgcgcggcggggctgccggccagggtcaccggccggaaccccgctcgccgcagctcgtcgccccaccgctcgacgcgcacctcgccggtgcgcttggggcccccgacggcgacgatgttccgtatctccgcgccgaggagctgacgctccaccgcgtgccgctccgccgcctcctcctcggcggcccccgcgccgtcgcccagcgcgtcgaacagcgccgagtagtagtgcagcgcctccacgaagcggcccaggaagtcgccgctgtggccgaggtcctgctccacgatggtgatcagcttcggccggaggctcttgagcaggcgcaccgtgccggcgtcggagcccgtcacgtcgtagaggcagtggtgcatccagtgcacaacggtggcctccccgtggtggcgcgggccgaggagcgcggcggcgtcggcgacgtgcccgatcttcccctcgatgggccggaactcgaagggcaagccgagcgacgcggcgaagtcggcgaggcggcggccggtggcctcgaggacgtcgagcgacgcgccgaggccggtgatccggagcgagcgcggcttggtggggcgggaggcgaggatgtggaagaggcccggccactgcagcccctgcatgatgtcgaggtcgatcacgtggacgcggtcctcgccgtcgagcgcctggaagatggcctggttggccgtgaagtgcgagaacttgacgagcggcgacagcgcgttgtacgcctggaacgcgccggagatgcggcggctctgcgcggcggcgagcgggcggagcgccagcggcgagtaggcccccaggtaggagctcagcacgcgcgcgcacagcgcgtccccgaagtaggccgcgacgcgctcgggcgacgacccgaacggcgacgccagctcggcgatctccggcagcaggtcccgcgcctccggcagctggtccatcgccaccgcctccgcacacctcagcaacaaactaagcagccgcagcccacgcgtctccgccgccgcctcctcctcctcccccgtactcaccaccactaacccttgcttcccctcagcagccagccgcttcccacgcgcgcgctcccgctcgccgccttcctcctcgtcgtcggccgcgcgcttcgccttcatcgctgccgcgtcggcgccgggagctcgcgacaggactccctggagcatcacgtcagcctaaacaataatttcccggtgacccttctccgtggcaaaaccactgcaacaagcaagcatagcatagcaagcccgcagctgatgatgataacgctagcgggagagacactgtgagagaggcgcgggtcgccgttagcgttggacgctggcgcgcgcgggagggggaggccgcctgtgcggtttgtcgggttgctggtagctgctctcgcgtcccgtagcgggcggcgcccaggcagagggaatcaaaggacgggaccggtttttttttctactacacaataacacccgatttttctcacgatcgcgcgatggcgagggacgctaggtcgggtcgggtcggcagcagcaggaggccgtgggggaaagctgcacgcacacgagacgacgggggtgagttgatggacagcatgtgatcatttgatggtggaagagacgagcagagcagcgggcgagcgagcgcgaacagtgcgggggacgaggggacggacaaaacctccccctcggataccagcgatcgatcggtggtggagtggggcgtcagcgtctctggttccagcatgcagccttgccgatctctgtagtctgtactagtctgtagagcgctggcccggctggttggttgtctggttgatctcctgcgatgtgagaaggttgtgtacttgtactgggttttttaccagcgtcgttgatgatgtcgcgattggtgggttttcccccgtgagccgcgcggtttctgtactgggtactgactggctcgtcactgtgcgatgcatgtcgccacaggaaaagacggtgtgcggcgtcggcggatccccgctgtcaactcaactaccaaactgaacaacgagagtacagttcaggcaatggtaaaaccgtaacagtgaatccaaatgggccctttgtgatatttttggttaggtttccaattggaaaaagtgctccgaaggtccctcaacttgtcatcgagttacaaaatcgtcccccaaccataaaattagatatatgacatccctcaattttcgaaaccggtcactttacatcctcaagcggttttgatcccggttttgtcctacgtggcaactgaatcaatatgggacccacgtggaccccacatgtcagagtagccacgtcatggcaccctcaattcctctgtctttcccctattatcgtcttgaagacatgggcgatctcctcggacagcacgttggaggacacccgcttcttggtcgtcgccagcggcggcggcgctcactccagcgcggcatcagccgcatcgtccaatccctctggacacggtgcggcggtggcagagcggcaggtgcggaggttccacggccgttgcggaccccgctgaggcaaactgccgacgccgacgccgtcagtggagctgtgggcggtcttctccttgtccggcgacggggtgtccggcaccgcgggtggaggcgatgaggcggggttcttggagcagcggaggaggcggtggttgccccagctgaggttggggaacgagaaacgatggagctgcgtgcgcgatggcggcggcgtcctcgctctccccgttccctccccgccaggccccgacgcggcgcgacggcagcagcctcgttctccccgtcccctccccaccagaccccgacgcggcgtgacgacgacggcgtcctcgctctccccgttccctccctgccaggcccggacgtggcgcgacggcggtggcgtccttgctccctccgtcccctccccgcggctgcggcggcggctgctgctcggcctcgagcgggctttgcccgagcggttgctcgccgctctcgttggctcgggctgcgcagaacgacggggcgaggcggagcgagtggtggaacgggagcgggaggaggcgggtggaggtggtgaagaggatgaggcggctagtggcgaaggcgtcggcgaggaggccggacgcaacgaactgggcgtggatctggaggaggtggcgcgcctgagctgcctcgggtggtgcggtggctttaggcacacaccgtgccggcgtggactgtcgagcgagtgtggcggagccgcggcgtgggaccagcctacagtcaacctccgttgtccgccgtgccatgaactccatcccagagaagagaagaaaagagtgaggggagagagagaggaagagaaaggaagtgagatgacctgggctcctgacatgtggggcccacgtgggtcacacgctgactcagccgccacgtaggacaaaaccagggacaaaaccaccgaaggatctattgtgaccggttttgattagttaagggacgccggatattcggttttacagttggaggacgatttcgtaactcgataacaagttgagggaccttcggtgtatttttttcctttcctttccaattccaaagccccaaaaatgagcagagccagactcggggccgaatgcacgtgaacttggctaatctcagcaggaaaaagtccacttcacctctctcagctatagttcaagtccaattacaatagtaaaatcaaatataggtgctccctcaactatgaaacccggatcaatttatcttccttattggtttataaggcggtttcagctaacacgtcaactatgtgtcacgttgatttggtcttcattcatgatggcaattacgcgacattacaatcagaaaaataaaaaaaagagtaaaagtaaaaaactccaattgaaccacatgctagtgacactgaaaacaatccctctttaatctctaaaacatgaccaacgtgccattctccctcgtgtcttctctccgacaacaacaataccgacgttgatttgtgctgcggaactcaagctcctctttggagtagatcggagacaacggcttctccctagcagtggcaagcggtccccacctctcaagcaagagaagttgcgggacgttatcaccgtctccgtgaaaaaccgctgtctcgatgccacctagatctgagcaactaagtcattggggacataaggaattccctatcctctgtctcattttccctttaagggaattcatcgccggggtgaggcttggagacaattgtctccactgccactatcttttccacacactgttgccaccatgtaggatagcttgagctctgccacatcgctgggattatcctgtccactcaggcctcctcgatactacctccatactcgtctgtaataacagtcacacggaggatgaacagcaaataaaggcaaataggcacactaagcggcacacacggtccgcactcaccatcacttcccctagagagatgggagagggaggaaggaggaaggctgcggagagtggaagagatatggaatgaatggagaggtagaggaagacgatgactagatcctattgttttttattctttttctgattgtgatgccacccgaggtggtacattgagaaaactgtgtcaacgtgccctgcaggatgaaacgaccatttaaattgctcagagagacaaatgaaccagttggggaatcttcatgtctggttttgtggccaagggatactcccttcctcccataatataggaagtggcaaaaggacaatgcatagtacaaaatcaataagtgatggttacgagaataaaatagtaaaactaaactagtaggtggggaaaagatgccagttgttagggattaaactagtactccatctatttcatattatataagtcattttaaacattttatagttaaactctttttaattttgactagatttataaaaacatataacaatatttctcacaaaaatcaaacatatttaatttatattaaaatgagactaatttggtgttatatatgttactaaattttctataaatctggtcaaacctaaaaaaattgaataggaaaaaaaattaaaatgacttataatatcaagtaaaggggtactataaaagaacgtggttgggaaataaagtactacctcaaaattataaaatccattattgtcgacggtgggtactcgtagaccggatatagagggtattggggtacgctggtacgaggatctacgtaatacgacatcaagaaaacaagagacaaagattatactggttcaggccccttaataagtaatagccctaatccagttgatatgggattatatggggatgaccacaaattacaaagggaataacagaactcgacgataccgacgagatcgtagtcgagttgattcgactagatcatccggcgacttggctcctgtaggcttcggcttcgtaggctgtggtcgttgtgttggctatgagattccatcctttaggtcttcccggggggtcccttttatatcacaggtcaggtggtctacaagtaggactcggagacatcggaccctgcacgatatagtgacgacccagtcctatacgggtaggaacctttccattggtggacttcgagacgaatttccttaacgtatacagagaatgtccgtacacgcgccgatgtaccgtattgccgtatagcgtacatccaagggtagagggtatatcttatccgtaacctgacaattatattttaggataaatttagagggcataatcttttatattatggaacggagggactactaaagtactaattagacgtgcgtagtggagagaggcaaatggacttttttcatctcagcacactgtcaacagatgaaattggaggcccaataagcttttgtttgagaacccgcggactcgtagtgcgagcacggcccataagttaatcggaccaactagaagaaactctccttgcatcaatctcatggtgttcgttggggaggagagtccatagagtacgagatcgcggggggacggaatcgccgagcagattccccagtccccaccgcgaccgggcggttcccgatgagcaggagaggcggcggcggcagcggcgggcggcaggggtcagagcccgaatcggcggcggccgtgcacgtcccggggccctgcgccgcgacgcagcgggcgctcgccgagtgccaccgcagcgcggcgcgcggcccgctgaggccggaggtgctgtgccggcacctcaaccgggcgctggccgagtgcctggtgacctcgtgctgccccggggagacggaggccgtccgcaccctctgcgggagcgccggcaccgcgctcaagcggtcccagtgccagcgcgcgcgcatcggcctctccctctgcctcgagtcgcatcaggagccctgagggcaatggagcctacgctggtatagtgaacaagacactttgttctgcaattttctatggatttattgattttgggagatgtgatttggttctggaacaccccttgctgcgtagtgtactagggattagtgtttttatggtatagagatagagcacaaagctgaaggagcaacgagaataacattaagattgtatgtatttgttgggttccagataccactataccatcaatatacatgtttaattgttgcgttcatcaactgctgactgtcatgtccttggataggttggcatgagctacttcacattccccacttacctacttgttcttcttttcttctttattccaaaagcggtctctatgcaaaactaaaccaacgaaaaatggcagcagtatctactcagcaattatagctacttcggaacttcttttctctaagtaatgctaaaaacacattaaattttctgagtcttgaatgcattgctcatcgtctactcaacttcattgttatgaaatcttgtgtagttatctgcatgttcatcatgcaacaccagttatgaccactaagttatgatgtggatatttctttgttagttcaaacaaatgactgtttcttttaaagttttacctaactcctgaagacagtaaggaagtcactgctcttatatatgttttgaaacttgagctgtgaaatcgtccattaaaattcaaaaagagaattttctattcttaaaaaaattgatgccaggttcaaaaattaaaagagatgattgcggcgaatcattttggtccaacatctggtgtgatttttttccttttttaaaaaccccttgtgttctgaagtctagagcgaataataaaacgagtctcattctcccaagtcatgtttttgccaagtacatgttacggtctctcaatgatctctcatttagatgggtcctttgatattgtgcacaactaatttatatgcttacacagcacaaaccgattgcaaacataggtgaccatcatctgttaccttgtttatatgacacttgcattcaggattatctgaagttcatagcagtgatgctcaaatgaggcagaggttagaggttgccttcgaaactttaaaggatgacatgttgctgttttcagctactcatatatcaatgaacttcnnnnnnnnnnnnnnnnnnnnnnaagaaaccaatgagttcaggattaattccagttcctacatctctaccttgcattgtggttgggatgtctgctatataagttatattagatgcatcattttagtaatatattgaggctcagaagtcaaaatcactgtgaactccagattagcagatgtagaagttcgaagcaagtaccctcaagaaacatgcaaattagcaaaataatggatattagcatggctttatgccttacacataactgacataagttgagattttttagccagatttaatttctatgtggaatacttgaccaatttcttctgttgtaaaaggctattatgttttctgctattaataaatcaaaaatcctcatatggatgtatttcaaggtttggaatttttttttttttttgggggggggggggggggagtaagatttgagtctttgagatcttcgattctttccgtcaaaaagatcttcgattctgaattatgacaaatatataatatcccatctgatttttgcatatttttcatttaatttggtagtgttttttcttttttggtgtttatcgtccagccttcatccaaatgtcaatacatggtggcagtaagaatttgtatgcaggattccaatttgctcacgaatcatggggaaaaggaattaattctccgtgccgtcgatattcggaccatagaaagtccaaaattcagcgtgcctgctaagttatacaacccctgcatcaggggaaaattgcgtctgctgctgtgacaaccgacaactgccgttcaaaccttacatcttgatccaaatagagtttaataatttgtttcctatacttcctaccaaatgttctgattttactgaacccggcgttggtgagctgttccattgtgtctataggcatcaagcttcagtggtgcacaggccagcatcactgcatctgccacgctataaaatgtctaaacaatacattaaactttttacactatattcaaagaaatgggcaccgtctagtgccaatttgttcaaaaaatacgtgctgattcgttcaaaaatacgtcttaaccatacattatgttctgatcttactaagcctgacccgtctaatccttttggacattacgtggctgctatctgaaccacgtcaggctcaacactgtcctccaagattagccttgtccccggtgcgacggccgacgggggaggaagaagcagcagctccatgcaccggcttcctctggcctcacggccaccgggtccgcatcgcgcggcggccgccgctcatcgcgctccccagaggacgacgacggcgtgctgcggccgcctgaagcaggaggcgacgccgtcatttgcctctctcgccgtcgctgcgtctgcggcagcagagcgcgcggccacgccgctgttggccgcggcggcgctcctcctttctgccgcatctcctggcttcctagcttccacaccatcaggttaatcctctatctcaaacgtcaggatgcgtagtactagaatctagttcctcttgaagttttttagtggggaagcagtagaggaacataacagaagtaactctgaatgattctacacaagtacaccgagcatgattaattgccaatttaccatatttgctgaaatgtacgcgtcgcacatcacattctttcccccccttttgttgttgtagcttttgctcaatccgaaggcgcagcgctgttccggaaggcgtgcatcggctgccatgatatgggaggaaatatcctacagccggtaagcttctgaaaccattactcgatggccggacacaaattttcaacctttttattagcttgctgatttgtcatgtacagggcgccactctgtacatgaaggatcttgagaggtatgtgtgctcttgaaaacttttaactgctcgaaatttactgcccattgttggattggatcaaggcaaaattaagggcaaatttgctgcagaaatggagttgccacggaggacgagctatacaatataacgtactacgggaagggaagaatgccggtgagtaattcttagctgctatcatgatgatgtttgagtagtatagatagatactcattaatttcttgattgtatgtttgctgcgttaagggcttcggagaaaaatgcaccccgagagggcagtgcactttcggacctcggctggtcgaagatgatatcaagctactggccgcgtttgtcaagtcgcaggctgaaaatggctggcctaagatcgacggcgatggagattagttcaccgacacaacagagacaagtggcaaacattgttcagtgaaccagtgtatagtttggagtcaggtgtgctgtttgcatctgtaaaatcccaacgaaatccatacaaataaaaagtagcttaggccgtgtttagatttcaacttttttttcaaacttccaactttttcgtcacatcaaatgtttggacacatttatggagcatcaaatgtggacgaaaaaaacccaattgcacaatccgactgtaaattacgagatgaatcttttgagcctaattacgccatgatttgacaatgtgatgctatagtaaatatttactaatgatggattaattaaatttaatagattcgtctcgcagtttacatgcggaatctgtaatttgttttgttaatttgttttgttattagtctacgtttaatacttgaaatatgtgtctgtatacttaaaaaaaatttagcacacgaactaaacacagcattagtttcaaaaaacatgtgaaattcatacaaaaaatgtcatgtcaagtgttgtacataggtggcaagtcagctctctgacggcggttggtagggttggtgaggccgagcgcgacggcgaccgcagcatgggttgtggtttaaacacgaagaaaacacgaaagcttttgtgaaacgcgcggcctagttgtgtgtgggtgtgtgaggtgaggggggaaagggcgaaggaaggaggaggaaagcggcgtcgcatcgcacggacgcgcgcgcccgcgcccgcgccgcgcagagatgctgccgcgctcccactcgcacccggccgcgcggcggcgctccggcctgggcgcgcagctctgcgccgtggtggcggcgctcctcctgctcgtctccctcgccgtcctccactcccgcctctcctcctcctcctcctccccgttccccctctcctcctccggcgacggggtctccaactctcgctcgtggaggacgaggacgacggcgccgcggtgctcgaccccacggttacgattacggcgaccaccaccaccaccaccaccaccaccaacgccgccgctgattccaccaccgatgcctcctccgtctccaaccctgaggacgatcccatcgacgagctcgacgtgctcgacgaggacaccgcgtccggcctaggcgcggccgacgaggtccccgcctccgcgtccgcgtcgtccctcgtctgggaccacgccgttggcgtcgcccgcctgcccttccgcctccccgccgccggcgaccccctcccggcggggttacctcacctcgagcccgcgcaccggatcgccgccgccgccttcggatccgacgacgagccggtggatctggagctccgggtggagatctcgtccatcgccggcgtcgaggacgcgttgctcctgaagcctgcctccagcgcccccgagactcccctccgtgctgggtgggcgcggtggctggaggggaaggctgactacctccggcgcgatcggatgctgcggtccaacctagaatttctcaatccccgcaaccacccgctgcttcaggacccggacagccccggccttacctctctcacccgtggcgaccgcatggtgcaccggatgcttctcgccgagatagagaaggctgcttccaaaaattttgagcggcggagtctgcaatcgtctgatattaagcagggaatgggagtaaccgagaaggtgcagcagaggaggtggggatattacccgggaattgatccacatttgggcttcaatgagttcatggagaagttttttgagcatgggaagtgctccgtgaaggtgttcatggtgtggaacagcccacagtgggcgtatggcgtacggcaccagcgtgggctggagagcctactgcggcaacaccctgaagcttgtgtcgtcatgctgtcggagacactggagctggagttcttccaggaatttgtgaaggaagggtatgttcctgtagttctcattctgtgactcttgttaagggtagcatttgattaatcataggtgctaattttactatctaacactaattaacaaagaaatgagtttatgcttctgacccaaaacctgaaatgatttgattggtatcatatagaatccaggattactatttagtgtttgatgtatcacatactactaatattggactcattagtaatgaaactagcaaaaatgtttctggagtcttgtcttattgacacatggagtgaaatctgatcaagtagaggggcctggtatatattccagtttgacttaatttaacaatttttaaatcttacaaaatacaaatgatgctcatagaagtagaacctaggtaattcctagccatttcagtgtttgaaattctgctacagacagctaaggtgttgtcgacatgttaatatgttattttgaatcagcttatagttttcactaccagaactctctctctctcaatggccagtgtccgttggtggctatattgtactgttatttgagctctctctctctggaactcattgtattgttagtggcacttaaaactcaattctatagttttttctgttttgtgatggatttggttcattttctgccactttgcttggaaagtctatagttctgataaccaaactgtgctcctctatatcttttcttttcagctagaaggatccaagtccttcccatttccagtaaagaaatggcagatagtagctctttacaactgaaaggaaagcaacataaaaagagcagctaagctatcacctaaaagatgccatcccatctgttgtagtgacctagcagagagttcagaatgtaaagacacaacgccagctactttagagcttacagacagattactggctgaaaaccaacgaaagaaacaggatgattattgtgtcaaaacacacactcctctttatatgtgcatccatgcatgctttgagccagagtaacccatttaaccccttccccaaatagccacccatgacctacctcaccccattgttttttctcctccattaccttctgtcctgtgtcattaggtcataaacagttcagtaactaacagtctgacatattgaatgctcaacagctacacacaccatgattactaccttgctcctgctgtgctcaagttttttttataaccctgttacttttgtaatttgaagatacatttattttaacatttccttttgttatttgtggagtgggaaagcaacttatctatatattaccgttgctactaactgctaggtactggagtcaaatcatctgttgtcagttgatttcttatattaaataataaaattaagatatttctccacagtaactattcatttaatgttatatttgaacttcacatttacattccagaagcagcttctatttattttgtgtgataactaatgccacttgcatgtgactggtttcctcttacagatacaaagttgcagttgcgttgccgaatcttgatgaacttttggagggcactctaacccatgattttgtatcagtgtggaatgaatggcggaaaacaaaatactaccccttgcattacagtgagctagtacgccttgctgctctttacaagtaagacaagaaaggaccagacttgtttagttacatgcaagcttaacttcactctttacaatctgttagaagaatatagggagatgtcaatataccttcttgaaaataaaatctaatgtagtaatatatccatgtagacgaatccacaagtaatttactcttggtgaaagaataatatctcttacaaaggaactgaccgacaataccactgaaagaagatgagcagctttctgctgaatttaatacactgatttgtaatatatatataaattcatatgcctctaaaagtgtaactagcatgagcgaacatcaaaatgcaaatacagtcaccaacagattaatatattcaattgcttacaaacagccaaagccaaatttacattcatactgaattgaaatacttccttcacaaataaacattcagctaaacagagcataaacatcttattaagaggtgtaaaatgttctttcctttagtggaccactttagaatttctctggagctgacttgagctctgtgtatggattctcagttctgctgagctaaatcagtattttgtttgaatgctgccatgaaaacagttgagtagttgacataacatcaaaaggggggaatcttcacattcacgtatgaaaaaaagatgagtgctacaaactgtgcgaggtttaaatgccagtagcattcttcctgtaaacaaaggaaaaaaagttgaccagcaaatattatgagacttcatagaattttactttcgtcatactttattattactggaccaatagtttgaaagacagtatacttcaattttaattagttatattgctatttcgtctgaactaaacatagtcatgaatacatgtttagttccttttcttttttgaataggactattattgactgctgcctctgtgccctatctgcagatacggtgggatataccttgactctgatgttgttgttcttaaacctttaaacgcactccggaattctattggtgttgtcaaacaagtttctgaaaattccagttttagtggtgctgtattagcatttgaaaaaaacaggtaatagtattatatacttttctttcattgtaactgtttttttttgctttaattctggtcatcttggttaaaatgatatgtggtgcttttctgcattgcaaattggatgtgatttagccagttacccttcaagggctggcttagtaagccaattgatcaagagcaatgtcggaaacgttgttcaaatgtcatcaaattaaatgagaggtctgtgatgtattagccgggtgttactgttatggaagtaataagtcttttagtatgctttaataaattaatgcaatttagtcgaaagcacaagtcagtactactgtactgttatctactccctccgtcccaaaatatagcaaccttgtactggatgagacacttcct

SEQ ID NO: 9354 - DNA, 5168 bp, Oryza sativa
  unsure (1)..(5168): unsure at all n locations
ttttccctttccttttcagttcaatcgcaaaccagcaagggggattgagtatttgttattaaataagttgatcgaaaataatgcaacatctgtagctcactttctcaagagcaattctcgttggtaaggtgattcaagaaacataatgagcttcttgcagtttttctcaagtgtaaaagaaggattagtttactgttattgctaggtgggactaaccactagtttttgtgaactgtaactntgcaggctatgattggtgaatatttgggacaacatgaggagttccctcttgctgtgatgcatgcttatgttgattcaatgaaattttcgggattgaagtttgatgctgcaattcgtgagttcttgaaagggtttcgccttcctggggaggcacaaaagattgatcgcataatggaaaagtttgctgagcggtatgtgtataaagtcttaatgctacttttatttgacatgtcaaccactggtctcaaatggtatattatgacttgcaggtactgtgctgataaccctggacttttcaaaaatgcagatactgcttatgttcttgcttatgctgttataatgttgaatactgacgcccacaacccaatggtgtggcctaaaatgtcaaaatcagatttcgtacgaatgaacactgcgagtgatgcagaggaatgtgccccaaaggagctcttggaggaaatttatgattccattgtccaggaagagataaagatgaaagacgatttccctgattcagcaaaaactaataaacccagacgagaaacagaagaaaggggtgttgtcaatatcctcaatttagctcttccaagactgaagtcagcaagtgataccaaagcagaaagtgagaaaatcattaagcagactcaagcacttttcaaaaatcagggacagaagagaggtgtttttcatgttgctcagcaggtcgagcttgttaggccaatgcttgaagctgtaggatggcctttgcttgcaacattttctgttaccatggaggaaggtgacagcaagcctagggttgtgctatgcatggaagggtttagggctggcatccatcttactcgtgttcttgggatggacaccatgcgctatgctttcttgacatccttagtgcggtaagcaaattattttttctatttatggatatacactggttgttcttgggcaaacttctatatgtaaattcatttattgtctttttaattttatgaatgtaatgcgctaagttatatgaatgcaatatcttatgtttctttcttaaccttttgcaggtttacatttttgcatgctcctaaggaaatgcgtagtaaaaatgttgaggctttacggaccctccttggcttagctgacacagatatggatgctttgcaagatacttggaatgctgttttagaatgtgtctccaggcttgaatatatcacttcaaatccttcaattgctgcaactgttatgcagggatcaaatcaaatatcgagagaatctgttgtccagtcactgaaagagttgtctgggaagcctgctgaacaagtctttgtaaacagtgtaaaactaccaagtgattccattgttgaattcttcactgctctttgtggtgtttctgcagaagaactgaaacagacacctgctcgtgtctttagcttacaaaagcttgtcgagataagctactataatatggctcggatacgtttggtatgtcctgtctcttattgtttgtttggtattcctgttacattggagttcgattcaccacatctttgcagaagtgcaaaactagttggtcaaatgtgtttccatgttcttaaagaaaacctagagtagtatacctgtacttctggagccattttgatttgtgtaactgaacaccagcctgtcatctgtttgaagtgcaagtgcaatgcacatcaacatcaggatctttttataactgggaggcatcccaatattaaattttagctgtgatatacaatgtcttgaactcatgactaaatattttgttttttcatctgagctagtaacttacatttatgcatgtgcatgtaggtgtgggcgagaatatggtctgtcttgtcacagcattttattgccgctgggagccaccacgaggagaaagttgccatgtatgcaattgactcattgaggcagcttggtatgaagtacttggaacgtgcagaattgaacaaattcacatttcagaatgacatattgaagccttttgttattttaatgagaaatagtcacagtgaaaaaatccgtggtctaattgttgattgcattgttcaggtaggccttcataagtcttatcaaacaattgaaatctgatgatctggtgcttttatataaaatgatgttgtaatgaaaaatcttgccatatgaacatgcagttgatcaaatcaaaagttggcagcataaagtcaggttggcgttgtgtgttcatgatattcaccgcggcagctgatgatgagaatgaacatattgttgaaagtgcttttgaaaatgtagaacaaggtaagtttaaaggaatataattgctagcattagaagtgtttcttactttctccaaaaatgttagattccattatcatcattgttttttgattaaatggatgtgtttggcagttatcttggagcattttgatcaagttgttggtgattgcttcatggactgcgtcaactgtcttattggtttcgcaaataataaatgcacacctcgaattagtttaaaggctatcgctctcctacgcatatgtgaagaccgtttggcagaggttaggatggtgaccacccttatattcacatctggacacttgatctttttggcctgatctttttggcctcattcttttcatttgcagggttgcattcctggtggtgctgttaaacctgttgatgatgttccagaggcccattttgatgttactgagcattattggtttcctatgctagctggcctatcagatttaactttagaccccagaccagaagttagacactgtgcacttgaagtgttgtttgatcttctgaatgagagaggtcataaattctcctcacctttttgggagagcatttttcatcgtgtattatttcccatatttgatcatgtaaggcatgctggaagggatggcctttcttctggggatgactggcttcgtgataccagcattcattctctgcagttaatctgcaaccttttcaatactttctacaaggtaatgtatgttgttctcccctgctgattttagttgcttcctagaaattgtgtgggtctattagaatgtcaactgtgctgaaacattttattttctagttatttcctttatctttaaggcaatacaattcaatcgtcctgcacataaatcaagtgatccaattggaaagttgtttgttggttcttattgtggtctttgcaggaggtgtcatttatgcttccacctcttttgggcttgctgcttgagtgtgccaagaaaacagaccagactgttgtttcaattgctcttggagctttagttcatctcatagaggttggtggtcaccaattcagtgacagcgactgggaaacacttctaaagagcattaggtatctcctcaagttctattttcccattaaaattaattgtgcttttgttgttcacatattaatgttaatatcacttgtcagagatgcatcatacacaacccaacctctcgaactcctcaattcagtaggatttcagaaaccaaacaatcagcaatcactttcaagagaagcagagaccaacggtcttggtagtagttaccatgatagcagggaaggaggagcttcaataagtcatattgatgaacaggatggtcatcaggaaacaaatgcacagactagcctagacaattcagaaggtgtggtagtcctgaaatatccattaattgttttatacaatgacaagtgcttccatatgaactggaatactgataattaacctaattctgtctttctctaggtttgccatctccatcagggagagcacaacctgcagtttccccacggggtcagacctttggacaaagaattatggggaatatgatggacaatcttttggtcaggagtcttacttccaaatcaaaaggtcgtacagacgatattgtgccaccctcacctgtgaaggtacatgttttttcctcttgcacatattgattaggtattgatgaatattatgatttgaacattagcagatcgtactgtcattggtacctttccttgctatatcaatacatatgcaattgcatatccttataaaaatcactagtaatatttttttcctgttttggttcctatatatctggcaaaaatatggaaccgtgcagtaatttctggacacctgagttcattgtgtgtgaacagagctagctggaatgtttgaaatcagtaaatctgtagacacagttataaacttttgaaatggtattacttcgttgatatgctagccaattttgtttgcatattataagtagtaatcaacgcataattttgaatatatgtattctcttctgacatgttggctgttgtccattgttaatactatactatttgctgaaagtcatgttctagctcatctggcgtgacattcatgcacctttgaacttaataatatcagcaacataccatcattacacttggtactgaagtactgagtgggattttctccatagttggcttgtttttcatatgtatttaattttcctgtttgttgatcgaaggcacctgatgctgacggggctgacaaaactgacgatgaagagaatcctatgatggagactgttaggagtaatgtatcactcaattactgctacttggggccattgacagcatacaggtactccatatgatggttattagtctgatgtatgaacaaattctgcttgtgaacatgtactaacttgtgcttcttgatggactttgcagaagaggtactggagcaggctaaaaaccacacagcagactgcaataatggatattttgctatcactcctagaatttgcttcttcctataactcaacttcaaatcttcgaaccaggatgcaccatatacccccagaaaggtaattcttaaagactacatgcaatttaactttccaaaaggagttctctaacagttgaaatttaattgtgtaggcctcca

SEQ ID NO: 9355 - DNA, 7371 bp, Oryza sativa
ggtagcagatgccttgagcaggaagagttactgcaacgtcgcatgggtagaggaactatgctgtgaggttcaacgtgatttggaacatttgaaccttggtatagttgagcacggattcgtggctgccctagaggcacagcccacactggtggagcaggttcgcatagctcaagcaagtgatcctgaaatagcagagctcaaaaagaacatgagggttggaaaagcccgaggttttgttgaggacgaacaaggaacaatctggatgggagaaagattgtgtgtacccgaaaacaaggaattaaaagaccgaatactaaccgaggctcatcaaactcaatattccattcatcccggcagtaccaaaatgtaccaagacctcaaagaaaagttctggtgggtcagcatgagaagggaaatagctgagttcgtagcactctgtgacgtctgttaacgagtaaaggcagaacaccaaaggccagcaggtttgctacagccacttcagattccagaatgaaagtgggaagaaatcggaatggatttcatcaccggtttgcccaggacgtcatcggggcatgattctatttggatagtcgttgaccgactcaccaaagtggctcacttcattccggtgcacactacctactcagggaagaaattagcagaaccctatctggcaagaattatgtgtttacatggtgtacctaagaagatcgtgtctgatcgaggaagccaattcacttcaaagttctggcagaaattacaagaagaattgggaacccggttgaatttcagcactgcttaccatccacaaacagatggccagactgagcgagtcaatcaaatactagaggatatgttgagagcatgtgcgcttgactttggtggagcatgggacaaaagcttaccgtatgctgagttctcgtacaacaacagttaccaagctagtctgcagatggcaccatttgaagcactgtatggacgaaaatgtcgtactccgctcttctgggatcagacaggggaacgccaattgtttggtacagaagttttaaatgaggcagaagagaaagtcagagctgttagggaaagattgagaatcgcgcagtctcggcagaaaagctatgcagacaaccgccgaagggagctcgctttcgaaacaggggattatgtgtatctccgtgtcactccgctcaggggagtacatcgcttccaaaccaaaggaaagttggcaccacgctttgtgggaccatacaggatcttggaacgtagaggtgaagttgcttaccagctcgagcttccctccaacatgcttggcatccacaacgtgttccacgtctctcagttgaagaaatgtttgagagttcctgaggaacaggcaagtccggatcacatcgaaattcaggaagatctgacgtatgtggagaagccgactcgtatcctcgaaaccagcgagagaaggaccagaaacaaagtaataagattctgcaaggttcagtggagccaccactcagaggaagaggccacttgggaaagagaagatgagttgaaggccacccacccgcacctcttcgccagctcttccgaatctcggggtcgagattccgtttaaggggggtaggtttgtcacgctcggaagtttcccctttttcttgctttaaaaaaattggttaaataatttgtccgaagaaattatcttaattaacctagagctaattccataattaataaatgcaattaataattggaattggcattgtgggatttttttcttgggttccacatgtcacaatatattaacaggatttttagtggaattttcagagccttggaaataatttttaccaattaaaaatcaccaaggtgcaattttaatcccaggaaaatcctttttcttttttttcttttccctccttttcctttgttgggccgtcggcccatccctctcccgctcggccttccccttgtgggccggcccgttctccttccccctctctccgggacgctgacaggtggggcccacctgtcaggtcgtccccttcctccagccacccgcctccgacggcaaccgccgccgaatccgccacgccaccgcctcctccgctcttcccgcgcccacgccgcgccgctcccgcgtcctccccacgtcgccgcctcttcccccgcatctcccggcccgcgcgcgcttgagagggcgggattcgatttcgaatcccacccctctctctctctctcctccccacgtcgccggccaaatcgggagggttcccggccacgtcctcccctcccttgcccataaaagcactctcccgagccccctctttcgttttccctcattcgccgcgctctcccgtgcctcctatcgcgctcgcgccgcttgttgctagcgccgccgcttgccgtcgccttcggccgcgcgtcactgccgctagggtcgccgccgcgccaacccaccaccgccgttagcttcgccgccgcgagagctacctcggccgccgcttcgttgccgcgaatcaccgccggagctccgatttccccgcgtcgccggtgtgctcgccattgtttccatctccggccggccattttggtcgtcgcggtcgctttctccatccctaacgcctctccatcttctcctagggtgtcgccgccgcccgtccgtgcctccgcatcaccggtcgtcgccgccgctttcttccttcgcgccggccgccgtgctcgaaggtgaggaatcccctctcctccttcctttcctctctctcccatgagcgccgccgccctccgcgcgtgcgccgtcgtcttcggccgccgccccatggctggccggccggcttgagccgtgccgagcatgccgccgccacctccctcccttgtgccgctgccaatggggcccacgtgccggcgcccccttcctctctcttgaaccgctgacatgcgggccccacctgtcggcgccgccccccccttggatgacgtcagccctgggctttattgcgcaataaagtgattaaggacttttctttattagtaaaaacacagtttatcttctaaaattcataagtaattcatccgagctccgtttaagtccattcaagtctcagtaaatcaagaaaaatgcaaagaatccattaaaaatggttttgtttcctgtttctgtagtcttatagcatgtttgcttgtgtgctctgtttgtcgcgtaggtttcggccgtttcgtcgttccgcggtttctcgaagacgttgctgaggtctcatcagtgcgagagcaaggcaagtcattcaatacgtttgatcatattgtacccaatttacaaatatcccgcatttctattaaatgttgcatccttttacaatgtaatgtgggatgggtcctattactcagccatttattgtttaccatatgccattgataacttgggtatcaaaatgactagatgttggcctaggaaatgcttagccatgcttagttcaactagcacacaaatggggatcacattattacatagactttgactatgagcatagctttagattggtgccaccgcatgggtgtcagttaattaaaatacactgaatggtgggctgtgggtgcatggttttgctggtcgcacccatggcagttaaggaccggttcacgggaaaccctgggagacttaccgtgcttaccacaagcgggagtgggtaactgcttgatctgaagtatagctcgaccctttcctaggcaccggtggcgagggtgggcgtgatggagttgggtcggccggggtgtccggttgtccagctgccggattcaccgcggcgcaagaggggaccgcccactgccttttgaggggtgggggtgaaaccttagcgtggtgtggatggttaggggagggttatgtggagggtcttgtcacgatttccccctttgcagtatcatggtgatacttcggggcatggcgacatgtgtggaatcgtgtcttgtgggtacagttgtacacctctggccagagtaaaactattcgaatagccgtgcccgcggttatgggcgatcaaccagattcaccgtgattagtctcacccctagtttagcttaatgaactggtgtagttcaggtggttggttgggcctgttgcaacgtggtgtagcgttggacagtgattggttaatattgattaattactgcaactgttttactgccttcaactactgcttttaaatgctagctttatgcaaaagaacctctagcctcctttggttatatcctgcatcatacctcctcttccggtatgacttgctgagtacagtgggtagtactcagtcttgctctcttttccccccacaccagagctgaagatcttccttgttggagctgttttgccaaagtttgtttcgtcgctgccatcaaggtttgcctgtggagtggagtcgctcgctgctgaagtcaagcttcccggtttagctcgcttttatctttcccgctgcatttgtaatcttttctatttttgtaagacgtggatctgtatgtcaacaattgtcgtttgtgtaccctggctggtcctggacagggatttaatgcacattcagcttagaaattctggttcgagaatttctgggcgtgacaagggagagagcaactcaggcacaggggagaaactaacaccggggaagcagctaagaaatcggatcagactcgcggcctccttttctatcaggagaaagaacgtggacgcgctgttgcggagggaatcgtgggaacgtgggttagtggctgcaaaaggatagcgacgtgacgtgacgtgacgcacgcacgccgccagccagccacgcctcgcccacgcccacggcccggcccggcccggcgcgcgcgcgcgcgcgcgtgtggcattccgacccccacctcaactggtcaacagggagcctctaataactccctatttaggttgagatatttctcgcttaaatcctgaggtggtattattatccttaacatttattatgggcctttgagatttaatagaataaattgggcctagcccaattattctaacaatccccaccaaatttcaaggctcataagaaatgttctcaatgttgtgcctgtttgatataccagggttttggtggagactgttaagttgaacttccacctaggaaatgagctacaccagaccacaacttaacaatggactatgccttgaattgtaagttttgtgtgatcaggtttcactcagaaccttgactggtactgggctgccgttcgcatcccctctgtttggagcatataagttaagctccaggcctttcatgagtatctagagattgcccaaatctcatagactgtgactagcagtcgaactcatataggtgtgttccttctgagatgttctgcaggtcaacatctctgcttggaaaagccactcggatcacattaagacataagccatcctaccatgcaggaaagaagagaagcacatcatggaaatgagcccttttcaggggtctcttctctcagtcacacaatagtttgtttcaccatccaaattcacgggatctccgatcacaatggacaggtttccactattatgcaaccttaggtgggtatcaagcccatttccctcgatgcactgtctatcacattacgtggtagccccttggtaaactgatctgccagatttctagccgtttggacatagtccaatgctatcactccggagtttttctgctttctgacagatttcagtcttctcttgatgtgtctagatgacttcatgttgtcctttgaactgttcactttaataatcactgtttgattatcgcagttcattaggatagctggcactggtttttcaaccaccggcaaatccatcaggagttcacgaagccactcggcctcaactgtcgcagtatctagtgctgtaagttctgcttccattgttgacctcgttaagatggtctgcttgcaagacttccaggaaacagcgccacctccaagtgtgaacacatatccacttgtggcttttatctcatcagcatcagatatccagtttgagtcactatacccttctagtacttttggatacccggtatagtgaattccatagctcatagtgccctttagataacgcattactctttccagagcctgccaatgatcatctcccggatttgagacaaaccggctcagcttgcttacagcaaatgagatgtcaggcctcgttgcgctagccaagtatatcaatgagccaatgatttgagagtatctcagttgatcccttgctattcttcggtttttccttaatagcacgctgggatcataaggagtaggagctggcttgcagtcaccatatccaaagcgactcaaaaccttgtccacatagtgggattgcacaagtgtaatcccaccctcatctcctctttgtagtttgatgttaagaataacatcagcctctcccaaatccttcatttcaaaattcttagacagatagtctttgacctcctcaatcacattaaggctggtcccaaagatcagtatgtcatcgacatacaagcacaagatcaccccttctcccccaccatagcgatagtatacacatttgtcagcttcgttcacaacaaagcctgcagatgtaagcgtgatgtcaagcttctcatgccattgcttaggtgcttgcttgaggccatacaaggatttcaatagtttacacaccattccctcctgaccttctagtacatacccgtctggttgatccatatagatctcctcctccagctctccgtttaggaaagctgtcttaacgtccatctgatggacgagaagaccatgagaggctgccagagcaagtagtactcgaatcgtagtcaagcgagcaactggtgaatatgtgtcgaagaaatcctcgccttccttttgggtataacccttggccacaagccttgccttgtacttttcgattgtaccatcaggcctaagctttttcttgaaaacccatttgcatcctacgggcttgcacccatatggacgctcaacgacttcccaagtaccattagacataatcgagtccatttcactgcgtactgcttccttccagtagtcagcgtcaggagatgaatatgcctcttctatggttcttggggtgtcatccacgaggtatacaatgtagtcatctccaaaggattttgcaaccctttgtctcttactcttgcgagtatttacaatggtgccctcctcaggattttcctcaggcgtttcatcattgtgttctatcggggcaaagtgctcatggggcatgacagtttctttactataaatgctaggtgtatatttcataagaaattcattctcaaagaatgtaacatctctggactcaaaaaatgtaccaacatgcatgtcaggtactcc

SEQ ID NO: 9356 - DNA, 6317 bp, Oryza sativa
actttcgtgagcttcctgaagtatcagctgtttaagttctctgttatcgggaacacatacccgctttccgttccatagggttccgtgttcatcctctgtgaaaccagcggctttaccctgtttcatattcttgaggagtccatgcatgtccggatcattcttctgagcctcgcggatttgatcgagcaaggtaggcttggcttccaacgcagccaagaatccacgaccaactatgcttaggttcagggcttccatctgttggttaagctcgggcggaatgccacggacgttaagagtgttgcaatggctctttcgacttagagcgtcggcaaccacgttggccttaccaggatgatagtgaattcccacatcatagtccttgatgagttctaaccatctcctttgccgaagattcagatccgactgggtgaagatgtacttcaaactcttatggtcggtatatatttcacagcgattcccaatgagatagtgccgccagatttttagagcatgaaccaccgcggctaactccaagtcatgggtagggtagttgccttcatgaggtcgtagctgacgtgaggcataggctaccacatgaccgtcctgcatgagcacgcaccccaatccttggcgcgaagcatcacaataaaccatgaaatccttgcgagtatccggcaagattaacaccggcgaggaaaccagcttttccttgagagtttgaaacgccttctcgcattgcgggctccacacaaatctctcttccttcttcaacaactgtgtcatgggtcgagcgattttggagaagttctcgatgaatctccggtaatatcctgccaaacctaagaaactgcggacttgagtaactgtcttgggttgcttccaatcggtgacggcggtcactgtttcggggtccacagcaactcctttagcagatatcacgtgccccaagaatttgacttcggacaaccagaactcacacttgctaagcttggcatacaattgatgttcccgcaactttcccaacaccagacggagatggtgctgatggtcttcctctgactgtgagtatatcagaatgtcatcaatgaaaaccacaacaaacttatccaagtattccatgaacactttgttcattaagttcatgaagaaagcaggtgcattggttaaaccgaatgacatcaccgtgaattcatacagcccgtatcgcgtggtgaatgcggtcttcggaatatcttcttcacgaatacgtaattggtgatatccgaaacgaagatcaatcttggagaatacagtggcacctttaagctgatcgaacagatcatcgatccggggaagagggtacttgtttttgatggtgacttcattgagagctctgtagtcgacgcacatcctcttcgtcttgtctttcttctccacaaaaatcacaggagcaccccatggggaagtactcggacgtatataccccttttctttcaactcttccaactgtttttttacttcggccagttcatttgctgccatacgatagggtcgcttgtgcagaggagtggttcctggagcaagatctatccggaactcaatctctcgcttgggcggcataccgggtagttcttccggaaacacatctccgaactccctgacgatggggatttctgacagtcctatctgatgcagttctgaacttctgacagaggttgggggtgcaaagaaaacaaccggttgttccggccctcggtacagagtgaccgtgcgtctcgcgcaatccactactccttggaattgagtcaaccaattcatcccaaggatcacatccaagttcttggtgtctagcagaatcagatccgagggaaaaggaatcccctgaatttctataggaacggcagggctatattactttgctgtcataacccctccaggggtggtgatgagcagagggttcctaagcctttctacccccaactgatttctccccacgaatgtcacagatataaacgagtgggaagctccagagtcgaacaaaatggtagcagggatggaatgaatgaggaacgtaccaacgatgacgtctggggttgtcagcacgtcctcggccgtcacgtgattcacacgaccccgaatgacatcctttccaccgttgttggagcggggaggcgcttggccttgctgacgccttggctttgggcatttatccgcaaagtgcccgggctcgaagcagttgaagcacagacgctgctgaccttgagcgtccctgcggccttgaccaggctgcacagttggcgtaggaggacggggcgcacgagtcccttgctgattctgctgctgctgcggctgtgggacgcgcaccacgaattgaggtcgaggcgcggagcgaggttgttgctgctgctgctgctgcgaggaggatccccctggatagggattggtgtagcggaccctttggttagcaccctgttgattgcggaaattcgccaagcggcgcttgtgcgactccagctccttgtgcttggcttccaagcggatgctcttgtccaccagtcgttgaaaatccggatagtccccagagactagacgaacggacagctcagggtccattcctgccaagaacttctcttgcttctcctcatcttcccgcacatcctccggggcataacgggccagactgttgaactcatgcaaatactccatcacggagcggttgccttgcttcaactctcggaattcccttttcttaagagccacgactccagcgggcacatgggttctccggaaagcggcggtgaagcgggcccaagtaataggctgtccctctggctgcgtagcctggaagtggtcccaccatagagatgcgggcccctgcagttggtgggcggcgaagatgactttctcctcatcgctacactgcaccgtgtctagctttttccccacggcatgcaaccaatccaacgcatccacggggttgttggagctagagaaggtgggtgggcggatgcggaggaactcggcgagtttagagtgttggggaggtggtggtggagcattctgttgtggcggattttggaggtggtggaggaaagcagtcatcatgttggcttgctgagcgaggatttgggtgagaatggcgttggtgtctggtggtggtggcggaggcggaggaggaggtggaggtgggttgccctggtggttgtggttgctgccttcaggttgattgccatcaccggtgacagcggttctcctggtcgtcaccatctgaaaaccccacacagaaccagcaaacagagagagagagctgacgattaaaactaaccacccacgactactataattcttgaatttattactgctattaaattggttcattaatgttcaagttgcttaggcaaataaaataagacaggctccgacacagttatgccacacaccggcataactatgccccacacaactcaagaagacaaacgaggaaaaacacacgcgcaagcctactaactgctcgtctaccgctgcgacgggccaggacggaaggtgagcaacagcgcaccctccgtgctaccaacgccggaggcttccccctcctggggaaccacgggcgcgggctcggcacgaggggtctcgacaaagcaggtccacgccagggactgacgaaccagctcgggcctggaggtgctcttgcgggcggtgatcttctggctgcggcaaacgcggcgacgcttggggcggcagtcctctccctgggcgatcttgagctgatgcagctgcgcctccaccgcgtcgaggtccttcttgagctgcaggttctcctgacgcagctccaggatcttcatgttgttctcaaccatcccgcggcgtaccatctgatggaagtcgatacgagccgcgtcgtacgcctccaccatgcgcgccaggtgcacgacggtagcatcatcctccgagctagcatcccggaaggtggcgtagtcgcgggctcctccgcgacgagggtggtagcggtagggcgagtgctgcaactcgtccgggtagcgctggtgaagagtgccgatggcgaggagagcggcgttctggcaagcggcggggaaggaatctccacccgcggtgactgccagcgaagtccgctcgggggagccagagaggatcactgcagtgacctcccaaccagcgtggggctccgcgtcgtcaccctcctgatccggaagcggcctggcctggtagtccactccatgtggataccccaagaccacgcacatgcctcgcagctccaagacgaagccagtcatgtccaaaccacgacgggtgacgctgccggccatctacaaacaaaaacagaaagaaaaacaacattttaaagatcagattttggcgataaatgaagcagcaagacagagagagactagaggattttcacaaatacaagagatttttatttcgaaaaatactgctaaggcttgggatctacggctcgtcctagggtcaagggtagctctgataccaacttgtcacgaccggaaataacccaacgggctttcctgacgtgcgtgcattaatccttgtcccaggaggcaaggtacaccaaaagttgatacaattcagagtttaacaagcggaagcgtaaatagttaacttattacatgggcagcgaaggcccaacacacacaaagacaaacgagaaacagcggaagactagggcgacgaccacaggcgcttgacggcaggcacgagctagacaccaaagccttcatcttcaaggagctcctcttctggacttgggaaaaattgagcaagactgagtacaaccaccgtactcaacaagacacacccacaaatgcagaataaatgcaagggagtacaaggaattataccataaaggggttagggttgcagtaaacagcatttaaagacatttagttgctcagggctattttgtaaacgcgatcctagaactaaacaatattattaatcaaggccgtgaacccacacgaacctgccttaacccaaggcctatgatgattcagaccgaactggcaacccgaccctgggtcccagctcgtcctaagccaacccaggccaaccattccacattttagttgttaagcaggttttaagaattaaaacactaacttgggtacattgctcggcttgcccataaccgagggcgcggctattcgaatagattatactctgatcagaggtgtacatctttacccacaagacacatctttctcacgtgcaaccacgtgccacataccaccacggtatacagacgaaagacgtgacatagtttccaacccatcctagccatagacaagagtaccgacccaatcccacctacggccggaacccccgggacaggcaggcaagactgagcccctagcagcagggcaccaaccctctgccatgacatctcgactaccgggccgcagctcgtgtagccttcatttgccctggagaatgtccatcgacccccgacttcatccatctccaatccgtgtacttttgtttatgactagactgagccacaaactaagccttacccactagacatgtggaagtacggtagtgctttgcaacagaggcccgaagaccggtccttatatggccgaggtgctaccatcaaaaccatgcaccccgagcccagcctaaaaccattttggggacttttgaatagaaggagcggtgtgaagccaattccacaataaaccaacaattccaaagtgtccaggtgatatgaatatttcccaaagtctagagttgaaaaaccacctaatgttacctaattaaattgcgaagcatctacctaaaattaaactagtggtgccatgagtagagtgtccactagttgaggttttgtttattctagggtgaacaaggtaatattaataacaataacaataatcataaggtcataacaaaggtaaataggcatggctaaataaaacagtgataacgcgagaatttaaataaagcgataatgcaataatttaaatcaacataattttataaacggggattcaatatgatcaagatgatgtgtcttgccttgctcgctttcccaaacgtcggcttcaacttccacgaagagcggatcttccgaagctgcagcgtctacacgaccaacggaaaagaaaaggcttttactctaaataactccatataacagcagaaacaaagcacaaaaatgggttcttgacttcttaaggaaaaattagagacttgaacggtccaattccgagttcaaatggccaagatatggccatttgaagtttatatgctctttaaatgaatatttgcgaatttcttcatttaaattttaattaaaaaatggg

SEQ ID NO: 9357 - DNA, 36971 bp, Oryza sativa
gtttgactttgaaacggagggagtaccgttgctccagtgtatcaaaacaacgcattgaaaacataccattacgatttaattccatcactagcgcaacttattattgacgccgcgcttattagctcttttttctccctgatgaggatcaataattcgttacctcatgctgaaatctgcactgtagaatacctaagaccgacgtcgaggtctcgaggatgaagaatttggcacgccaaaaccatcctaagatcgagaggctgtgactgtgcctggtggcatattcaagatgtgatcaggttgatgaagacagcattgcacagaaatgtcttcgattgaatcaatgagcacgatcattggcgtgttttgcacgaatgaccaaaacagagacgatgatcggacgaagagatgaaacgaatgcaactcttatcgatcaagacatcggcaccgttactaccaaaggttcttttataggaaaagtattggtggagaccgggtgtcttataaccggccttatctacagcctcgccccggatgaatgccaaaaccatcctatgagcgagaggatcagattgatgaagacactaccattgacgtgttttgcatgaacgaccaaaacagaaaagatgatcggacgaagagattaaactaatgacactagcccattcttttctccaacaagagctggataaagattaagatttttatggcacgctttttaaactgttaaacggtgtgtttcgtgtgaaaattttttatatgaaagttactctaaaatatcatattaatatatttttcaagtttgtaataattaaaactcaatcaattatacgttaataataccatctcgttttgcgtaaaaaaacttattctttattttcatcttaagaaaaaaaaaacatcacaaagatgaccagaagtagccctcgggcgtgcctagttgtctctctctctccccctctctgtcgaacactatgccagaatatgaccagtggaacgaacacaaggtgtttggtgctgtcaagtggcagcatttctgatagtgttgattgcaaatgtaaaggatacgttagcgggggctttaaccacgactccaactttggatttgtttggagagcttaagattttaagaaactactgattggcagtgtcggtgacatgggaccgggagtatcatgacttagagacttgaggcagacacgatcacccacgtggcctaaccccctcgggggggtcgggcccgagggtgatacggccgcccttctctttgtctccccgaggggtcggaccgctcccgtctcggccccgagggccaaggcgccccgaccccttgtgggttttgcgccgcgtatatagggtaggtgagcatagcggggctcacctaaccgcatttattgcggtttggacgagcgcgtcacgccacatgtagcgcagtatggcacgctcgtttatccggtctgtgaccggtcacagatcggtcagattgcgggttaggtggcaacaggcgatctgacacacgcctcgccccgtcccgtcaggatgagagtctctaggcactcgtccctagccggagccagcgtgctagctcctggagatggcacgttggtcctggtcagatatatgccaggctttatcccaaccattataagcaagacgttgtatgaagaagggcgaacatgcagattgctaaactgacacgtggtggacaaaggtgaccggtctgtgactggtctgacactggttatgtcgccggaagacaaccgtgttcccacgttgcacctgcttccggcggagtggaggtaggtatgggccgtcccatcagaagggtcactcgggcagcagctgttgcaaatctccgcccatttatgaagagatgacagggtgatccccgaggtcagacgaacgaggacgcgtggccacactcaaaaacaggcagtgtttcagcttccaagagaaggcaagccaagttttactatagataggatgggcccccacccaaaaagagagagagggagaagtggtgcatgtggtatccccttgagatataaaaggaggaccttgcccacttaagaggcggggctggaaggggggatgatctggagagtagatcccacgagaggaaaaaagggagaagagggtttttagagtaagagctctctggctctccagctctttgtagcttcttcatacacagatccaccagaacacaggagtagggtattacgcttctcagcggcccgaacctgtatacatcgcccgtgtcttgtgctttttccattctcgcgaactttccacagactaggagcttagaatctcacccagggcccccggccgaaccggcaaaggggggcctgcgcggtctcccggtgaggagccccacgctccgtcaggcagatattttataagaatatggagaagtttcgtttcttagattatggcttctagttagtttttgaattttataactacaatttatcaggatttggatgaaaagctaaattgtttggaaattttgggagaaactggagctaccatagactccccaaacaaaaccctttgtgcgccacgatcggttcgcagcgtgtgccatcccacgcgctcggttcacacaccacgcagggaggctctggctcttcatgcgattctaacaaacctaacaaaccttatctaaaagagaaaaaacgaaataaagaaagagaaataccgaaaatactggtttgacacgcaccaggattttctaaaaaaaaaatccaacagtatcgatctaagacatcgtcaccgttattataagaggcatttgtaaatttgttatcgattttttcaatattgtaaggatgccactcgaatgatagttttagtagtatttttacaattttttagtggcagtcttataataacgattcaaaatagtggcaaatttgcaattgcccgttcttttatacgcagagactccgagagtcagtgcaagcaagcaggagctcgtcactgtcaattgacaaaattcagtagcaaatcctactctgtctgcatcaatggctggcccaaccatcgtcctcctcccggcctggggatccggccacttcatgtccgcgctggaagccggcaagcggctgctcgtcgccggcgggggcgccgtctccctcaccgtgctcgtcatgcaggcgccgacggagatagaggcgtcggtggtcgaggcccacgtgcgccgggaggcggcttccgggctcgacgtcaccttccggcggctccccgccgtcgagcaccccaccggctgcgaggcgaccgaggagttcatgtcccggtacgtcgagcgccacgcgcaccacgtcaaggcggccatcgccggcttggcgtcccccgtggccgcggtcgtcgtggacctcttcttcacgcccctgctcgacgcggcgcacgagctctcgctcccggcgtacgtgtacttcgcctccaccgccgcgttcctcgcgctcatgctgcggctgccggagctccgggacgacctgaccgtcgggttcgacggcatggagggaaccgtggacgtgcccgggctgccgccggtgccgccgtcgtacatgccggtgtgcctcgtgagcaagacggtgaagaactacgactggttcgagtaccacggccgccgcttcacggaggcgaagggcatcatcgtgaactcctccgttgagctcgagggcgcggtcctcgccgcgatcgcggacggccgccgccccgctccggcgatccacgcgatcgggccggtgatctggttcgacgccacgctgccgcccgagcagccgcacgagtgcgtgcggtggctcgacgcgcagccggcggcgtcggtggtgttcctctgcttcgggagcatcggcttcctcgacgcggcgcaggtgagggagctcgccgcgggcctggagcgcagcggccaccgcttcctgtgggtcctgcgcggcgcgcccgccggcggcgtgcggtacccgacggacgcggacccgggcgagctgctcccggaggggttcctggaggcgaccgccgggagagggatggtgtggccgaggtgggcgccgcagaaggacatcctgggacacgccgccgtgggcgggttcgtgacgcactgcggctggaactcggtgctggagagcctgtggttcggcgtgccgatggcgacatggccgctctacggcgagcagcacctcaacgcgttcgaggccgtggcctccatgggcgtcgcggtcgagctgaggaggacgacggcgaaggacggcgacgcggcgagatcgctcgtggaggcggcggaggtggagcgcgcggtgaggaggctgatggcgccgcagggcggcgggtcgtcggaggcgagggagaaggccgcggaggtgagcgcggcgtgcaggaaggccgtggaggagggcgggtcgtcgcacgcggcgctgcaacggctcgtgcgtgagatcgttcgtgtcgtggcaggccacactaggccggaatagctggctggttgcggttggttggcccatctcacacggtactcggcccagtctagacgagaaaattatactagaaaccaagacgtcaaccacgtgatgcggcttaagggtgtgtttgattcgtggtagggtatagccatccctacccctatgagcaaatcctggagagattgaagtcaccacagacgtttcgctgtcgacaagtacgtcacctaccactgactgaaagcacaacgtcgcgcttcgctgtcgacgggtacgtcacctaccactgaaagcacaacgccgttaaatcctggacgtttcgctgtcgacaagtacgtcacctaccactgactgaaagcacaacgtcgcgcttcgctgtcgacgggtacgtcacctaccactgaaagcacaacgccgttaaatcctggagagattgaagtcaccacagacgtttcgctgtcgacaagtacgtcacctaccactgactgaaagcacaacgtcgcgcttcgctgtcgacgggtacgtcacctaccactgaaagcacaacgccgttaaatcctggagagattgaagtcaccacagacgtttcgctgtcgacaagtacgtcacctaccactgactgaaagcacaacgtcgcgcttcgctgtcgacgggtacgtcacctaccactgaaagcacaacgccgttaaatcctggaaaattcgctcccacagggagttgaacccaggacctcatgtactactgaggctcttgtaaccactaggctacaagccctttcacgggtatagccatttatatttgtaggaatatggtggttctgtttgttttatggatatatgaccatccggataggaacggatagagtaaaatcaataacatattaatcaatgataaatatgttaattatcatcaatatagtcatatctatactaattaacaataaaatggactaattatataatcaacactaattttgacaagtcaattactccatacgcttcaaaatataagaaatctataactggatgagatattaatcatttactaatgattaagattaccaaatgtggatatcctcatccggtcaatttaacccactcatctagtatcttcgtgaaacattttctctttagaccacccaatccattcttacccatcaaccaaacatatttaaaaactggatcgtcatatcccatttagtgatatcactctaaccaaacacaccgttaccttcctcccacccttaacccccatcgcattagaagctgagaagtagctggttgatagctattccctccgtcttataacatagtaatccaaaactgaataagacatttcatattagaacaaatctggataggatggtatttagattcgttatactatgaaatgttccatccgattatagattattatattatgggacggatggactaacttttgagaatctggaaaagttgaaaaactagaaaggctaggtttccaaatttttatctttatttattttctatattctataactacaacttcttaaatctaacttaaaaatttatattatcttaaaatataacttaaaaatttatattgtttaagggagctaaagatttaaataaaagctatagcggttaaaaactcatcaaacagagatactcctagttagcaaaggagggtggcatttcggcttgggaggcccatcgacctcatatctccggcgaaacggtataagccaacaaggcaacaatgtactactacacgtcaagcgaggacggtgactttcgtggaggtagaggactctgtctgaactgttttcattgaagaaacggaattgaatacaggccaagtgcgcaggtacaccatagtcacctattgatatatatacgtacagagaaaatgaactacacgtctatctacacttcaaccgtctctcaactcacatcagtaatttaatttccggtttatcccaccgcatatccgtttgttgacatttttccatcactacttattaagtgcgaaatatgatgactgctcgctgtaaactgcaaggaccatttaacaggcttagctggagcaggatgaactcagttgctcgttttgctcatttctcatttccttctatttaattttattacctgtaatttttctcatttttcactgaaattttagtgagtccttcaaaaattaaataaaaaaacagaaaaaccagctggagtcgaggagtggtcgctgcatgtttgtgtgcagtgggccaacgaaattaaaccaaggttttctggtaatgaaggtccacatcaaactatcctctcgcatggcacagttaatgctaccaacgggtggtcgggtacagaatttaaatgctgtgtgctttaagccaaatgtagagaaaaatgggtctttatttatttcgaaatatctcatggccagccgctctcaatggtgtgactaatcacgttcaagccatgatatgatggatcaaggcgagacaagaaaaatgtatgagcagtcatgcgagcaaaagtagtagtactgatgagtgatgccccttcaaatatcataacctccctgatcttttctataattctattagaagaaataattaaaagatcgatcacacataggctctgctaatgaaaccggtaacaaaaatttaatcaacttcctctcttcatctccagcatatgtacaacatactacatgcacagggattacaagctgcatgcaaagcttagcattttgcaagaaatcaacaaagccaattaattaatactcctccaatagtagtactagtagccaaggcccaacgcaacaagcacacctcgcagagagcacagagacgtacgcagcaagtaggtcgcctcctcctctctctctctccggccatcaccgccggcggccggcgatcgtaggtagcgtagagctagctggcgtagagcctgtagtggcggtaggacttgagcatggcgccgcagaaggtgcagatgatggcgcgccacgtggccctgtgcacggtgagcaggtagcagaagcgcgtcgccgtctccatgtccgccacgctcgcgcacccgccgcaccgcgagcagatccccgccgccggcttgctgctccggaccttcctcctctggtccaccaagaagcagaagaacaccatcctcctcgtctccggccggccggctcgccggaatctcaaataacacgatgtgtggagtggtggtctctgacggcggcggaggtggtggtggaggatggcgcaggggggttttaaggaggagagcatatggatcgcattgatggcggtggtagtgaggtagcgggtaggagaggagagaagggggtggaggtattaatggcatgtcggcttgatggctggacggctggaccatgatgcatgggcatggcgcgttgtatgccactcttgactcccggactccacttgtccggagtaatacaattacagttgttgtttgttaattttttttcttttgacttaatgtttagtacgagatagatcagaattgaacaccgccactccgccacctaaaaaaactgactggcaattctggatcttcgatcagccagaaataaactgtctgaatcttctttttttttttagaaaatttctgtctgaatctttgatcagcatgtttgtatatatgtgatgtggagaagtaggttacgatgtttctcatcagttttatactagcacatttaggcttcctttagaatggaggaatctggtgagaattttacgagttttgaaccgattcctgctaaactgtcgtaataaaatccctagtagtacattttaaatgagccgtcagtgtctttttattttccagaaacagcactagagcgactgagtggcagctataaacatcgtccagaaattaaaaacagggacagttaacacgtcggtgtgagataggagtagatcgcacgacgctgactgcccactgggaggtaagagtctgggtgcgagctaggctgcgaaggaggaaggatgatagccagttggttaatggatagacagcaggagctagcagatggatcgcaagtatccgtcaaccaatttattagttgtgccttcgccaattccatttggatttcacacgaaagcgcctcgtgaagcaagcaaaatatgggtagagagagccttccctgctaagcaagcgagcagtcgatcgagcaatatattcatttgaccgatcactaacttctctttcgaagtaaatgatgggtcactaactaactgtctaactgtatagtaccatttgtaattgcagatcgtttcagagtatgacaaaggcaatctccatcagaaaaggcgccaacggtctccttttttttattctttttgaaaaagagaaggcgccaggcaacggttcttttaccaattcttacaggtttctcttgtttcagccagggatcaccctggagcttggggaggaggaccacctcctttgatgttggatgggatcatcactccaatactcagcatgttcatcaagtttgatttgatcccaggggccagggctcacattaaacttggtgaccacttctacgcaatgataggtccatatgaacacactactcttacggtcttgcccctcaagcggtcgattagttgggttgccgtaaatgaagtaccctttgaaaaatgtaattcacatagatgatggaataagataattcttatacggtctctaatagagtatttataaatatcaagttttacatgacatacaaatatggtacctcccgaaaacgataaaattacctatggaatcataatgaaagtcaaaattatacgttttcttactacttacttttttagtaatggaggaatgtacgtagtctgtctctgttcttactgtttagtgtactgctggtggaatcgaacattaaaaaataaaaacaccaatgctaatgatcttatataaaaaaacatctttttgaaccaaaaaaatgctaagaaaatatcatttccatcacattttgcatcccaatagcatgggacggaaacatatactctaactttaaatgattgacatgtgagcctcacagctcgtaggctcataggttaacgacacatgtcggagaactgtatgttagaggagcttcttcggtatgagatggcattttcctcctcaccgcttctttaatttcattttcatacacttttgtttttactacaacattcaactattgtataatcccaaatttaaaacagcgttcttaattaagcttatccaaacctttggatattagctagagaagaattatggtatggagagaagctagagagttcaaagaaccaggtgactagtcgttgtctttagtaaaggtggttctggcatctctagatgttcttccaggttttgactgccttctgttgcgtgaaaaatatactggtgcttatgtatacagtacataactataagtatatcttcttcaaatcttaatacaatcggttgtccgtttcttcggccaacccggccaaaaaaactagagaataattaattaattttcaataactagaaaaggatccataatatttaacaagcaataatgaattttatacattaaataaaatatataaataaatggatataacttttattgggttctatatatttgctcacaagtcacaactgctctctgtaattttggtcttcatttcatttatttattttagctgcttagaaggcatgacgagacataactacatagggtattgattattaaacttgtctgaaatgttatggcaccaaaagtagctgtaagagttgttgcggcgatttaagatgtgaaacgtgtgatgtcattagctttcttataagagtgtgttaattttcggtagtaaatcatggctgtcacatttgtgatgttatgttacgtacaggtcagctaccgcaataccgcaaataggatgaagcaaatgaatgattagcacacccaccatcgtccttttttcatcctactagccaagaaccaagagaaaaaaaaacaatgagttttagtattaattcgattaaacatatatttaagttaaatagtttttttatgattttccttattgaataaataggtgattttataatttaagaagaatcaacagtgaatcagccaggagatgaccgttgaagggtgtgggttgattaatggaatctatttgcctactccctccgtcccaaaatataagaatgtttttatattttgggatggaggaagtagtcagtggtgtaatataatactccctctggttctatattaattgacgttttggataagattaaggttaaacttttataactttgaccatcaataacattaaaaatatttagtttaaagaaactagaaaaacatatatagatttgtctttcaaaacactataataaaagtaaacatgcatttatttattgtatatattataatagaaaaataaggtcaaagatatatcttgtagagcgtgtcaatgtccaaagcgtcaattaaaatgaaactggagggaatattatataatactagtagggatggtgtggtagaaaaaccaccactacatatacatacagtatagaaattcttcattgtttacattattaaggactactcatacgtaccattcaatcttatcttcaaagtttccaacctcatgtatgccaagccaatccttgctccactacatggagtgcaaatgctacccaatgtatgtcaatcaataaagtgattaatgtagccatgtagggcaagtgatacaagtcatgaacagatcgatatttattgctttgctagttgctactgcaatatacatgctcaaatagtctttaattatcatcttgattcttttactatacctagcatatttcccaagaaattaaagaggggagctatgctggatgttgttgcccatgctgctggcagtataacttgggctgtgtttagttacacgctactaaaaatagaagtttaaagaaattggaacgatgtaacgaaaaaattagaagtttgtgtgtaggaaagttcgatgtgataaaaaaattaaaagtctaaagaaaaaaaagttggaatcgccttgagccatgactgcctccaaaatcggtgcttccttaactcggctgcattactccgtttggctgcattgctccgtttgtcacgctcgcactgattgtcttgtcgttgtagatcagtcagttaattaggaccacacgcaggcagcgcaattagagcaagtttaatagtataaccaactactagttacaattcaactatagtcagtctaatagctcgtccatacaatagttacatactgcactattaatacctggttccacctgtcatacacactgtgtcttggagtccgtgctacagctaggtataaatctgtagcccactgctctcttatttatcttcttaaaatatatttacagctgacttatagcctactattgtacctgctctgcctactcatcctcatatcctttccttccttcgactacagggaattagtagaagatgggtcggtctgacacgtaaacacgggtacattaagttttttggcccatgtagtatttgctgacaacgacaagttgccaatcctgccatcgatcggggcattgtacaaagtctcgaatactacaggaaaagtaagttccatgacatcgaggtttaaaagttcaaatttataccatcaacagagcagatcagagtacatttaaaacatttctgagaataaagcagtttaagcggcagcagcgacggcaaggaatcacggcgctgatcccccaacgccggcgaccggtcgattcctgaagccgccggccgccaccgtactcgtatattcctctccacccgtgtgtcgcgtcgatcgccgtcggcggcgggcggcggcaacttctggtttatggagaggaacaactagggtgggccggtgattggtccagtttcgactaaacggcccaattggttcatggcccaggcgcatcttaggggttcggagatttcttctccgtaccccgtcgaaacatacgcattcgccgttgtggtgccctcgtatcgtattaccggacacctacgaggaaccatcttcgctgtgtgatgcttggcaactcgccggtgttctttccctcgagggtcggcgcgactacgatgttgtctaccgttcatatcgacgtcgatcatagctccacaatagattagggcactatgtgaaaaaagaaaagcaaaattatgccaaaattaagattaggccaaggattttgagtaagaggtgtgtacaattctcgagtcatgaattcgtgatcatgggcacttcacctcgtagaagttgagattacacactaggctgcgtttggatcctcggcaataaacatactagcctcgcttagtaaggtgagctgtttggcactgcagctaaaatgttgctaccgtgggcaagattacctcattttagctaaaatgtttattgggctttagctgcaatgggctagcccatgcttatcaggctaggaaagccgatcaagggatctgcgcgcgcatggcacgagtagacaccgacctgctcccatcaattccattgacccacggcccaggcaagcccactggcttagctagttagcttctccccaatcctgcagatcttctcgtcttcttcgacggttcaatccaacgcctggtggtctctcttcgtaggggttcgggacttgggaggtctgcgtcgtcgccgttgctggtcgacgaatcgcgtcacccatggcgcataaaggggtaagcctactgtttccatgtatctaaaaattaattgagaagttgtgtcagtattgggacgacctcaaggtgttcgatagaatgcccagaagactcaacatgccgctgcttcgtcctatgcgccaacacaagcttcaccacgaacaccaaacacacgaattccaccactctaccaatataggttttagcattgcacgcggccactccatgatgcgcttattctacggtgactaacgaccagaaccgattgattgcagcccgacgtgcctgttgtcagtggcatcaacagcggcagcacggtgaagctcaaagacctcgccccggcggccaccaacaacgtgaacacgacgttcatcgtgctcgacaaggcggccagggcgccgccgccgccgccgcacggccgcgccgacgcgagggaggagacgtgcctggcgctcgtggccgacgagacggcggcggcgcacttcctcctgtggggcgccgagcgcgacgcgttcgagccgggcgacatcgtgcggctgaccggcggcatcttctcctaccacaggagcaacagcctcgtgctgcgggccgggcggcgcggccgcgccgagaaggtgggcgagttcacgatgctgttcgtcgagacgcccaacatgagcgaggtgaagtgggtgcgcgaccccggcgaccccaggaggatggtgcaggaggccgtcgtctcgccgcactctcaggtcttcaagccgctgcagtgactgactgactgactgaccaaccaacctaaggtttggttcttctgtcactgaatttttttgtggcaccgttgtacaattgctcaatgtcgattaaggtgtgattagctcataaaaccctgctttgattaagggcaaattaaactggatgattgagagagagaaaaaaaaaactcgtagggcatgtttggcatagtctccatcctttgtttggtttcacattgaattcccttcaaatctcacgaattaacagacctccctaggtaagagattggtgggaattggacccttaattctcccaaacactctcgaattttcaagtattccaaccaaactacaaacttatactctcgaaaataatactcccattttccatcaacaactccctccaatcaaacagactgatacggatactgatgcagggagtttttagagttattgtactttctagaagtgtggaacgaataaccattaaccaatacgaaaaatatcgtacttctagaagcgtggaatgaataaccagtatggaaaattgttttcatcattgaagaaatgttatttacatgtcagtcagataatcatcagaaaagtatccccatggtgtccgtagtctagtttaagataattttctccattacctactactcatagagtacaaccttacatagtagtttttagtgtaataacgggcgcacgggcgcgtgtctgcccgcaccgctgctaggggacacgcatgtaataacgggagccgtagagatcgcctcacccgacatgaattgattgatgagcccgcagagataatctcttatctgttcatcatcgtaaaattgaagttacgaattgggggagaaaaagatgggcctgtactttgacacctacttctcgtatgaccatgtccatgtaaagaagcaacgggaaagagagaaggagatgatggtattttcgtccaatacatacaaaatacgtatcttagtagcaccaatgaaattacaaacaaatagcagtggcatcgtttgaaatacgcaaaaagtaacagtatatttcaaaaccaataaaattttaatgatatagatctaattaatccattaataaatcatcacttacatagatgaaatttagttcagaaaaacaagtagtaagagagagaatcttccaatccctctcttccagaatgtgtggattattcagagaactgaacacacgtccagccaaatcccgaccaaaaaccatcatcaatcagccgatcctgatgttgtccctgccgcacacgagcgtggtggcccagttgaccgccacgtagaacctgttcctccagctcaccaccctcggcccagacacgcccattggctttagcttcttcccaatccaacgtctggtggtctctcggaggtctgcgtcgtcgccgttgttggtcggagcatcacctgggcggtgtttccctgtctgtcgagcatcacccatggcgcataaagaggtaagcctactactgtcttttcgcatgaatgtaaaaactcttagagaacttgtgtcaggattgggacgaccttaaagtgttcgatagaatgcccagtagaggggagtgggttataatctctcgagacgatagctccttattaccagagcaactagaggttggctgccttccactgctgtgctgtgtgttgcaatatttaatcaccaaacaagtactaataatctattgatttatctttgcacacaatatttaagtattcttgtttcttcgatattaaataggtagattattaatgataaatagattgttgtgagttcaaacatattagcaggtgctttggcttactatgcagtgtggtatggtaggggagcatattttagagggtatgcacataagggtacacatatgatctctttttttttttacgaaagccacctttggatgagcatagagtatagttgtgtgcgggttaccttgcctttaaggtgttcgttattttctatcagcacagagtatgaaactatcttaaggtgtacgttcccttcttgcctgttccgtgacgcacccatgcgcgaaggcgcgagctcagctcgtgaccacgacgccgtatcgcctcggcctagccagctcgcaagtcgcaaccgattccccatctccgcctctgctcatctccactcgcccgccgccggctcacctctcggcgacccggcctcagaaagcgtcggtggagcggggccgggggcccgtcaaccggcccatcaaacaagccgttggcaacaacgcgtacaggaagagggagaggtgtgggtgtgtgcagttaggtgcggcgccgccgccgggcggagtacatcacttcggcggcgctctcccggctaccgagcatcacccatggcacacaaaggggtaaccccgcagtttcctcccaagtacctcacatgtgggatttgattttgttgttgttgttgtgtcgaggcgttgagaagttgtgtcgatcttgggacgacctcaagatgttcgatggaatgctcagtagagccaatgatctgctgcttcggcgtacgcctacacaagcttcagcaacaacacatcactctaccgatatagatatcgactgtgcaagcggccaattcttgatgttttacagtgtaactttgactaacaattagaatggattgactgcagcccgacgcgcccggtgtcagtggcatcagcagcggcagcacggtgaagctcaaagacctcgccccggcggccaccaacaacgtgaacacgacgttcatcgtgctcgacaaggcggccagggcgccgccgccgccgccgcacggccgcgccgacgcgagggaggagacgtgcctggcgctcgtggccgacgagacggcggcggcgcacttcctcctgtggggcgccgagcgcgacgcgttcgagccgggcgacatcgtgcggctgaccggcggcatcttctcctaccacaggagcaacagcctcgtgctgcgggccgggcggcgcggccgcgccgagaaggtgggcgagttcacgatgctgttcgtcgagacgcccaacatgagcgaggtgaagtgggtgcgcgaccccggcgaccccaggaggatggtgcaggaggccgtcgtctcgccgcactctcaggtcttcaagccgctgcagtgactgactgactgactgaccaaccaacctaaggtttggttcttctgtcactgaatttttttgtggcaccgttgaacaattgctcaatgtcgattaaggtgtgattagctcacaagaccctgctttgattaagggctaattgaactggatgattgagagagaaaaaaaactcatacggatactgatgcaaggagtttttagagatatattgtactttctaggaggtggaacaaataaccaatacggaaaatatcgtacttctagaagcgttgaatgaataaccaagagtaaaatacaccagcggtccttaaacttgtcgggaggttttacttagttccatgaacttgtaaagcgcacatcgagttctctaaacttggtttattgtattattctcgtccaaagccgcgtttgaccctggtcttgcctacgtggcacgccacgtgaacgataacatggattttttttattcttttctcccttcttccttcttttttcaccactgcaacaacccttcccttcgtgccgcctttcaccaccgacgagaaaaaagaaggaagaaggagaaaaagtgacgggacgaaaagtgcgaaaaacaaaaaataataaaatccatgtattgtcatgtgcgtgccacgtaggcaagaccatagtcaaacgcggctttggatcgggataatacaataaaccaaatttaggaacctcaatgtgcactttgcaaatttgtagacctaagtgaaaccttctgacaagtttaaggaccgttggtgtattttactcaataaccaatatgtgaaattgttttcatccattgaagaaatgtttttttacatgtcagttagatatagataatcaacagaacagaatccccatgaatccccatggtgtccgtagtttagtccaagggtttgttcactttgatgctattttcaatcataccattttttttgtcgagttgctaaaaaaatatctgcgtttagtttgttgccaaatttagttaatacataagaaatcatgctaaaattttagcaatcttgccaatattttggcattgccaaaacttggtaaggtttattttggctacaatctaaacagtccctaattttctccattacctattaaggttgtgttcttttcccctccacccaactcacttcccttccttttcacatacacgcttttcaaactgctaaacggtgtattttttataaaagttttctatatgaaagtttttttgaaaaatcatattaattcatttttcaagtttgcaggttaatacttaatctcaccataatcacatgctttgttttcgggaggcaacgttgggaacctggcctcttgaacgcaacctaagagtacaatcttacatagttttaggccttgttgagatcccaaaaaaatttggcaaaaaacgtgggaaaaaaatcacatgcattgagcattaaatgtgggaaaaaatcaattgaacagtttgcatgtaaattgcaagacgaatctttcgagcctaattacgccatgatttaataatgtgatgctatagtaaatatttgctaatgacggattgattaggcttaataatttcgcatcgtagtttacagacagaatctgtaatttgttttgttattagtctacatttaatacttcaaatgtgtgttcatatacttcaaagtttttacacccaaaaaactaaacacacccttagtctaagataaattttctccgtgtaatgccgccttttcaaaagccttatcttatccgctaaaatttaaattttcaactttaaatttgaagttgattttaagatttttcatcgaagtttttttagtcttcccttttagatcgttatgaacacgtatatataagttttattcataaattatttttcgtttgcccgtttttcttattccacgtaccacgatggagccacgagtgtccagacttgaatgaaataattaccccctccagatccaagcaagttcaagagccattcaatcaaaaaaaaaaaactcaacctaaaaaaacttaacctagcagaggtcatccccttcctggatatatggtagtcagggttgatttttttttcttgagacggagggagcgaagcaaacgaatctccaccgtccgatcaaacagcgtctcatacttaaggtggtgtttgaaagtcctacaggtagacgaaatgaatcctacccaggaagaaagaaattaaagcggggcccatccagcccgtgccgtgggacgtgcgttttcttcttcttgcagcacaagccgcggccgtgagatcttccggcaagcacggggaaggctcgcgcttataaaaagaaagaaacagatcttttcggttaaataaattttaatcaagaaaaagagagagaaaggcttctcttcttcttcctcgtattgctgctgctgcttttggtctcctccggtgaaagcgacgggccgtgatggtgcagctgccgtcgcgctcgtggtgaaatcttggacactgccggtaatttcttgtcattttttccccttcttttcctcgagtctgggtggattacgcacgcacacaaaaaaagaaagctggggtttctcttcaatgcgattcgagggcgaatggggatgacgcacgaagcccctgcggcgggcgggcgagacgacgagcgatcgaatatcctcaggttttattttctttccacgccgttcgcttcccgcaatcttgtttcctacgtacgacgatgacgagtccactcggaatatccccggaggaatccatggtggattcaacgaatcatcaaaactaccaaaccgtggagtagtgtgtgtgtgccgtactgttgaagtctggccgtttcgctgggtcgcgatcttgtgcagcacacgccggcccgagagaaggttccgattcccatctctcagccagttttcttggagaagaaacgttgttgtacactttattatgtatggcgtgataaatttggagagttcgtttgctccaaaattcttgggggagggagattggtcaacaccgatgtgcttctagtacttctcttttctcactgggctccattttccaaggaagaaaaatgcgaagccaagtctcgtttcgttcgtgtatcatgtttttttttgggtcgctttctttgtgtgtgtatatatattcctcgtgctgttgttgccatcagatcagttttgtgagattcaaattgacaactctttgaattgatctgcaggttctcgtggtaattctgtagttgtttttttttcgagttcttgtgtggggcgaagcgaagcagatggcgtggtcgaggattgcgaggggctcgcagctcacgcagccgctctcgaggattctcgccgagggcaacgcggccgccaccccggcggcgtacgcgctgcgcaatgcggcggcgctgggccagcgcgcctcgtcggcgtcggcgtcgtcgtcgttccacagcctcgcgttggcggggcttgctgacaagtacgcggccggcgctgccgggcggctccagccgagcagggggatcagcacgacgtcacctgcgctgcgccccgcggcggaggcggcggcgagggtggtggagtgctcggacgccgccgacgaggcggcggcggcggcggcggtgccggacctcgggcccacgcggccgggggagaagccgcgcgtggtggtgctcgggacggggtgggcggcgtgcaggttcctcaaggacgtggacacgcgcgcctacgacgtggtgtgcatctcgccgcggaaccacatggtgttcacgccgctgctggcgtcgacgtgcgtcggcacgctggagttccggtccgtcgtggagcccgtcagccgcatccagtcggcgctcgccacccgcccgggctcctacttcttcctcgcctcctgcaccggcatcgacacggggcggcacgaggtgcactgcacggcggcggacggcgacgggctccccgccaacccgtacaacttcaaggtgtcgtacgacaagctggtgatcgccagcggctccgagccgctcaccttcggcatcaagggcgtcgccgagaacgccatcttcctccgcgaggtcagccacgcgcaggagatccgccgcaagctgctcaccaacctcatgctctccgagaatccaggtacgctttcaaccacaccttgcatttgcacctcgtccatggcgtccatggcgatggttgctcgatcagttcttgatcgttttggtgaatgatggtgtgtaggcttgtcggaggaagagaagaagcgcctcctgcactgcgtcgtcgtcggcgggggtccgaccggggtggagttcagcggcgagctcagcgacttcatcacccgcgacgtgcgggagaggtacgctcacgtcaaggactacgtcaaggtcaccctcatcgaggccaacgagatcctctcctccttcgacgtcgggctgcgccagtacgccacggaccacctctccaaggtactacatgaccgagacgataggaaagattagtcgttcttcgttccgctatatcgactaactttttttttttttggttttaacactaaatcgttgcagtacggcgtgaacctggtgcgcggcgtggtgaaggaggtgaagccgagggagatcgagctgagcgacgggagccgcgtgccgtacggcgtcctggtgtggtcgacgggcgtggggccgtcggagttcgtgagatcgctgccgctccccaagtcccccggcgggaggatcggcgtcgacgagtggctccgcgtgccgtcggtggaggacgtgttcgcgctgggcgactgcgccgggttcctggaagggacggggcgggccgtgctgccggcgctggcgcaggtggcggagcgggaggggaggtacctggcgcgggtgatgtcgaggatcgcggcgcaggatggcggcagggcggggcgcgcggtggggagcgcggagctcggggagccgttcgtgtacaagcacatcgggagcatggcgtcggtggggaggtacaaggcgctggtggacctgagggagaacaaggacgccaggggggtgtccatggccgggttcgtcagctggctcatgtggcggtcggcgtacctgacgagggtggtgagctggaggaacaggttctacgtggcggtcaactgggccaccacgctcgtgttcggcagggacaacaccaggatcggctgaatttttttgtcgggatttggctggaacgtgtgttcagttctctgaataatccacacgttctggaagagagggattggaagattcttttttttttactacttgttttcttaattaaatttcatctatgtaagtgatgatttattaattgttttatacggttgaatagtaagcgtccatggaaaatattggatgcttcaccagtccactgcactcactcctccaccaagtatcaacatataatcatcgtctacacgactcgaaatgttaatggccgtgatataaccctttctacagggtaagataataagaacttctcgagcataactatgtggtgcgtcacaggaagagattccccttgatctatttgggtcgatctgtttggatcaaggcacactttgcagtcctcgggcgtccatagtctttgtccccaacctgccatgacctggttcttgggtggtggctttggtcccatgtatgtgataacatacaggacgtgtggccatctccgaacaatctaggggcacacttcatctctgaacagttctaggacacacttcgactcaagccggttgatccaaacagagtttcgagcattcaactttttttaaaaaagtttggatcgagccaagagctctagactagggaggtgttagcccacaaccaatacagtctgacatcttgacttttttcccactgtccaacccccaacccggaatattaatccgtatgtgcaatgtcgtgtttaagcctgccagtgggctagattttattgggcgaaatggattggatgttgatttggatggtggtggttggattcaaatgggctgatattaattttggattggagcgggttggcctgtgaagaattgcggtttgggctggagtggatgcgggttggcctgtgaagactatccatggattcagcccatgggttagcctccaaaacaaaccgaactatccccactccactccaaaccctacactccccgcacgcgcctgtgcgcagtgcgccgccgcgcactgccgccgccgccgccacaaccgcgcgccgtcaccgccgcgtgccgtcaccgccgttcgctgccaccgccgagcgccgtcaccgccgttcgccgccacagtcgccggactcactcaagaaggtgactcatctttcatgtttcttgaagtggcgttctctctctgcttggtcgagctccgctgatatatgttcttgctgtgggcagggaggtggcagatctgcggttgcgtgacctccatcttggatctcggtgagctggggggactgttcttggaagtggttcctgggagcatcctggtatggtaccttggctatttttgtgctttttctttgtttcgatttttagataatgtgggttggttcgattggagatgctgaagagtggtgggtttctgttgggtttaatgccgcagctggtgtcccatcttagttgtctcatgtgatacatactctgctggattgtagtatgtgtgccatcagacatcaggattagtcacaataattaggtcttaactcttgaaaggtaaagacttatgaagctattgccaaattagcagtaccaatgtctcatctaaccttgagaagtcatctagatctctggtatactgcaatgctactgaaaaagaaaaaaaaaagatgttggagatttgaacaaattggaattacacaaattgattgctagcaatgttctgttattcgcaattaattctgtcagatggttgtttataatatatcagtgcaattgcaccctttcccaagtcccaacctctaagtcatgtttattaagcatgcagcttttttgctgcttaatggtgactgttgagcgcatctagaaaatccagcacttaaacttttaagctgttggtcaaaggataaaacattttgaatgtcagttcattcagtcccatataactactaatctgttgatttaggtggctgtctttcactgtataacaggttgctgttgggtatgcttatcatttcactagtttttagcacaagtagtaaatgtaaatattaattctgcacaagtagcaaatgtagatattaattttctattcttgtcaaacacaggtttattaaacatgtctatgcaaaattctgaaagttcatctgccaatagttctagtcatgagctgccttcacaaacacgtaagagagcaaaagtgtgggaacattttgagcaggagcttgtcatgatagatggtcttccaaaagcacaatgcaaatattgtggcttaatgttgtcagcgactagaaaatcaggaactagccatctcataaaccatatttgcgaatcttgtccactagttgatggtgaagttagaaataggtttatatcaacagttaggaaacaacccgtggaaaattttgtgtttgatcctaaaaagactgaagagttgatgataaaatatttcatccatgctgagataccattccataaaattgaggatccctacttggatgattggatggcatccatgcagccaacttttaaacttgtgggtcgtcaatcaatccgcgacaagatttacaactattacaataggctgaaacaagaattgcatgctgaattagagaatcttgattcgcgtgtatgcctaacatcggacatgtggacctcaaatcaaaacctaggatacatggttgtcacagcccactatgttgatgctgaattcaaaatgaaaaagaaaattataagtttgaagcctgtgaagtatccacacactagctttgcaattgaagaagccatgatgaggtgtttgactgagtggggcttgagtagcaaactgttcaccttaactttagacaatgctagtaacaacaccgctgcttgtcaagaattagtgaaaactctcaaggatgagttgctttgagtgatcctgattggcaaaccagcgatcttttaaaacgattggctgctcctatgcacaccaagtttgcaaaatattgggatgaaaaattggcaaacaacttcaatttggcacttgtcattaccactgtgttagatccaagaaggaaaagagactatttggatttcttttatgagaaggtgtctccccatggttctaatgttgaaagtaaagtggactctattatagaggagatgaaatcatactttcatgtatatgaaggaattgcaagaagaaggggtgtatcctacatgtcacagtctagtgagagagttagtgttgtaggctcacctgttttgggaaaaagaaagctagagcatgaattcaccctcttcaagtcaaaccggaaggttgcacgtactcagaagtcagagattgatacatatttagaagaagtatgtgaggatgatagtgaggattttgatgttttggcatggtggaagaaaaattccaaaaagtttcctgtgttggcaattatggctcgagactttcttgcaattccacttagcaccgtgccctcagagtccgctttcagcagtggaggaaggattcttggagacacaagaagctcattgacaccagagatgctcgaggcacttgtttgtgcaaaagattggctacatagagccaaaaaacaaggggattaaaggtataatatctcacgccttgtatttcgtctcagactttgtggtctgtgccatataaatagtaattgtagatgtgttttcattttatattgtttgattagtcacaaaatctagattaatttgtctgagtgcccaccagtattactaatatttgtgccaaattttctttgatctaggttcgtactgagtactgaccatatgatgttttgtgaagaaggtttggtatgatggctgttttttttttacaatggtggggtccctgtgctcagtaacttaatgttgttttttgttcatcagttggtgaaatgttaggcggaatttgtaacaccttgcaatgccttttatatctattagttgtatccttacttgtatatattcttatttgagcagctagagcatgttcaggagatagatgagagcattgtgtatgtgaaggataagcaaggaaggtggcctctctcttctcccagaggggcaaaaaaggccccaaccaggactctgtcatcctctgccaggtaacatcttcagctctaactctctgtctctgaatcttttctttctgtttgatgtgctcagctcagatcaatccgctcaatttctcctcttgatgaggctgctcaggccaaatgttttgttttgtactcaaaagggttcagattagttcagggcttcagggtgttctctagtccatgatttgagcttccatgagctaattaggtcagcagttagtagagtacttttttttcaggaagagttagtagagtacttggtagaaatagagaaaaatcttttctttctcttgcaaaattgtttgatatgatatgttgtatcctactatgttgattctggctgcagaattttggggctctcaaccttgttttcttcctctcttttttttttccatttcttgaaagtccttgtggttgtatatagtagtatagatatttagttgaatagtggggatggatggattcattcttcattcttactagtgtgtccactaactcatgctagtcatatcttatagaaataataatattcaacttgtaatctttcaatgttatttctgaaatataaatttctgatggcttctttctcttccagattatctacaactgcatatggatcaaggcatagatgatgttttggtagtttttgttgaagatataaaccttattatggcccttattattgctgtagtagtgagcaattgacttaattgtaattatatgacatcattagtcttctggtattcatttcagtgctggatcagctaacaaacaatgcgatgcgtatcattctgagtattttttttgcccaattttcagtgtttcagcaagcaatgatgttcttttaatatttctgttttgaattaattgtttgcacgtgtgtctacactgctgctctctatactgtagctgagatccatggctaaagaagtaacgaggcctcctggctccaagctctctgtagtgtagctgggatcatggattgaatccattccagtgaagtgggctgaacccattttagtgtaatggtttggggtgggttggattgaaatctgatgcggggtgggttggtttggattttggaggagaggaaatggggtgggttggtttggcatgccattccatgaggaggtgggctggggtggattcaaattggatctcagcccactggcaggcttagtcgtgttccaatgtggtcgcaggcatgcggtagagaattaggaattatgccggccaacctatcggcaacaaacattgtgcgcaatctcagtttcagctaccgacgagtgatcccgcggcgatcgtgcagccttgcaaccaccatatcgaacaagagataggggaggccaacttgggctgggacttgatacggatgaactcaccaacaatttgggccggaacgggattaccgtgtatgggaataggtccacttgccatcccttaacttcacattgagtttaattgacatcctttattcccagtaccaaaaatttttacctttaaactatacaaaaccgtgtaggaagagtcccatggcagtatcaacagctggtttagctgacgtgacgtcctagttagaaaaaaaaatggtgggattcacatgtcagcatctactcgccaatgaggtttgcctcggcgcctcgcttgtgttccaactccaaccttttattcctgttcgcccgcggaccaacctgatgaggccaaccaagaacacaaatccccacatcaccaatccacacaacttacacaagctcgcagcttgcgcgggatgggagagagaaaactcttctgagattttctcctctcctctctgcttttgtttcttggattggtccacggttcttggggcggcggcgccgtcgatctggtattgtgaggagaataagaatcagaggcaagtttcttgatctgatgatggcaagcatgacgtcgatgacgaccgctacctctgccgcgaagacgtaggtggggttggctgcgtcttcaaccgcggcgggagacgtgtgtacgagggtcaccccagtgacatggtgcagtgcggctggcaacacgtgcatagggcgtggttcggcgtgggaaaatgaaaagagaaaaagagagtgggcgatgggccccaccatattttttttattttcttttttttactatgttagctaaaccaagtgctaatactaccatgggatgatgggactcttgttgcacggttttttacaatttaggtgtgaagatttttggtattaggataagaggtactatctccgtcccaaaataaataagtgtagttttacactgtttatgtcgaacgttcatccatccgtcttatttgaaatttttttatggttagtatttttgttattattagatgataaaacatgaatagtactttatgtgtgactattttttttccatatttttttttcaaatacgtaaacccacagctacttatttttggacggatgtattatcaattaaactttgatgtagagttaagagacaacaagtaaacttattccccatggacgagtcaccaacaaatagcatttgattgcctatctgatttgtttcctgtacatataacaaagagaattctttcatgggctgaatcattcattggtgtcgatttatacttttttagcccagacgaaaacgaaaatgttctacgctagtaacaccagctgtaaagcctgtaacaagtaacaactgcacattctctatattgatgaatcaagaggacaggtcatacaacgtcactgtaacctactaacaatttgaaattgtagtcagcaaacagggaaaacatatatgttcgtttataccacaatctatccattccatcagagatatgagtcggaccaataatcttttctgataattaaaaagctgcccgcatagcacccctagttgcatcacgcttcatctcagcagcttttccacttcctcggaagtacatgtacacttgctgcattcacaaatgtcaaaacggctcagatagactacttgagaatttatttcataaaaacatactttctccgttttatattataagactttctagacacatatgtctagatttattaacatctatatgaatatgggcaatgctagaaagtcttataatatgaaacggagggagtatttgttattcgcaggactgacctggataacccagatgctgagcaatgattcgacgcagaacaatccaaatccaacaaagtagaagatctgcaaagaaaaattacaccaattacttgaccgacaagatcagaaagagttttttcggtaggcatctgaaaggtaagttgattatcttcatgaatcaaaaactgcatatctaaccatagttacttagcatctaacaataatgcgatgcacacttacccccaccaaagcattcttgctgatgagatcaattgctggtaaaatccccctgcgggagtataaaataagcattagttcatgcaagttcaactctcacagacactagagaatccttaggcccaccctcctcgctacactagctaagaagaaatccatccaatcatattttttttagtatttatgtatgtgttaaacagaggagcttcagatcccacatattgaagtgcctattttttgttgtttctattgaaaagatgaatatactaccacttcatgaatcataacttaagctcaactaaggaaactccaacatccagggaagttaaatcaaatagtacaatgttcttatgcgtcaatattatattgctggaaagcaggtgcatcaaaacttgcatagacaagcagaccacttcactgataaaaaaagccatttgtacaacatgcaagtaggtcacccttttagtttcagtttccatattcccattgacagaatatgaacaagcagggaacttacgccaatgatttcccctcgaagacaacaggaggagccacagcagaaaatacacagaaaagaatatggaactgcaaagacaggaaattcaagaattatgttcccacacattcaaaatcaccgaatatcttactaacatataacaaggactcctcacttaccaggtaaaccaagaagaacaatccaaacttcaaggcactatcagtcctacaaaacaagtgtccaataaatgttacttactcatatacacaagaaaagcacggagaagttcgcagaaacaatacctcatagcattatacagaggtcgataccataaaacatatgcaccaggaaccccagagatgaagtagatgattgccagcaaccatatcttcacgcctgaaaatggacatagcattattaaaggattacagccttaaagaactggtcaatatgtacaagcaacgccagaagtgtcatgagtataccttcccccttgacccaagctgaagtaactgctatgacgttccagaagagacagcaagccaatcctactcgacaccaaaaaaagttgtcttaattttgcatataacagaatggaatgttgaaataattcataagacagccttttatttctaactagaaaaataaatggcagaacttgaatataattaagaaaatctcaaaagctcatccctattgttttagaattcttattaacttgacttgcaatgcagacagtcacaaaatctcactaacgaaattctaatgataaaacatgtgactaagatcgtaggagactggaaaatttgcctttccagttttacagttgaaggtgcagaatttctgaaagaagggtgaaaatgcaaactttgtagaagactaaaatgcttgtccattatgcagttaaaacgttaccgaagtgcaagagcatcaagattttgggaatctgacaatcagaagcataccaagaaatgatgcaaatgcaacatattgcattctttgaaggtgactcggtatctcattggtgatatcatgatggatgagtggcagaaatggaggccagtttttctcctcaatgacaataccagctgcaaaagtgttataccaataaagtggcataagtttaatagcccgtgagaaatgtttaatgcataagttatattagtctgaacaccttgttattctaaaatgaactacaaggatctacagctctatcatgaaagctacacggtatacggataacatttttgaaaaaaatagtaagatacacttgttttgagattcccttttatctgtcacttatccaggccggggtgtggcctttctaacctgtgctacactgtaagctggtttcccccagcgctgccactttggctttcagtaaaagctgggtcctttggacctttcgtctaaaaaaatacttggtttgagaaactctcgctaatgacgttaccaatacaacattgcagttgcatttcacacaatcgcaattcacatgtaacagattaagagtcacatatcattgccacattacctcatagtttgtactatgtaatatcttaaatggcatagttctaatataaggaatccttatgatcacatgagtcaacagagaatattacaaagcaacattgtttctatgaattagtgagtaaagaaaatgagcttttacctcgcgctgcagcctcctccctcctttttagctcctggtcaacaaatgaagataataatgtataaatgtaacaatcacaaactaacaaaccatcatggatcaaactaattatgtctaagtaaagcatagaattccttgtgcaggtagtaagctgatttttagagaggaaaagaacactgcattacgaatttatgattctgaatacttcaggctaaggactgatgtctgctgtgtttcgcacaaaaaattaagaccaagaagcatcagattacaacaaactcttttgttgacctatcgtaatggacacaactaatgggtgatacaactgcatatgttcatggtgtaccttctccctcttgttcaattccgcttccctagcttgcagctccttttccctattcttcaggtcctgagtatccatacatcacacattagtaaaaagcgacattaggtactattccatgaaagatcctctactgtactgcagtctagctgcagttcaactgagacggataaactacacattcatacaaaccttggaagagtcaagagggatatccaccgtagccccaaaagctgcgggctcagggggaagaggcgaaagccgcgaattcgacgacacagaaggcacattccgtggattctgcattgcagtacagattaaacagttggtaggtaacaaaccaataattgcgaattcaagtattcaacccccaccgaggcaccgacaaaatggtccaactgagaagaacagaacaccgaacagcttaccggcatgtagaacgcgccgccgccatagctgggctgccctccagccttaccacgcgcttgttcctacagagaaacaaacgaaaacaaattcatccgtgcccgcacaaacgagggtttaggcaccaatgcaatcatcgcaacaccccccaaataaaaaaaaatccccctaaatttagcgtcggtgatactacaatgcgagaaaaaaaaaacaataaaaacggccaccgattcacccacggcacacggttagatctgcggccgccaaccagatccaaccacgaacgaagaacacacacgccactcctcagaacgcgcacggaggagaagggcaaggaaacacgaaaccagatccgctgcgcccggcgggaacgtggagaaagggagggagggagaggatgggttcctcaccgagaaagggttcacgtcgtcctcctcgaaggggttgctgtcgtagcgccccgccatctcggccccgtcttccccttccctcgggggtcggcttgggcttgggctctcgctcgcgccgacaatgatggcggtggagaggagtagtggggtggggttttctcgggggagagggagacgacgagacgaggagtcctgccaaatacagcggccgcgcacgcacgcacgcaccgccgcccccaccgaggcagatacggacgagtgaccgcgacgactctcggtgaagaaggggagggggaggcgggtggacgcgcacacacgcggaacggaatggcctctgcacttctgcagcttgtaaccgctcgcggggccaaccctctctgtgttttttattattttcttgctcccaatcttattggtcccacggtttatggaaatattgggtccactcacattatgtgggcagttttgaaactggcgcctcgtcgccatggaacagccaaaagagcccaaaccgtgtgaattatcacaggctcgcagtgccctacacttttgtctcttttttttaaaaaaaaaaacacgttacaaatgtagacgcttacaacacatacgtacttaggccctgtttaatttccagaaagttttttctaaaaacatcacatcgaatctttgaacacatacatgaagcattaaatatagataaatataaaacctaattgcacagttaggggggaaattgcgagacgaatcttttgtgcctaattagtccatgattagctataagtgctacagtaacccacatgtgctaatgacggattaattaggctcaaaagattcgtctcgcggtttccatgtgagttataaaattagttttttttcattcgtgtccgaaaaccccttccgacatccgatcaaacgtccgatgtaacacccaaaaattttcatttcgcgaactaaacggggccttaccatatccttaagaacatctccgaaatattaggttaacatatcttaagattaacgaagtcaccatgggtctatgtctactactgaaagaataattatttgtaaacacgtctactagtaaaagaataattaaccatacatacaagtacacaagtctggatttaaactcgaatagtctggttccaccatagggatcctaaccaattgggctacgatcacttcacactttttggctcatgtttgctctcgtctcaaacgttcttatctcaaattagggtaaaacatagttctactaaatttcggtctaaaaatctacagctctccccaaacggtctcagatcttgtaaggactaaacgtttttttatttacgatctcagtaaaaagagggctaatccatactccttccgtactcataaaggaagtcgttttggacagcgacacggtctccaaaacacaactttgacttcttttttctataaaaatatttattgaaaagtgatatatgtatacttttatgaaagtatttttcaagacaaatctattcatataatttttacattttcaaactcaacaacttgagagttattcatgatttatattatcaatatttgacttaaacattgtcctaaacgagtatggagggagtacataagttacatcaagaaatactcttttcacaatttccagctaacccaactacccaagttcgttcatccagcaaccaagacaccaagtgcttggcatgaggcagaaaactatcgtcctagaccaccgtttcgtgagtcatgtgagttcatgactcgtgggaaatggattctgctttctcttcacatgcttgaaatgtgcttagcaaaacagagttcgcttactggtgaaggtcgccatctccaccgcactccaccaatttcgctttcaaacgcttctattggccgtcatacgcttgagctttcccagattactcattattactatctttgtttatttgtcatggtgttactaccagtaccagttagaattaagctagcaagcatgagattagttgggttagcttctgtttatttgtcatggtgttactactagtaccagttagaattaagctggcaagtatgagatcagtcggagttaacttcagatgaacgggggcacatctataatcgacctctgtcggtctctggtgttctgtttgtctattttctagttatgcaatgcactaacgcatgatgactaaacaagcaccaatgcactagttgtggatgattcctgttcacaagccaactgagacctgtacgaataagcaataatgcagctttaatcagtggcaactaactagtgacttgacaaggtacaacgcccagtatcacacaaaggggcacatcacttttttcagctaccacttagcaatactcagaattctagtaacttcacacccagcaccagcagggcacaatgatatcaactactccttccgtcccaaaatataaatatttttagctatgaatattgacaattgtatagctatgaatattgacaattgtatgtctagattcatagctaaaaattattatattttaggatagaggtagtagttcagaaaatattacatgtaatctactacctccgtcccaaaataaatgcagccatgagtttccacgtctaactttgatcatccgtcttatttgaaatttttttataattagcatttttgtttttataagatgataaaacatgaataatactttactcatgacttatgtttttaattttttttaaaaaaaattaaataagacgaatgatcaaagttagacgtggaaaaccatggccacacttattttgggacggagggagctgtgaacaaacgagcaaaggaattctgcaacaatcgcagaaacagatatgacaacaatgatgacacaacttttattgaatgcaccaacctagatgctctaccaagagtaatctagtattgccgtataacaacacgcctcgagtacaatatcctgaacaatgtatacatagcactagccaatgctattccctcgcctcaatcctctacttgtgtatagaagcatagttccagtccccgcatagataaataataatacatagaacgaaagtggcaaggaaaaatttcatgcgcaacatgcaaagctaattttcttgcgtacttagaacacctgcaaaaaccttaagcttgtcaatttacagcctaccgagctcagatgtgtgcctttaagggcgttaagcttctttctgacgctccatgtttgcacaaaaatgctaatactgaatatactccaacaagagaagatatatgcaacggaaggaggtacaatcacaactcagggcatgagtggggtaagttgtttgctgaaaaggtcaccaagggcaccacgaacatccatctgcggcataaccacaatattagtactccactactactaacgcctttaatgtgaaaacatacatctatgatggaaaaacatatacctgatcacagcagataagttttgtaattaatggatagaactctctgatgtgcttcttgaatatctgagcgtccatgatacacattccattcaaaacctgaaattaaaacagttgagaatgtgggaatataacattatacgcaaggatgagatttcgcaaaaggccctatacactactattagaagtttagaaccatatgcactataccttgacaataactggtgctcttaggtccagtacacggtgtatgtctgcacttgcagcttccccagtgcttggctggagatcagaagcatcttcaagatctgcccacaaaacgaaacaagcttcccttctgcgaggctcttgagcttttcatgttcatcagattctatgacgtgcccatttgtatcctcacttgggtcattcccatcatgttccacagttgatttctgaagaatctccaaatagatagcagtt

SEQ ID NO: 9358 - DNA, 10524 bp, Oryza sativa
ttttctttttataaaacccttttaactttgtttatttcttttcacttattatttgtgctctgaaaattccactaaaatttatttacacattttaggcttttaggaaatatacaaaaatcctccaagcctcatttgacttttatctttgcacattttaattgttggaggctttcacatgaattttaattattctttgcacaatttcgaggatgagttttagagtcgttttgggacgcgacagtacggttctttctttcgggcaccccatttgattggggtgaatagggaggcgtcatctcatgaataattccaaactcttcgcaaaaagatgcaaactcattggaaaaatactccccacctctatcagacctcaaccgtttgattttcctttcaagttggttttctacctcagctttatagattttgaagtaatgcaatgcctcatcctttgttttcaatagatacacatagcaaaatctagtgcaatcatctatcagtgtcatgaaatatttctttccccctttagtcaacacgccgttcatttcgcacaaatcggaatgaacaagttctagaggtgccaaattcctcgcctcagatgccttgtgaggcttgcgaggttgtttcgattgaacacaagtatggcacttggaacctttgaccaaagtgaattttggaattaaactcatgttagctaagcgcgtcatacaaccgaaattcacatgacagagtcgcgaatgccacacattagactcatcattctcgctaatatggttcacagcattatgattattacacatgtcattcaaagaaaagcggaacaagcctccgctgtcataaccttttccaacaaaagtcccatatttagatacgacacatttattggactcaaacacaagtctaaaaccttctctacacaatagagagccgctaactagattcttctttattgaagggacatgctgcacgttcttcagctgcacggtctttcccgaagtaaacttcagatcgaccgtaccaacaccatgaacagccgcaagcgacccgtttcccatcaacaaggaggaacctctcccgacctgataagaagaaaacagagaaatgtcagcacatacatgaatattagcaccagtatccacccaccaatcaggtgaatgaaaaacagagagaactgtaggtaatattttaccgtaccccgatgttcctccgccctcgctaatgatcatgttggcagacttcctgtctttgcgctcaggacagtccttggcccaatgcccagacttgccacacacaaagcagtctccttttgcctttcccttgcctttcttcttaaaattggttgcagctttgggtttgacatcaggcttgactttcttgttgttgtgggatgcatgagggttcttcttctgtaccatattggcactagaacctccctcaacctttttgccccgcacgtcctttgccctcgccttctcctcaacacccaaagagccaatgagatcaggaacactgaactcttgtctcttgtgctttagagaagtggcaaagtccgaccaagaaggtggcagtttggcaataatgccacccgccacaaacttgtctggcaactcacagttgttgttctcaagttccttagccagcatctgaatctcatgagcttgttctactacagaacggtcatcgaccatcttatagtcatagaactgctccatgacatacagctcactgccagcgtcagaaactccgaacttagcctcaagtgcatcccacatgtccttcccagaaggcatgtgcatgtacacgtccactatgttgtcagcgagtacactgatcaatgctccacggaacaggcaatccgaagcctcgaacttagcctcttcctcaggagagagaggtggttcacttcgtttgccccgtgaaacatagaagcactgcatcgctgtcaaccataatagtgcacgtgctttccatctcttatagtttgaaccatcaaaagcatgtggtttcagtgcagcagcaaagccaactaccgaaaatgacctatcaggtttttggattgttggaaatatagtcattattcggcatattttaatccaagaaattgaaacaatgatcatggcataagcagtgtagggtgatcttaacataaccagtagcatactatgcgcatcatgaatgtcagaaacaggaacataccagtaatgcgataacatgctagaggcatcatgtagaacaggaacaagaacatagctcacacagtatagcgctaacaacagtagtaggaggagaagattataccccgagaatggccctccgctggatggtgaggcagaattgcctccgttgttgtagtcgttcacggcacctcctcctggcgcaccagctccggatccagctcctgtcggcggcggcgcaccagctccggatccagctcctgtcggcggcggcgcaccacctccgccagcaactccagacatggcgatgagcagtcgtgcaggaggcactccccaaaaacctgatcacccgcctacccggtgcagatctcaggcgaaggtgtggtttcggaggcactgcttcttccaatctctcgtgcgcgcaagagatcagaagcggggaagggagagagcaactcaggcacaggggagaaactaacaccggggaagcagctaagaaatcggatcagactcgcggcctccttttctatcaggagaaagaacgtggacgcgctgttgcggagggaatcgtgggaacgtgggttagtggctgcaaaagagcgacgtgacgcacgcccgccgccagccagccagccagccacgccacgcctcgcccacgcccacgcccacgccccggcccggcgcgcgcgcgcgcgcgtgtggcattccgacccccacctcaactggtcaacagggagcctctaataactccctatttaggttgagatatttctcgcttaaatcctgaggtggtattattatccttaacatttattatgggcctttgagatttaatagaataaattgggcctagcccaattattctaacaacctcgacccgcgcgccgctctccatcagcggcgacgggaaagagaggcggtgacgacgggcggtggcgagagagatgaccccgccgacgccgcttgccatcgagcattgcaagagagagagagaggcagtgacgagagagagagagagggcgtggggagagtggatccggcaccgacgaggtagaaggcgacgagaagaggaggaaacggagcagcggcggagagagggagaaaaatcagcgcaggaaatggtgggcggaagagacgagaagaggagaggaagagataggagcagcgtcggtcaggttttcccaaaccgcaagggccggggttaccgcgccccagcggtaagcacggttaccgcgcggtaaccgtgaaaaatcgtgcaaaatttatcaaaaatttaaattattttttaaattcatttgaatttaaggaggttaccatggtttttctattaccgtactccctcggtaaggctggtaaccgcgataaccgtgcggttaccgacggtaatgtaaaccttggcgttggtgggctgatgggcagtggggaggggtattttctcacttgaggctaccttgggccgggataccctttgtgggctagagtatctttatcaaatggcctcagattttgaagaacccatcagaggtattcttcattggaagatgagttctctaagtatggctttggttgtacttccttcattcccaaataagtgcagctttgctatattcatcttcaacgtttgactactcgtcttatttgaaaaatttttataattaatatttttgttgtcatttgataataaaatatgaatagtattttatgtgtgactatttttttaaactttttcataaatttttaatatgaatagtacatgccgtactgtactcgtcatgcattgacagtattgaaggagaagctactccaactagtactagtagtaggagtaggagtaacacacatcacggggccgtagtacgctttagcccctgtcatgaatatcctgtctcaaaccagaggccagcaatgacaacaccacaaccggaccaatggtacccagctactcctactgcaagtcactgctgcctggtgccaaaaggccaatgctacagtgaccggagcacaggtgaaattgctgccgccctctttgggtcagctctgctcagctctcagcgactgagactgagctgagctgactcgcgaccgctcgccggcgggaaggaacagtggtcagtgcgctcggacatcgccggcagagtgaggccacggttgtcgatctcatctcactggaatctgtccctgcagggtggggacaccgccccatgccggtgggcccccaccgttggaggatccgatgcgtacgttatgctggagggtggggcccttcccccgtgatgtggggccaaaaggtggtcagctctgatcagtggtggcccagctatggttgtttgttctttcggagttggcgccatctggaagcgatgggggcgggtcagcctcatgtcaggtcactgatggtggggcccaggttgggcacgggtgggccccagcgagtttgctctcgtttcgtgcaactcgtgttggtagtggtggcagtggtgtcatttcgctggctctgcagtactcactccgtcaaaaaaaaaaaaaaagtaaaatctgatttttcgtgtccaactttatctgtccttcttatataaaatttttttataattcgcattttcattgttgttagatgataaaacatgattaatattttatgcgtgacttgtctttttaattttttttataattttttcaaataagacggacggtcaaatgttggacacggaaatcagggtttgtcctttttttttttctttttgatgacggagagagtaggaaaaatgatggaacagtagagtcagcctcggccagtagctgtgctgcttctttaccattaccggtggagttgtgaaggatttgggggttgattgacactgtggacaatgaatgcagctgtgaatctgtggcgtcatgtcagtactcaagtactcctaccaaactagtacggattattacttgctggattggattggttgctcccgttgtttggtcggatccagtccagtgtccgtcaaaactctccgatgcttggggattttgtgggtggtggttgggcgaagcgggcgtcccggcgttttgccgcgcggagcacacgcggggaggagcgcggacgggacgtaacgtaccacgttgtagtacgcgctcgcgcgggaatcgatcgcggctgccgccgtatcgatcggtgaagaggcggcggcgatgaccggaccgcgcggcgcgcgcacgtcgtgggcgcgaggcgacggcgaagaggtctcttgcggggcgcggtcgacgggcggtggtggcaggtggagtggaagcggatcgtcggcggcgtcgactcggctaaagctctcgctatgctccgcgcggttgcagcagctggtgtctgtccgtctctcgcgcgcgttggtcgatcggattacagacgcggcgcggcctttttgtagtagcggcgctggcgcaaggttgcgtgatctcggcgttccaggtgtgcggtgaaccgggggtaaagtagtctaggctatattctttttttttattagttttagttagcatgcgagagtgtttgaaaatgttaaaggatacattccgtgctaaaattttctatagaagttgctttaaaatatcaaatatatatattttaagtttataataattaaaactcactaatcaggcactaatgatttttttttcgggccctaacttcatcttcagtcttttagtaaaaaaatgaacaccaactctggccatctagaaatcacctactccctctccatccgtctcaaaatacaattatttctaaaatttctcataaacaataagtaaggaactagaaaaactaaaatcgagatgattgtaatagattgagatgtagaagtatgtatacaagttgttatattttaggataagttttaaatgatactaccttcgtttcagattataagacttcctagtattgcccacattaatatagatgttaatgaatctatttgtgtctagattaattaacatttatatgaatgtggaaagtcttgtaatctgaaatggaggaagtagaaacaaaggttacaaatgcattagaagcactctaaataaattttgtcggaacaacttgtaatgcatcgtcaccttcttcccaaaatatttattgattgtaacttagattgaaagaaaaaaaaatgtccgtcaaacactacaatgtctaaagatggttacaccaaacgatatcccattgtcttaaaaacagttagaccaaaggatcacttatataatccactgtaataccaagcaaaagcttggtgtaccgatttcggtccgttgagcgtcagtgatgacggcaatagccggcaacctcacatccacgaggggaaaaaattggaaagtaacaacccaaattgtttacaatgactaacttatctactcaacttgtttgccattagtcgccgtatgaaaaacaagagcctgaccaaatgggtcatatgggcaggtaaacgactcgggcaacgaaaaagatacaccttctacaacacatgctacggataattagatctacgtcaacattagtaaacagaatcagcatttgcaggggaatcggtaacttgcagggaacagcttcgcttgttacgtcaatgacagagagagcattctaaacaaaggcgaaacaacaaactttgtcctcctccatcaaaaagacaatttgcatgtttgatagggaccacaatgtttgtgtatgtggatgtgtgtgcatccataggattttctctagagtaggatagaatccattgccaatgctgatgagtgctggaaagctcatggagcaaaagctacttgtggtaggcattcaaaaaatccggcaaggcaaattaatgacatgtcaccaactgggatcaatggatctaagacaagggcttcaggatgatatgagaacacacagccccacaatctctctgaaatttagtgaaggtggcaacaccgatgcttgtgccaagaaagtgaagccccctggtgttatacttttcagcctgcacgttgaatggtgttcagtccagacacgtgtgctcagctagagctttaaaatgcgatatccatcaagatagtactagtagaagattgtccatccacagaagttaacaaatgcaagcaaccacacctcactttcggattagcattgcagagactgatgacataatagaccaggaattttcaaccttgatttttcttttcatcagttcatttctcacttctctttcaaagctaattacaacacaacacaaccgaaaaggcaggtcatgccatgccatgccacccccctccaacccaatcaaatcatggctcatctatgggataatatgtttcttctcccaattgctaaaacaatccaagcagagaatggtgaggaatatagagggaaagaggaacaccaccacatcacaaaagttaccttgtcctgcattctaattaaattttgcttcagttaagagaacaacaaaaagaacaaagctaaagcagttgggagagggagaaagagaccagcttttgacatccatgcataaaactgctaaaaagagattctatgcacctccagctttccatcatgagaggataacctactacacaaaagtatcactcccatcaaccattccaaatacttcagttagcaaatgatccagcaaaggaatgggcgcgccgtcctcttcgattaacagccagcaaacaggctcttgcgcctgtggctgttgctgcgatctgcttcttctggggtccaagaggcgtagctccgttcgcgcatattcagaattagcagttagctcgcaagtccagagtagcgtcctgaagtccgagcatcgacatcttacttgcctgataagacggatgtttcaattaggaaaaagaattcacagcaggcttgtttcatgggagaaacatttgagcttatacagggaagaaatagaagatgtggagaaaagagcaagtccattaccagcagcaggcttctgatcacttgatggttttacagacattgacattggggccccaaaagtcaattgtgccgctgacatatgagagtgaggcacaccgctcggagactgagatgctgcggcaagatgcataaaactgccagcgggaggatgatgagtcttcatgttattgctggctgcagctgcaagaacattcactggatcagttagcattgcagttgtggaaatagacatggaagtagagcatagggagagcatagtagacgaacccgacatggcgctctgctgatggggctgctgctgctgctgcgtcttgtcagctgagcgcttctggtaaaggccaagagcaacacctccagcagctccaggggcttgtggtgtgtatgcattggagatgaagaaatgacctccttgtggaaatggctgctgtttcatcatgtgcgactgctgcttactgcctgaattagaaccaggcggcacatttggctgttgaccaaggatcgatggcataggcatactactatagtgatttgtgggagctgacttggctccagacgtcgatgctggattcttggctgattgttgttgaggtgacggcaattggacagctggtggaacaccctttgcacttccagaagccggtgggctgccaccagtacttttggagactgaattggatggtgaaccagaagcaacgggagcatttgaagatcttgacaaatcccctcctccagtagacatattagtgacaggacccatctttgatgaactctggggttggtggtttgaggtagagagagactgcataggagccttagcttgttgctgatggagaccactcttcatcacaatcaaattagagggtgaagcaccaggggaagccacaccagcaggtgcacctgttgctctggctgacgaaggcttcaattgaggagattgactaggaacacccacttgggcagcacttgatgggtacatcataccctgaaaacttggcatgttcaagcggtctgaatatccacctgtattgcttggtgcagcagatctggggcgagagttcatatggtgatgctgaatcaattgttgctgctgcttatgaagttgaaggaaatgttgttgctgctgctgctgctgctgctgctgaggaatgctggatggggatggtgctgccgctgatgtagctgccggggccgatgtatttgctgatttgcctcctagactgaaggcatttgaaggttctgacccaataaggctcaaggtgcgggatgagctatcattagtgcttccactaaggaaaggaggcacataagacttgttatcttgcctggagaaggaaagtgaatgctgctgtgaatcacctggatactttgcagctgctgatttctttctctcactgtcaacagtgttatgcgttgaagaatcaccagccacagattttgtttctccactgacctgacgctggggcttgtgttgaccagcttgaacagattgcgctgtggcaaaattgagctgaggataaccatgcctgcctgcttcttgatggctctggaatagttgatggttcggccccaatgaagaaaagtcaaggccacctggggcagatccaggagcacccacagaaccaaaaggaaccacaaaagagggagaggaagcaagatcaattctcacaccctgccctcgactcgccggtggtagctgatgcgggtggtgatcacttaacttcttgtcactctgaccaccaccaccagcagcggaagtagggggcatcaatgcaaaatttggaagatgaactggaacggcataattatgatcataacctcctttctgagggtgagatgacttgtcatcacccgatggaccatcttgcacagttttctcactgtcctggcggtgagcaaggccaggcagcagcactggacgctggttgccactggaatagctctgggaattactggcagctgcagcagcattagcatttggtgcatatcccagtaacccttgagattgttgtggctgatgcttctgagatgaagcggacatgtttgacatggggttcttctgaagattttgtggtgacgccccttgctgctgtgatgggtgcaacatgtgagaagggtaaacatgcccattgaagaacggaacagcaggtcctggtggtgccatgcctcgataggcagcaggaggtcctccagcatgagcagcaacctggaacgggtagccgccattctgtaagatggcaaaaagctgagcatcagctggtggcaagttggcaaagctcaggttcatggccgctgcgccagggtttgctgaagaattgtgggcagcagcagatggtggcattgtattactgcccacagaaggctttgcatcacccactcggctggcagcatttgcagcagcagccacaa

SEQ ID NO: 9359 - DNA, 32525 bp, Oryza sativa
  unsure (1)..(32525): unsure at all n locations
cgtttcacaatgtaaatcattctagcatttcccatatttatattgatgttaataaatctagatagatctatctatcatcaatatgaatgtgggaaatgctagaataacttacattgtgaaacggaggaagttctgaacattcgtagactagatcatggaagacagaaaaactgtgacatgcaaaaagtccttttagaagcacagttaaattttaccctttcctactgcaactgctatttccatatgcaaacaggaaacggtacttcgccggcctcttgagcctcaagtacggagcagtacaagatcaaagcagccaccgtcactaactctgacaagcttgagttgtggcgcatgcagaagctgctttacaacttcccaaaataacagtgcaaacttagacccgttctgtccgggggcttcggacaacgctgtcaacgcacaagatgagtccttcctcagttaatcttagatcatgcgcactgaccacacgatcgacagagaggaataatggtcaaaacgtcaagcagacggcccgcacgcacgcaccgacgcacgcaccggcgcgccgcgagggggtgtccagacaaaccggcgtctgtcacctacagagaaatcctgcggggatcgagctaggcgcggacgtatgcagtgcagggcagcgagagacaggtaagtatacagtaggatgcacggatggatggatggatcggtggcgccggtgccgtcgccggcggcgtcgtcgtcgtcagagtctcagagatggacgctgaccggggcggcgcacgcgtgcacggggccgggggggcagaccggcagaaggcgtcaatgctctgtatctagcacgagataaacgcgcggtacgtagcagttcgtggtattcgactaatactctgctctcgctagcgcgcacgcgccaaacaggagaacagctcgagcagtggatgtagcgggtgaaaacggtcacagaaattcctatcgactgagcgccgtttctgcataaggggtattgtttataaccgtaccattttctgctatttttaaattttattttttaaatttttttctatcgtattaatatcgatacagggtagtttgaatgataaatatggtttaccgattccgaccgttcaccccggtagctgcctcagccctgccttggcggtgaaacgcacggacatgcatgcggaagagatgacgcggcggatagggcgtcgaacgggatttggttaagtggaatctgatccgggattctcgaccgcgactcggtcgtatatattcgtacgacggtacgaggaatcagcgatcgaggagccgaggaatgttattctccaatccgtttttttttcctttttacagtttttgttggtcttggcccgagaattgatattgatttgttcgtagcgacgaattctgtgcttgtttcaacgttatatcgttgtcgctctgtcagcagcaacaagctaggtcgggaggaaggggaagacgtcgcgttccacggtgagttggagatcgatcggtgcacgtcgcgtggaccgcgacaaggccgcagggacagcgccgtgcgtgacctcctgtcgcttcgcgtagggtcatgcattgctgtgcctgtgccagtatgcgacaccaacctttgccaatatagcgtcaaggccgccccgcgcgtgatcgacaactggtgccactttgctctcagtttcaggcggccatatacagtcgcaaaccgtgacggcttcattaattacgtgcttccattttccattgctagtctcggaatgccatttatatttagtaaactttagccacttctacttcaataaactaaaaaaatattataaaaaacatactatcttatcaaagttatcaccgtcgttcgtatggaggttgcagtttcaaagtggaaacattaagaaactaggtggctgatatttttagccatgtaccgttgccttttcgaccaagagattattgtttctactttttttttaatcttcgatcatcgtcactcatgtggaagttagaatttcagagtgaaagcattaagaaataaagtagctgagtgtttttaatttgtaccctattatttcagatcactgtcacttatgtggaaattgtaattttcaaagtaaaaaaatcaaaaaataattaggtgactgagtttttccttatctatgcgtcattgcctttccgattaatgtttacctatcctttttttcatctctaaccgtcatcactcatgtggaattaccgttttcgaagtgaaaacataaagaaatttaggtgggtaacttcttacttttttcttatctacatgatatgccattgccttgtcaaccaacatattaactaggtgataccccgcgctttgctgcgagatttatggataagtatatattaaatattgtcgaaatgatgaaagttgaaatgttgaaaaaataatgtgagtaagatgatttgacacatgcttgttgatgatgtgttatacttacatgagatttaaaataggctagaatagtactttctagtgagtgaagatgttgcatgcttgtataggattttaaatgggctagaatagtaattgctagtgggtgatgatgtggcatacttgcatgttgagttttaacttttaataattgttagtgggtaccgactatatagaagactatatagaaagtatcgatgtgtagcagcactcactcatgctttgccaggtgaaagagaaaaaaagttattccaacttaaaacaaagtattgtaatttggcaaatatctacaagctagtatagatataaaaaagctaatgtgcaaaggcattcataaaaattaaaatacatttaggtgaatccgtacatgtaaaaatccacactaaacttaaatcaggttgcaataaaaaactatcaaattaatttgaaatacaagcttatgcatgcatgttacttatatgcactacaaattaaacaggagtgtttttctgaagataacttccatatgatgcatgcgactgttagtatagggtatatagcccattctttgactgccaagtgcaaacggaaatgttggaatagtgtcaaccattcagggcatgcgtggactattccaaatctaatacaggccattcaacagtctttgcacggttattctaaaattaaagcacctagagggtgaccatagttatgcatcgaacaaaatctaatcttataactagggcaagaattctccagtgaaattcaaagcattggtcttaattccatggtctaaagaatgtatggatttaaaaatgtgaaacatttgtgtggagattatgggtaccccatacccacacgacatggttatccgactagtcttaggggatagcttatatctatggaatatgtaacagatcatgacttgggtattacgtttccctgtatattatggaacggcctaaagtcctggtttgataagattgtaaagtagatttaggaaaccgataccatgttggttaaggtttctatcttgtaatcctgccctccaccctatataaggtgggcaggaggccctctagggggcatgagacaacctgatcgtcagatcaatacacactcggcggattcaaatccccaaacaggagtagggtattacctctcattgagagggcctgaacctgtctaaatcctttgtctccgcatccatccacttttaggtctcgtgcgctacccccttttattattgccgaattcatgtttcgacagttggcgcgccaggtaggggttgcgtcgagttatctatcaagaagcgcgatggaatcaactttacgagtcgccggcttcgtcttcacttcgggagctgcaacttcctcgccgccgacgaattccctaagcttttcttctccaactcagatccaatctagccgggaagattaatctcggcgatggatccaatcaccgtcgccgccgagtcttttctttgatcggcaagaccggacgtcagtcaccgagttttgttcttgatcagcaaaagatttgaagccaacagctattatgagcctccataagtagttgttcctgtcaattctattttatgcaatgagatcaaatctgtcgccatgtgctgtcaagcaacagatcaagcatcagcagaaaacatgcatgcaaagctctgaagcatcggcgtctttcctcgtcgacatcaaaatttgttggcgagattcaatttcggaatcgatatggactccaacccagctgattggagcaattgtcgcacaagggcatcgatcaagccacttctgtccaagccatacatgcaggtgcatgatctacctagacagatacatgcacgcagcgacctttttgctggagtctctgattcaatcaagcaagccatacaccgctgatgacatacatgcattaaaaatcttggattacaagccaggtttatcgttttaaattctttcgcaaattagattaattcacagattactaattattgtttgatctgttattgtttatgcatgtatgtcggctgctgtcgtcgccgctggctggcttctttgcgtacatggctggtgtactctgccaccattgctggtggcgacattgtcttcaccaaccggctgcctccgtcgccgctgactggtgtcctcgcctatatggttggtcggtcacaccaccgttcatgggcgtcaacgtcttcatcgaccggctagccttcgccgccgccgactggtgtttccgcctgcacggctggcctattatgccgccgctgttgggcgtctacgacttcaccgccggcctacctccgtcgccgccgagtggtgcctccgcctacacggttggcctattatgccgccgctgttgggcgtccacgtcttcaccgccggcctgcctccgtcgccgccgagtggtgcctccgcctatacggttggttggtcacaccaccgttcatgggcgtccacgtcttcaccgccggcctgcctccgtcgccgccgattggtgcctctgcctacacagctggcctattatgccgctgctgttgggcgtctacgacttcaccgccggcctgcctccgtcgccgccgactggtgtcctcgcctatacggttggttggtcacaccaccgttcatgggcgtccacgtcttcgccgaccggctggccttcgccgccgccgactggtgtttttgcctatacggttggcagacttcgccgccgttaatgggcttcatcatctacaccactggcttggttccactggcgccgactggtgtttttgtcaccatcgatggactgcttcgttcccacatcggctacttttgctgtcaccgagggaatattacaaagctaagtcatcatttattttattctttatatgatattttgtcttttcctttgcctcactacatcaactggttcgccgttgactagtgagtcgggggctatagatgttatatcgtattttttaaacaattttcataatatttatcttgattgcttgcgacataatctgagtacaaaagtacctatcgagttatggagttctatcttcctatgctttccgtttggtttgccaatggatggttgcctttgggccgattcctagcacccgggggctcgttggatggaccgagtaacgcaaggtgctaagtattattcagaataaatcaaaagcatagagatgagataaatttattttctgctcttaataattgcaaaagtacccgagtagtaaattctgattcgtgaaactttgttccattaatggcgaactcatgtcactcatatgcatgtctgggaagtgcctaggccgactcccggtgcttgggggctatgactagtcggacagagcgtttaaacgtaatgaatcatctgctcggggaaatcaaaattgacaagaggagaaatacacatttataaatattttaaaatacttgattttttctcgagtattatatttatatcagatactactcatcctatatgtttgttctgcaggatccagatccagatatgcataaaagggattcatggctttaagcttatctcttacgctccaggaatggatcagtcagaacatcaccaccggctcgcctcgaccgccgccgactggtgtttccgcctgcacggctggcctattatgccgccgttgttgggcgtctacgtcttcaccgaccggcttgccttcgccgccgccgactggtgtttccgcctgcacggctggcctattatgccaccgttgttgggcgtctacgtcttcaccgaccggcttgccttcgccgctgccgactggtgtttccgcctgtacggctggcctttatgccgccgttgttgggcgtctacgtcttcaccgaccggccgcctcgtccgccgccgactggtgcttccgcctgcacggctggcctattatgccgccgttgttgggcgtctacgtcttcaccgaccagcttgccttcgccgccgccgactggtgcttccgcctgcacggctgacttattatgccgtcattgttgggcgtctacgtcttcaccgaccggccgcctcgaccgccgtcgactggtgtttccgcctgcacggctggcctattatgctgccgttgttgggcgtctacgtcttcaccgaccggccgccgcatccgccgctgactggtgtcaccgcctgcacggctggcctgttataacgccaactgatgctatcttcttcacggctggctacatcgctgtcactactaataggcatcagtatcttcaacacaagctgcctacgtttgccatggctgccgactggtttcttcacttccatggctgcatgattctgccagtgttgattggccttaccatcttcatcgccggtcgtctcgtctgctgctgactagtgcccttacctctacgtctggtttatacagctaccactactgatggacatcatcatcttccgtcgccgactgattatgccgcctccgactggtgcttttatcttcacaactgcgcgtcttcactaccggtttgcttctgttgccgccgatttgtgttcacttcattacggcaatacaactttgtcatcatggtggagcgacttcatctttattatcttcggcaccggcaaactctattgttgctacttcgcaagttttactacatcaccaaccatgacgttgttgtgaatctcgacatctcggcatgcgatgccgtgttattttactacaacaagtggctctccaacattcatgatttctacttggacatcttcaacacatatcttcaatcaagcaataactattcgacgacaagatgctacagttctcgactctatgttcagttgtttcccaactaatcaaagagtcgggggctacacaaatacaaggctcaaaatttgacaaattttatgtcaagctgaagaaatcaattcatcaaccaacgagtcaactccaggagtcattatcttcatctttgatttggagcagacattctacttcaacaacttcaaatatttcggtttagacgagttgggcaacaacatcaactctcctccaattatttgtcttcacggttggcctactacgcaactgccgatagaggatctcatcgttatcatcggctgctacatcgctattgactggatcaccgacatcgtcatcttcatcaacatcttgtcaagcctcttcaacatagcctactctgctgccgttgatgggaaacttcgtcatcatagtcggctatctctgttgccgctaatcatcattaccgtcggatgcgtttgtcgccgccgattattttcttcatcttcatgattggtggatttcgccatcaccgttgatgcgcgtctacgtcttcatcgtcggtttgcttttgtcaccaccgactgttctttcgttgttgttgggcgcctacatcttcactgctagctgacctgactgttgccgactggtttcttcgcctccatggttatgcaacttcattacctttgattggtgtcactgtttttactaccactgacatcttccgttacttctgatgagcaatttcgtcttcatgttggtcatttcatctccatgccgactgcgtcagctattgccaatagacaattttgactatgacagaaggacaagctatatgctcaggggctcatcaactcaagcgtgaggattatatctccaatttggacttgttccggatacattccacatggattcatagtcatgagtctattttctatgctcaaagactggaccaattattattccccgtaagggctatcaaccgaatacttgcgccagtcgggattcaattattatatttattttggagtatcccataagggataatcattcagatcagaagctattcatatgagctacacttggtctatattacccggaagatttattactcgggagcatgttacatgcgtcatcctttaaagggtgtcgaaggcatattttttggcctaggcctaatatgtctgcagcccatattttcaggtgtggcctgtcacgttcttttagggacttaggcacttttcgcttaggccaaagtgcgcgtgatcaagtgcccaataccttaaaatccttttataccgcagttactcgactttttaggagttggtacaatgcatcttaaaaggtgtcaaacagtaaagctttatatagctgccccgctgacttttttatatagtcaaggtgctgtttgggtttatcaagcaattgattggatacaatatcattgctttttgccacgtaagtgtgcatttttattgaccaatattatggcttaggctgattatatattatggtcatttttcaggcggttggtaaatcctttatgagtttacttactcggatgttataccacatgtgccatatatttccaggtgtggtgaaacaatgtgtcttttatggacttaagcacatctgttaaagcagtgtgcgcatggcgtatgcccaatactttgaaaatttctttattcacagcattcaagcttctttatagttgttttgctatgtgaactttcaaagatgttgtcaactttaggttgtacgcatcatattttgccaagcagtcggtatatcacttggatcatattattcggggattcacaccgcatatgctatacattgatatcaagtcacttggttgattacaattatcaaaaccactcggttggttagattatttattccttgactatatgtttggttggttcaattaaccacatagtcgggggctacacctattaggtgcatctattcgatgcacctgactatatttttcagccctccacagtcttcagatttggtaaaagtactcgggagaccatggcgaagataattgaagcactcggctttggagtaatctagttcgagagaaggttatcttttcggctgtgaaggtctcaggggctactgtggagattatgggtaccccatacccacacgacatggttatccgactagtcttaggggatagcttatatctatggaatatgtaacagatcatgacttgggtattacgtttccctgtatattatggaacggcctaaagtcctggtttgataagattgtaaagtagatttaggaaaccgataccgtgttggttaaggtttctatcttgtaatcctgccctccaccctatataaggtgggcaggaggccctctagggggcatgagacaacctgatcgtcagatcaatacacactcggcggattcaaatccccaaacaggagtagggtattacctctcattgagagggcctgaacctgtctaaatcctttgtctctgcatccatccacttttaggtctcgtgcgctacccccttttattattgccgaattcatgtttcgacaatttgttttcttctaaattaagatccaaattagaggtattatgaaaccatgtgcagtgtggtatagcgtggagtggaaacaagagggggccgggtcaattcttttccattgtatctatgccgtccttttccctcttacacgatccatctctcctcaactttacatttaattacacaagtaactaattaattaagggagagagaaaagacaccatgagtgcatgaccatgaggggtgccctttgtggaggggtaaggtatttacgtagttaaaggcagctttggaacatttagatttaaaaatactccattcatcccaaattataagacatatttttttacatagtctccaatgatatactttgatcattaatttattccatactatattccaataaatatgaaattagcatcacacgaaaataatttaaattataaaactagtgatataacatgcataatacttagcatatactatatgattagtatgattagcagttaaaagttaccgagtttaatttttattataaaaaaagggtgccctataatttgggacggaaggaataataggtattagtgttcaattacagatcaatgtaaaactagagatattttaccgtctttaagggagtattatatatagtttttaacatttaccccaaggtatgtactcccttcgtttaaaaaaaaagacaacctagtattagaatgtgacatattctaatacaacgaatctagacatagagtatgtccagattcattgtactaggatgtgtcacgtcgtaggacgaggttgagtcttttgggacggatggagtatacatgtactcctacaagacatgattcatgcacgcgtctaatttaagcagcattatatctaaagtaagtttcttttatctagtactttatatacaaatcttgagtactactgccatatctttaagtaaattcaactccatcgatctgttcctagctaaaagaaagtcattttaggttattttgcatagattaatgtttgagaagagaatagacttagcgctccttttttttttttgaaaacatagtgcttcttattaaatgatgttttatggggagtgggaaggtggagaggtagaatgtagagaaatttgaacttaagggtgtgtttagttcacgctaaaattagaagtttggttaaaattgaaacgatgtgatggaaaagttggaagtttatgtgtgtagaaaagttttgatgtgatagaaaagttagaagtttgaagaaatagtttggaactaaactcggcctaaggtgattgacatgataagtactactctatagtgattatatagtaactttacttttgatccagaaacataaccaaaagttgatatatttttgggtagagaggaattattctttttagggtggagcttaggtacactagtttttttccccttgcagaaatgatatggaaatgcatgcatcgtacgttaattgctactgatggtggagatgaattttttagaagtactcaacggcttaataggactcataccggtgaattgatctggtattaccgccttatgttttttagtgaaagtggaatatattgatgtaattctccttgcaaataaaggagagaaataatgtactaccggccagtggataaacagcattaattaattagttaatacggtaaaacctggtcaagtagctagcagaagttgcatagaagaaacattaatgcgtggttaaattctcaggatatcaccttgtgctacttgacttaataactgaacttaattatattccgtacagagttgagagcatgcacgcgtgtataagaattttcaagagctttgcatattttctcatatacgtagatagaattaatccgacacaaattaaataagtacgaatacttttgaaattttgactatcgataatttctttgaaaatatttaaaaacgtttgagcattttatatttttttaagaaaaaaactatatcataatatcatatatacttattttcccaaaatatattagattttataaatttaatttaatataaaattgatcaaagttaacttaaaaaattaaaccagaattgtcttgaatactatttatgagtggaacgagtatattactaagtatggttctaacaaaagatatgaagctaggggcctgttcggcaagctgggctgctgcagcccctgctatcttgtggcttgccggactgttcaggtcctcggctgccgaacatgccctagagcaatggctgcaatgcagtagaggctgtaggttaacctaattaacgctgctgaaagtattgctacgtgcaggaatttatttttgaacgaaacgtgcaggaaaatcaaactgaagaaattgaaatgtgaacactaatactagttcaaaacgaccatatccatgcatgaacgcttgaataaataccagtagacaaaaaacaacgacgacattaataaaggcgggagacagaagtttgaatccagtcctgccatgcaaagagtggcagactgttaaaaaagcactgtatttttaatttattggtgtaatcatgtaaatacatatacacatatgcacataattatttgcaaaaccctattctcatgcacatatcggcatggactgcctagctagctagtcactcagtgctgcatgcattgcttatttttacgtatagtaccaattcaatcctgcagattaatttatttacccaaaaaataactaactagaaaaaaaatgaatgaatccatcccaagttaaatgttatttgttaaattgcccccggtttttcttagtctcgtcctctgaattgtacatggtgaagccgcgatgaaccattcaaattacagcctggacatgatcatatgtcttccttgcgtgacctcatgcttgtctatgttctccaaaactgcggtagccgccgatgttacgagctctgcaagatctctgtagaggcagatcaccattacaaatgcgtcagttgcgatcaaacgagaagctaaccgagcttagctactaagtatgagaatataatggcgccaaatggctgcagcattttaaacctaccctgtggctgtgtcgtaggtgaggccgactgtgttcttgacctcgcgtagcgcgaatttgaagcgttcaatgtcgcggggatggtgagcgacggactcgacgacggcctgcgggaggacgagatccgagggtttgatgttgtaaaacaccgggatgatctttttccgtgactcgacgaggagggcgagctcgcggaggcaatactcggagtcgcagtagtgcggcgagaagatggccaccgcgacgccgcactggctgatggcctcgctgatccgctcgtcgaggcgatcgccggggcgcattgactggttgtccaggaaggcgcggacgcccgcggcgacgaggcggtcgtagaaaagccgcgccaccgtcctcttggtgtccacgcccctgtggttgatgaaaacgtcgtagcgcgcctccccccgcgcatcctcctcgtcgtagtactccacccgtctcgccaccgccgccttctgcttctcccccctgctgctgctggtggccgcaaccgccgcctcagccgacgcgtttagccgcgacgcgatggtgcaccggcggccgcgggaaagcccggtggacgacatgatcaaacgaccgatatatagctagtgatatcgatcaagaaatgtctcctagaatactgcgagagcgcggagaaatccaagagtccaagacgttctctagttagctgatcgagctgccgcgatcccgatcaagttgatcttgatcgatcgaaacgtctctgaacaatttgagtggaagcagcaaaaactccaacaaaatagagatcgatcgctacgagttagtttgtgaattgtgatgcctgatatgtggatgaggggatgggccggcatgcatgcgtttataaaggattgggttcggggtggtcatggtcgcatcgcgcgcgcatgggaacattttaattatgacatgaaagtactgagtaagttatccgcgcacagtccccgggcggggaaatttgttattttaatagtcagatttcgctttgagtagtattatcaatccaaagatcagaccgtcgtcagtccaccgtcaatccaccccgtggcttatgctaagacggactatataattattatgttttctggtcccctatatatagtacaacaaacagatattctgcatgaattcagaccaaatattatacaatccaaagagcgattcgctacttttcaagctctcctctccaagcaaaagcatatacattactggattttcttcgctcgagcgtttcaaaagtttgaattttcctcgctcgagcgtgcacacacgcgttgcgttagacctgcagatctttgcagtattttggcgagactctgcgcagcgtgcagccaaaggcaaaaaacactccgtgcagaagattgaatagaaattttgtggaggtgagaaccattcaaatacttgaacgacggggctacgctgaactgcagcaatcaatgggacaggaatactactgcaacgatgtttggggtcgggaggaggatcggaggaggggggagccgtacgatcgccgggtgacgtgcgagagtgatgacgtcacacgttggactgtccccctctcatctcacgtgtctgccccacggtttgacttattgatgcgttcaaaagttccacgggctgctgggctggctgcgccaccggtacggtcgctgtaataaaatacggaattgctaaactacagtcaatagaaaagctacctctaaatcttataaattttggttcactagatatgcttcgcgattcgtgctccaactgcttcttcttcaaccccaacaaactcctcttcttccccgacgccggcgataacccaaactccggcgaagggccgacgaattaggttcccggggtagggtggggttcgaggggtgggaagggaggaagaagggggagttcgccgggcttagagggatggtcgtgggcggcggcggcccggaggtgggcggcgggtcgggtgggcggcgaggcgccggcggcgctgccggagccgcagggctggaggagggcggtgggccagcgtcggtggtgggggcatctcgccgccgacagctcgaggaggaaggaggggaggagggaggagaaggagggggaggaggatggtaggggggagggagtctcgccggcgccgttgacgccctccagccagccggcgaggcgggcggcgacgcggtggggtggtggcggcgggggatcgggtggagctgcggaggagctcgcgagcgtgatgggagggaacgggaggaggagttgtagggttaatgtatcttcatgaatcataaagcacatccaatggttcaaaaattgaaagatgggaggtgggattttctgtcaacagatgtatagatagtcccaatataataataataataataataataataataataataataataataataataataataataataataataataataataataataataataataataaagaaaaggtgaactttaaccgcaccatcgtcgagttgaaatgaagtccacgaagattaatttttgggggtttcgggtgtacttctaatttcgataatcgtttccttttgaatgtgaaattaatttgatatatagtcgaaggcacgcaatctgcttgataatgacttgtttggccagaaattaatatgaggaagagacaaagtgtaattaaagacttaggagtacgtgtgttcctagaaagtagacatatgtgtacgagtgtacaccatgtctattgatgtagttcaaaaaagccgacgttgaatactttatttgttcatgcaaatacattgttattgatatgttttaagggaatacttcaaaaatgtttgaatctcaatagccttttagtcgtattgaagatacttgaaattggtaaattgatggattatgtggtatttgtgatagctgtttgaggatataaacgattgaattaaatagcataaagttgaaaagttaggaaacatgcaaacgaaaatcccaaatccagaataagaaaagaacgtggctttaaaactagcattggattcatgagaaacttatttgtgtatttgtttagaaaataatattgttatattaccaagttaataaaataattatgttacggtaattccttcgttccaaaatttgactcagtcacgtaaccattttttaattttaagttcgaccaaatttatagaaaaagcataaaaacatttaggggttgtttatattgcagccaaaataaaccttaccaaattttggtaatgccaaaattttggtaatttggctattatgtatttactaaagtttgataataaactaaatgaacgcatatatttggcaactctatcaacaaatgttatgatttaaaatggcatcaatctgaacaagcccttaagcccttagaacatcaaacagattatatacatatatttagcggtggatttaataaaaccaacttggtattgtatatgttgctatattttctaaacttaaagatgtttgacttagcacaaaaccaaaacatgttatattttaaaaaggaaggagcagaaattagttgttaaaattatattttcaagactgtattgatacccaaaagacacatttctaaggatagatggagtaatacactaggtttacatataattagaataaccactaacacagtaagtttatatgtaattagaatatcaattaattaaatgagaacatgcactggcccaaaattctgtattagacttggactataatttaatatgacgtatattaatttacataaatatgattttccatctctgtataaattaagttggttattcattggttatataagttggttgtaaggatagtggtagagccgagctcttatcccagtccctgttcttaaacaaatactcctaggtaccatcagtccttaaaaaaacgttatcatcattaataggtaccatcagtttgtacctacatgacgactagtatatgaactgatcacatcctaactagctcataatcatcacctagaagtgcaggttttggcataacttcgttaacaaatatttcatctcgatattatcatcacttggattttctactatgttcttacttgtttcaactaccgagatttatatcaattcatagcttttataacacgtttctttactatcttcggtgttccttatttactgtactcttactttcaataggatttaatttacatactccctccgtactagtaaaggaagtcgtttaaaacagcgacacggtcttcaaaacataactttgactttgtgtttctataaaaatatttattgaaaagtgatatatgtatatttttatgaaattatttttcaagacaaatctattcatataatttttacattttcaaactcaataattttagaggtattcacgatttatatttccaagatttgatttaaacattgtcctaaacgacttcttttacgagtacggagggagtataaccgctacaatttgtaagttctaataatgccctggctttcacttttaacataaataaatccacttccaacttaagactgtgttgttcagtgtttattgggtacctactacctcatttttcgtaagcacatatttcaaaatgctaatgctcaactcaactaatcctatgctaataggtcttattgttttgtgtgctgtgaaaaagcctaaccattaagccatatgaaatgaatcatgattaagtggttatagttcttgttgagcagtgcaaatagtcattcctatatttttttatagaagatctattccctcttaaaaagtcaaatcctaaaaataaatttggatatataagattcatctcgaggattaaggttttttttacagagggagtatgttatacatctctactattataaaaattgaagatgttttgccagtattttggtacgttattcgtgtatgagtcggttttaagtttgtttgcttttggaaatacatatccgtatttcagttggtttttaagatagttcacttttggtaatacaaaaggaatcatataaaaaatctgtttaaaaaactcacatgttaacttgagacaatcggactcctatctgtagctcatgattttctaaaagaatatatatgcacgcaaacttccacagtaaatttcatcttaaataaaccatataacaataataagattaaaatagacttcacccgttacaacgcacgtgcattttttttctagtaccataaaaattctcagtcatccgagtaaacatatctaatttttactactactaaattggttgtactagatggttgaacgtcggggattttattggcttgaattcctgcacgcatacatttcctaagtttccgataattagttgacaacccattttccaggcaaacgttaaatcactagtgctggaatctgaggatacatttttggagaagtcaagggacatgtttgctacacgcgctgagtcaccgaccaatgggacccacccctagcccggcacgtcggaaggccactaccgcagtgtgcgccccaaaatcgccgccgtcccccgtctcactccccgccgttctcctcctcctccgccgccgccgccgtcccgcccgcccgccgccaccgcccacatgtgggagcgcggcaggctaccccgcaagccgcgaccgtcccctatcctcgtgccgccgccgccggcgtccccgccgcccccgccccgcctcctcgccttcctcctccctagatccctcctctcgctcgccgcccgcgccatgccgtcgcgccgcccgtctcccctgctcctcctcctcctcgcgctcgcgctcgccttcctcttcctcctcctctccccatccgcgccctccgccttccacctttccagctccctcgcctccgccgccgccgccgtttccactcccgcgtcctcccctcccgcccccgtcaagatctacatgtacgacctccccgccaagttcacctacggcgtcgtccgcagctacatggcggcgcgcgcccgggcgggggcggcgggcgcggcatcggcgattcccgacgacgagctgcggtacccggggcaccagcactcggcggagtggtggctcttcaaggacctcaggcgccgcgggccactcgaccgccccgtcgcccgcgtcgacgacccggccgacgccgacctcttctacgtgccgttcttctcctccctcagcctcgtcgtcaacccgatccgcccatcggcggccgccgccaatgcgtccgacgcggcggagcccgcgtacagcgacgagtccacgcaggaggagctgctggtgtggctggagcggcagccgtactggcgacggcaccaggggagggatcacgtgttcatctgccaggatccgaacgcgctctacagggtggtggatcggatcagcaatgctgtgctcctgatctccgacttcgggcggttgcgtagtgagcaggcatctctcgtcaaggatgttatcctgccctacgcgcaccgaatcaactccttccaaggcgatgtgggagtcgaaagccggccttcattgctattcttcatgggcaaccggtatcgaaaggaggtgaaattcttaaatcttgggagaaatgtgatggcttgatcaattaatttgcattgtacctatcatagagcatctgcattttcagaagggatattgtatgctatagagtagagagtgaatttttttgccatatcctagataacattagcattgaattttattggtggttatatgattttccagagcactccaaaatcatgttaactttatgtcttaagttgatggttctgtctgagaatttttaggcaatcagaaaaaaaatgaagcttaatatgccattagctcattatatattttttgttaccatgtgcctttgatttagcttgtttagatgagttttcttacatatattataaataggaaactatcacaaatgtatcatgtgcaaacacattaattgatatgagatgattattaaaaaaggtgtgattgatttttcagtttttacatgcctccttctctagcgaacttttggttctggatatatctgttgactggtcaacaacctttcttttagaattcaagtcaaattgcatgatagcttccacattttgcaagccatattcacttagaaagttctagcctttcatgcacgttcttgctgattgattatttttggtgttctgttttggagagatcaactctcaacatgaactcgtccattcctatatttttctacttgtcctcataattttccttctttcacacatgcaaaactaagttggaaggcatgtctcatactattaatgactgaagatttctgcacatgccctggagcctgggcatatttattgattggtcaacacatttctttcataattcaaatatgattgtatgataggtttccacagctttgcaaaccataatatttagaacattctagcctttggtgcactttcttagctggcccatccattagtttttcttttaaaaatcaagtacgattccatgatatacttctacagttttgcgagccataatcttttagaaagttctagccttccgtgcacattcttgctgattgatccattagtcttctgttttggagagatgaactctgccaacatgaactcttttgttcctatttttgtatacctggtcctgataatcattcgtcttctgcacatgtaaaactttaatgtttgaaggcatgactcgcagcatcccattgctaaagctttctacatgtgtacctaattgtataaactatttgtctctctctgttccaatatagttgtttggaatgagtgcactcaatcttggtttggaacaacagagaagttaagaacagtatcatctgaagcagtaagctttggaaatgaccaattatggaaatgtaaaaatgtttgattcatttgcataattgttcatctttgtttccttgtgagttttaagattgttaggccctgtttaagattatacatatgattcatattcatccttccctttatttttgctgtattatttagagcactgctacatgcactaaaattttcttacaaagctcttactaacaaatttctcaaccatttgatttaactagatggaagttacaaaaaatctagatttacttacagcttgccacatcagagtttgtaagcattttgtaagaaaattttagtacgtatagacttttcctattatttatgttattgcctacagagtttactgtcagtctgtcattttcttttcttcctttcacactttgtttatgaaataacatcttatactaaggttgttaaccttctgataatttagggtgggaaggtgcgtgatacgctgtttcaagttcttgaaaatgaggcagatgtaatcataaaacatggagcccagtcaagggagagtaggcgtatggctacacgaggaatgcactcatccaaattctgcctccatcctgctggagatactccctcggcatgcagattgtttgatgcgcttgtcagtttatgtgttcctgttatagtcagcgattacattgaattaccatttgaagatgttatagattacagaaacatatcaatatttgttgagacaagcaaggctgtacagcctggatttttaacatcaacacttcgaggaatcagttcacagaggattctagagtaccagagagaaataaaaaaggttaatttcatctctctctcatagttgatgctgccatgtgcatattacattcagaattagcttcgtgggttacattgccaggaaaagagagtgagaaatacataaatatttagtatctgcaccttcagttaattttgtgagcacatgattcaggtttaactgcttggtacatttttccaggaagataaccatttttctcctggcatttagtacgaaacattggcaatatcttgaatcacctagttgttttcagttattttgcaattttggcatgttatacatatgatattttggcacgttatagttttataggcatgttatacatatgatattttggcacgtttgtcttaactagtaaaacctgaaattttgtttcaggtaaaacattattttgagtatgaagatccaaacggaccagtgaatcagatatggcaccaagtttcttcaaaggcaccattgatcaagctgttgattaaccgcgataaacgcctagttgaaagaggtaccaatggaacagattgctcgtgcatctgttcgaccacgaaggaacttctacgtaaataagatggttctcatctcctggacgaacccaagttttgtggacgacccttctgattgagtacagtacctgaattttggctgacgctgagctctgtaactatgtgcagcgaggatcctaacaatttgttttgattgctaagcgcccatttcctgctgatttttcttcaattttcagtagatattagaatgttgtgaacaatataacaccactggtgcccctggctaaagcagaagtatatcattgttttcttttgtacgtgtgacttatatacatcctacattcctttttctcccaaggatgttaccctcaagtttacatgcctctgtgttacccaatcgaattgtgcaaggtacttgtatacatagaagcaacagagacagagggcctcatggaggctggagtgtgacggagagccacaaagccccatgagcagctgacactgctcggtgtgcttcggcgtgcgagaagccgtcgagcaccgagaactactccgaatgtgtgaagagaaattatggaaaagattaatatgattttttttaaaacaacttttctatagaaacattttagcatcgtttagcaggttagggagggtgaacgtggaaatcgaatactttctcttctgtcattcaaatgaacgcactcttagttattcataaaatatatgaataagataatttagttaacaccattcaataataattgtcagactaaaaacatgtaataattacaattttacaacttttagcacagagaaaatttagaaaaaaagcaagagttcaaataaaaatacaatttaaaagaactgcaatttgaaataaagaataaaataagaatacatctaatccaacataagattaactaaaattcagaataaaaaataaaataaattctgaacttagttttttcaacatgaatctatccaaaaatcagaatcaaaaggatcattaaaacttgaaacaaaaatatataataaaaataaactagtaaagacaacttaccaagaaatacaattctataaatatccaaaagtaagattaaatacaatttggaataaaaataaataaattccaaaactggatcagataaaaagaaaaataagagttcaattagaaatataatttgtatacaaatgcataagttatagatcatgcatgctcaaagtaattttagtgataaaacaacttaaagaaatgataattacataatttttttaataagtcgaatggcaaaacttatgtccaaaattaacagtgttatttattaaaaaaatggagatattatttaagagttttcccacctagaaactagcgacaattttttttagcaatttccttcgtgtaaactagccacctccgtggtagaacggtcacgtacgtaatgaaatgcgtgatgagccttggcgtgtggtgtattgtaccgtgtacatgtccgtcgcctcgttttttaaaagatatatatatatatacgatttaaatcttacaatttttggcgttccttccggtacgtcctccgcgccttgttattacaggctctgcctgtacatacgtacgtgttggtatggacatggccgcagccgctgccgtctggttctccgccatagccgccgtccttctggcggccagcaccatcgccgtggtggtggtggcgaagatgacggggaagagaaacggcggtgcggctgcagcggcggcggcggcggcggaggcggagctgccactcccgccggtggtgagcggcgtttccctgataattccggtgatcaccaggggccccatggctgtggccgacgagctgtacgtgaagctggggagcgtcttcacggtgagcttcctcggggtggtgaaggcgaccttcctcgtcgggccggaggtgcagggcggcttctactcgcggccggagtcggaggtccaccagggcggcacgtacaggatgacggtgcccatgtttgggagaggggtcatgtacgacgtcgacgtggccacgaggtcggagcagatcgccgtctgcttcgaggcgcttaggccgaccaagctcaggagcagcacggtgaccatggttcgtgaaaccgaggtgtgtacgtatacagtacctccgtttttcatttgatgatatcgttaacttttaggtatgtttgactattcgttttatttgaaaaaaatatgtaattattatttattttgctatgagttattttatcactaaaagtattttaagcactttttatgtcatacatttgcataaaattttaaataaaacaaatggtcaaatatgtatctaaatgtcaatgcgtcatctattaaaaatagagggattatgctttgccgctcctcttcgtatgacttttttgtgactttttgatgctggttattagaggggttagaccaaggttttaaatctctgtttataactatcgatatttcttcgatgataactgtttgagtaggatatagttatttgctcttatttatctcaccattagtcgtttgaaaggtcgagtgctcaatatcttaacccttttaccttttttgaaaaacactaggctagatagatgccatatcggattgaggggttattattggagatttggaggggcattttttttagttattttttttctaaattttttggatggtgaggctatatgaggtgctcttgaagatgctctccctttatgtccgagtgattgaattgtataatttgcaacacacaagcttgcttttacagaactcatggacttctttacttatatcgtataattcgcaggaatatttcgcgaaatggggagagcaaggcacggtggatctgaaacgcgagctcgacctcctcatcctgacgatcgcgagccgcgtcctcctcggcaaggaggttagggagaccatgttcgccgacgtcgtggcatccttccacgagctcatggacaacagcatgcacctcatcagcctctgcttccccaacctcccgatcccgcggcaccgccggcgcgacacggcgtccgctaggctcaaggagctcttctcccgtgccatccagcttcgccgcggctccggccgcgccgaggacgacgtgctccagcggttcttggagtccaggtacagggacggccgcgccatgtccgacaacgagatcaccggcatgctcatcgccctggtcgtcgccggccagcacatgagctccagcgcgagcacctggaccggggcgttcctcctccgcgaccccaagcacctggccgccgccgtcgacgagcagcggcggctcatcggtgacgaccgcgtcgactacgacgcgctgacgacggggatgagcacgctccaccgctgcatcaaggaggcgctccggatgcacccgccggcgccggcgctcgtccgcaccgtgcgcaggggcttcgccgtgtggaccagggaagggaaggagtacaggatgccggcagggcacagcgtcgtgtcgtatgccgcgttcaaccaccgcctcggctacgtgtaccgcgaccccgacgagtacgacccggagcggttcggcccggagaggaaggaggacagggtcgccggcaagttctccttcacggcgttcgggggcgggaggcacgcgtgcctcggcgagcactacgcgttcctgaagatgaaggtaatatggagctatttgctgaggaattttgagcttgagctggtctcgcctttccccgaggttgaactcaacaacataatgctagggccgcgaggggaagtgatggttagatacaagagacggaagctgacaagcacctagtgcattaagtcgtaattacagtcaaaattatttgagagcagacgtactctttactactacctccgtctcaaataagtgcagccatggtattcgtatttaatatttgatcgttcgttttatctaaataaataaataaataaatataaaaaaatagtcacgcataaaatacaattcatgttttatcatctaagagtaacaacaataaaaatactaatcataaatattttaaaaataagacgaatagtcaaacgttgaatatgaacaacataaaactacatttattttgaacaacataaaactatatttattttggaacggagtgagtactttcagtcataaatactgtaactgagagtctcttccatgatggaacgtgttttgcagtgtgttttgcgtgcatatgtagtgtgatgtataagtaaatctttgagatagcaaataaaagaacaagcaagttctcacgacgaatttagtcagaacttcagagatggacagtgctgcacctcaatcagcaaaattgggatatatgcacctcggtggaggagtggtggtacctatactctcgcacaaactgccaaaccaaacaaaggccctagaatccttgataatcctcatctcttgggagctttggtgcgagcgcaatgtaagaatcagtagtaggccccagcagcagtgactgcaaagataaaataagaaataaccgcttgggtccatgtaggggtgtctagtctgcaagtgtttaccgttctaggagaagtcccataatatgctctcttttacggtcttcgtgttgcaaaggtcctatacatatttatttttcatatatcttctgctctattaatatataagagccaaaatttttgctctctttttttttttaaaggaacaagcgagaaaacatcgttactgtagttgcacagcgcgtgcgatttctccacaggaaggtgaccttcttggttggacctgaagaatcgagccatttcttcacagggttggattcagagatcagccaggacgaggtttcccggttcatcattccaacctttggctcatgagtggccttcgatgcgagcaggaccagccctaggggggtcaggccgtgcggccgcccgaggcccctaaaatctagggcccctatacacatatagtatatatatactatgtattgtataattttaattcatagaccataggcttatattaagttagacagctgaataacccaattcagaaaatgaattttagtctatcgccaggcatgtttcagcgaagccgaagcgatattcatctgactcccgtcgcttcgcctcgatcacatcacgccagtcgcgtcgcgccgccttgatcacatcacgctactcgctgctattgcgctcgcggcaacttctcggtcgcgtaaatggaaacggcaagtggacacagcaaatcgtagctcgccagtagccacactcatgtcaataaggacctccatataagtttttgccctgggccccaaaaccccaggaccagccctggatgcgggttatgccacgcagtaagagcagttccggttctttggtgatacaatgaagccgaccaagctgaggagttatgtaagtcacatggtttacgaagtggaggtatgcaaaaaaaaaaaaatcctactccgtttatcttaaaacgcagcaagttttagtctttgacacaggtattaaggagagggtcgagtaaaaaacatggttaccttctcggggtaggtaattagttgtggatataataaagccaaggaatagtaacagtagataaaaagagttacatattatgatagtttgtgaaataataaatctagtaacatcaattttacatgattgatctttttaattttttttgctattaatagttaaatttgaaaatagttgacttagcattattcaaagatacttttattttaggacgaaggacgaagggtttacgtcgtttctaaagttgtgaggagtacctttttatagttagtggaaagtcatatggctcaattatcaatcttgtttttttttttgaagaaggaaaatcgggcccgaaagccatacagctgcatggttaattgcaggaaaaccggttaaaacccaccgctacataactaataacgacggcggagcccaattgcaggttgtcgccaccaaactaaacacaaaagcaacacaacagcccccacatcgcagaagatgtgttatcgttgccgagttagccgcccaagcgacctagcagcaccgactccacaaccgcagcgatactgaagccacgaaagtcgccacagcgaaaagtagctccgacatccaataatggacatcagccaagctaccgaggagcaacttccttcacacggccaacaccagaactccttggaagagactgcaacatgtcatcgttgccgagcgttgccgcaccccatcagcgagtagcttcgacttcatcagtagaaacaaccgaagagcatgtcgcccaccacaagaaagaagcggacccaagaagacgaaggcctcgccgaacactaaggtatgaaagcttttgaaccgaaaaagaccatcgacagtcgtcgatgcgttggagcttcggacaatgcgtgcgacgcccccaaggagaacatgacgatcaatcttgcttgatcttatataacttatcataagtgtttaaataggctctagaaaatttatgaatcctgcgaaacaaatgcaacgtctatattcaggggcggatgcaggcctatgacagttatgatttgagccctagacttgtctccaaaagtaagcttatatttctcaaatcagcatgtaaattttaaaagagaatcttaacagtccattggttagaccagagcttagtcccaagtctttagtagtttctagctccgtcactatgtgcaggagcatgnnccgacagggaccngggggggggggcgggtccgacgcacggacggtcccatctccaaacccctcctgcacatagcagtgatgatagtcgtaacgctcatcgccactaggtgcctgttcggcgaggtccggtcgaagatgctcggcgaggtcccgacgctcctccgcgagctcaatgacagcatgcgtctcatcaccatcgtgttcccgtacctcccgatcccggcgcaccgccggcgagacagtgcgcgcgccaggctcggcgagatcttcgtcgagatcgtgaggtcccgcaggagcagccccggcggtggcggagccggccacgacgacatgctgcagtgcctcatcgacgccaggtacaaggacggccgcgccacgacggagggcaggcggaggtcgccgggatgctcgtatcggcgctcttcgcggggcagtacacgagctccagcaccagcacgtggaccggcgcgcgcgcctcctcacccaccccgagcacctccgcgccgccgtgcgggagcaggaggagctcgtactcgtgcggcaccggcacggcggcgacgtcgtcgaccacgatgccctgcagcggatgggccacctccaccgctgcgtcaaggagaccctgcgtctccacccgccgtcgctgatgctgctccgccacgcgcgccggagcttcgtcgtgagggccagggggagcggcgatgccgagtacgaggtcccagcagggcacacggtggcgagcccgatggtgatccacaacgcgctgccacacgtgtatgaggacgccgggtcgttcgacccgggcaggttcggccccgcgagggaagagtacagggcgtacgccgccgaccacgcgtacacggtatttggcggcggccggcacgcctgcgtcggcgaggcgttatcaaggtgatctggagccatctgctgaggaacttcgagttggagctcatgttgccgttcccggagacggactggaacgacgtcatgccagggcccaagggaaaggtgatggtactccctccgtcacataataagataataagcgtaatcgtgggttttagtgtccaactttgatcattcgtcttatttaaaatatttttataattaacatttttattgttattagatgattaaatatgaatagtactttgtgcgtgacttaacttttaaaatttttataaatttttcaaataagacggatggtcaaacgttaggcacggaaacttatagctgcacttataatgggacggacggagagtaagctacaagagaaggaagttgcagacaaaagaacgaacatttcatagaagctactacaccttatcattcaaaacatttgatataattgcctgtgcttgcctaagtgttcaaatcgttgggatatatagttaacccttcccttaggatgtcccgaacaaacaaatgctcgttcggtaatgaatatgccgagttagagagtacgataactacaaatggcacacaggtggaatcaactggttaaacatctcaatttccaaatgcctctagttcttgagttgagtgtttccagtaagcaaatctgctgtcaaaaagtgacaatgggtagtcaggtcaacacaattgtacatgcctgtagcaccaacactgcagccctgttgaaaagaatatatatctacaatgccaccattttatccccccaactaatttttgggcaaaattcaacaatatactactagccatattgtcgcccattaaactcatgaatttcttctgtatatgtattctaacccaaaatgaagctcttcgtcagaacttcaacccgctacaaactataaaacatcaaggcaatgaagacagtaacggttaaggattctctcaacaagagagttgggttcaggaaccagcgaagaagtaatgctgttccagaggtggaaagtagtagagtcatttacaatcctagaaaacagagcatcatgttgggctctttcatccgtgctatctgcttctgagaagtacctgcagtacatggatatcataatgagagtgcatattgcaaatttgtagccacacatctaaagagtcaacaattacttgaacaacaaaaatatgtgaaaggttgacttttaagttacttgaacaacaaatatatgtaataggttgagttttaagagggctggggtgcatctggtttatctctagtactgtaaaagcggtgtagttgtcctccccaacaatcgcacctcccccacataaaaaaaaccaccccacccaaaaaactagtgttcccatgcgaaaattgacccatcagaaaaaccggatacaaaaaaccgaacccggtaaaaccattcagccatcttcctgagttccttcagatcaatggcatgacactaataggttgaacttggctagtgaatagagttcagtttttcttttaaaaatgctcatgcgctacgtcaacaatgtcgcaaaaggagcagagcatccagtgcagccactacggcttgatgtgggaagggagagcttgacccaccaacacaagcttcaaggctgcctgtgttgacctatgtacacaggaaatcaagttgcagttcattaaattgaattgacaatttgaacattctatgactattacagtttaattttggttagttcaaatcaatggttacattcaactcagttcaaggactgttgtaatgcaggtgaacgatcatagctctaggtaacactaactggcaaccagaacaagtgtcaaagcaaaacttccctggaattgagaggcactataatctggtgagaggtggctgtaatagaggtgtttgatggccacctcatagagtttggaaatggttgaagggggaaaaacagcatgttacaggcaagagctaatagcaatgacaagaggattagaaacaggtccaggtttggtttgtgcatctctcagtaaaactagttaacatgtgatagcatggtgacaaagtgcaaggggcttgcactgaatatcactgcaacaatgacaagctcgtgagccttgacctcccctctctgtgtctgcctcatagtgattttcttttagttatcttaaaatgaaacattgcagtcggaagagttcaccttgcggcttgggaagttgagatggaactttgatgtaccaacaaacaatcttaaaatttaatactgaatatcaatttcaaatagttaaattgaagcaaacaaattcagcataccttgtaatatctgttgagcttatgggataaaatgcaacagaaggttcaaactttatgtcaagatgcccactgttgtcatctgctttgtcggacatatttctgattactcttgtcataagttcagcaccattccactgcaagagttcatcatcatatgttgaatgaaattccttcaggcactccgctaagaaagggctgcaattaacataagttaggtgaaaaatacatgattgctatgattagttatgcataagcatatatatacgcctgcaaagttataatcaacaaaaagaaaccaagatgagatataaaccttgtgtacttgagacctagttatttatacccattatattttgtgatacttctagaatactgttcatgatccatatactaattcatagtacaactgtaacaaaagaaacaaaccaaaataatagcagcaacatgtttttttcccttttttttcctaaaattaaataaaacactaaaagatagtaatggactttatctgtctgttgg

SEQ ID NO: 9360 - DNA, 9280 bp, Oryza sativa
ccccctaagtcactgagcatgcatgggcaggtgactgaattttagtactagtagatgaatggagtacgtcctaaaataagcgaaatactagtactcgcatgttttctgatgggtactccttggaaatgctgggacctttgacctgcttcctacttgtgtcgtcctcgagcccgcccaagattgcacttgtccacgccgtgcatcgagccagcaacccgagtgatcgaccagtcaaggacgcatcacacatggcgtgtctctctgccttgcggaagcaacaagtgtcagtaggagaaccttgctctgatcatcatcctggaaaaaaataaagcttagctaaacataattaggagatgattcaaaactaagattttcgaacacaaaaaattgataatactcttacttccatacagttgcaagagatggaaaaatttcggcgttggcacttggctttaaagcgttctttgaagcgttgaataaaagctttggaaccacacgtccgacgcacgcccgagccgggggcagtatgggaaggcggaaaccgcaccgagccgcttctcgcgagaggagaacgccacgcgcgccccgtcacggtggaaatgcccgttctacccctgctcctcgtgtgtgtactagcgcccccccgggccccgtctctcgtcacgctgcagacaaggacctactagtcgcgcgtaggccgtgtgacggcgtgacaccaccactgaccaccccctcctctcctcccagttcgtctcctccactcctcctgcatcacctccactcgtcggcggcggcggcggcggcgcggcgcagtgcggtgcctgcgttggaggagagggcgggccgccgagaggtcggcaatggcggccggtgggttggcgtgaggcaggtgggatcggtggtggtggggagggaggagaggtgggaggtgcgggcatggagcgcgggccggcgatggctccggcggcggggacggggtcggggccggggacggtggtggtggggtcggcagcggcgctggcggcgcaggaggagatgcggtggcggcagctggacagcggcgtcagcgcggtgtcgttcgggttcgtggccaccgccatcctcgtctccatgttcctcgccatggccatcctcgagcacttcctccgctccccggcccaccgcggccacgctgggatggggccgccgcccccgcacccgccgccgccgggagggatcctctctcgcctccgcctactcctccaccgccgcggcgccggcgaggccgccttccctggcggctcggatctcgaggcggccaggaagctcgacggcggcgcgtcccccgaggtatggccgcaccggcgcactgctcccgcacgctctcccccccttcccatccatcgctttaatgattccgtcatctcgcccttttcgcagctttcgcttttcgcatcgcatcgtattgccttttcacgcattgtgtctgctcatttgatgacccggttgcgaaacttgtcccgccaccttccttccacatcttccactctctcactaggaagaagcagaagcagggagtgagaagtcaaaccctgacatttttagatttcttgacttgaatatcggttgtgaattcgtagtctctaaactcttttgacgattaggatgatcttgaaagatttgacgattcctcacatataaaagcgaggtgcagcatttgagagcttaagttagatctttccaattccgttcataggtgtacggtcattctgaagaaataggtgttgcagcattgttccaagacaactcattaattagtttggacggcgtgtctgatcacaacaagccatatccatatgtcatgtacgatgagcccgaccagctgcatatgggattcgtcccaatgttactgtagtacattagtatcgatttgtcatctaagatcctgtctggaagcttgggatttggatcctaatccttaggattgcttccaggcgggtctgaagtgttttgctgctttcaataggctatgttggtttgttgtgttgtgaaaagaacgggttaaaagcgttattgttcaagagaggctagattatcaatatcatgcgtaatggacctgagaggggaatatgggagacagcagcaagcagacaagggcccatccctgtctgcagccaccccaaggtctgaatcatcctctggcttgcaatgttagctgtccacagccagaggtctcattcattgctgtttgagaattattagcatttgtggaacatcttgttaagatagatcagcagcagaatttgattgagttataatggtccacatcatagggatcaaaagcactcagtaacttcaattagatgtgaaatgtgcattgtatacttcatataattttgtagacttgtagtgattgctttccttctcttagggacgttaaactttgttgttcaactgctggcatcaactttgctagtttgaagttcattccttgcttgtgcagaatccacacttatgaattccttgctggtgcagaatccacacttatgaactagtactagtgattaggactatgctctattctgtatgctaagttacttcattgtgttgtctacattgagctgatctttttcctatcataggaaactataataatggcttccttctggcatatgcttctgtttttggtagtctagtggtagaaagagcaataggtataatgaaattggtgcactcatagttggcaatcactcccctgaagtggattgccctgctgcatgttgttttctactctattcacaattttttttgtttcctgcttattaagatgctagtgcaaatttgaaatgtttaaatttggactgtgttagaagagggctggcttgtattgtagtgatagaacactagactgaattgcaaaagtccatggtttcgaatccccatacttattcaaaatatagatgtgtattactccctccatttttaatagataacgtcgttcacttttgatcattcaccttagtcaaaaaatttgtatgtgtcatttattttgttgtgacttgttttatcattaggtaaactttaagcatgattcatattttttgtgtatttatatttaataagacgaatggccaaacattatgccaaaagtcaatatcgtcatttattacaaaatggaggtagtacttcctgtgtgctctgttataacaaaggattgccatggaagagataaggtttactatacaattgaatgggcatcaccaatgttaaaaattcactattgccatttaatctgttagcctaccaataaatcattcttgtcactgtattattaaaaaaattacccgagcaactgttacccaatctattccacaaaaagattacctgatctagctgtttagtgtaactgcagtaggagccaccacatacttgaaggatcacctgctaaaaatcatctctctcactacggtgtgaagctagtggaggaaataggaatactgacaatcttttaccattgatttttatttgtgtgcatgcatatgtggtgggtttttttgggtgcggggtgggaggggtaaaaaccagccacttaccactggactactttaattatgcatctgtttcgccttaagtggaaagtatgtggtcatgtgatcgagatttttgatcggttagatctttggggggtgtactagaaaacttgcttactaacccggtcgagaaatatttagatcagcttcatagttgtggatcacaacaaggcttcactagcaacgttccctgttaaatgacatcatgcagctattaaatattctttttcttgatgccaaatctttcacgatagctttaaacatggacaactgattcaagctttcatacaaactagaattctttttagcagcttctgtagtgtggctccaaaattcactcagaactgtgacatggaaatattttataggaaaatgtaggctcccatcggatggcctattcagccaaagaaaaagccaaaatttgaattttcaaacttaattttgacattgattttgaaatattttcaacgtagtttctttttcagcgttggcttttaagtcaccgagaacacatatataaaagttttacctacaaattcatttttattctttaataagccgttttggcttattatgttggcttattacgttttggcttataagatttataaggctattatgttctttagtggtgtatgcttgtggtacttacactgcagactacttcctccgtttcacaatgtaagactttctagcattgctcacattcacttagatgttaatgaatctagacactagattcattaacatctatatgtatgtgggcaatgctagaaagtcttacattatgaaacggagggagtacttactatacagattaaaactctctgcactttgttttttagatttaactatagtgaatctttcacccaattaaaaaatagttgcatgatagaaccgtcatctgctaggcctggcatcttgggagttgggagtccctgcactgatcattccaaagttacggactactaaaacccatctgtgtaactataggagttcctgcattcataggagccatctgtggaacttcttccagcttaaagatctccagtgtagccctggaggtttttctttacctttatagggaatatgcagaaagctttgcatgtcattcccattagatagaaaagagagtttacagcactaaacagtaagcaactgaggactaaagagactcaacagcggcacacagccctgaaaatcaagtttaaatcctgcaaacggatctgaaactttgatgaccctatgtcactccaatccctgagttcttagatggtctgaaaatgaaaagtttttcttcatgtgcatcagttttgctgttgggttttggtaatttcaacttgactggttcctggggaagttccggtatggaatacatgtttgttactcgtttctattactagtatataaaaatgtaaatcgattccattaccaatgctctgtattttgaagttccattaccagtttgtgcatacattgatcatgaaagtgggacatcctcattgactactttgctcacgtgtttcgcagatacctgtttacgccaaaggtgtctcagttttaatgccaggacacgatgtaccaacattcatcgctcatcctgccccagcaccctgccctccagaaagggtccagtggccctcacaccagcccactccttttgctggttcctcatcaaatccgagctagtagcattcaaatgctaaatgccatctgcatcacagcgatccgcaaagtaattcttctgttcttctctggctgtatttcctgcctctccagcagaattcaggcaggttctctccacatatgtacaggtcttgtatctttgttctaaagcaagttctgctgcccctgccgtattgtggcgggcgagcagccggcggatcgatggagttggctaccgatcccacttgctctgctagtgttagatgcctttgttttcgctgtcgatcctacacctttctttgctagatccccaatggagggaaggatggactatacacatcttgtagaaactctgtcggggaatgtgaagctagctgttaaagccattcttgttctgcctggttgttcccatgtgcctgcctcttcctgcttgccagtgacctttgatgctgagaaaaaaaacaggctaatcaaagcatttattttccaaaattttttttccaaaaaacatcacatcgaatttttagacatatgtatagagcattaaatatagataaaaagaaaaactaattacacagtttgcatggaaatcacgagatgaatcttttgagtctaattagtccatgattacccatgagtgctacagtaacccacgtgtgctaatgatagattaattatgcttaataaatttgtctcgcggtttccatacgagttatgaaattagttttttcattcatgtcggaaaaccatttccaacatccagttaaacatccaatgtgacacctacaaaattcttcttttcgcgaactaaacacacccgcttttctcctgaagaattcgcttggatggcctcgtttctccctttcggcaagacggcgattgtagtaacttatctgaaaccggtcaagatcgcgatgtggaccgcacaggctgcagcagtgcaatgcaactgatgaaaagccgttaagcttgccttgtcaggcagtcgccgtccggtggacggtgacagctagccttggtggcaacccggtgtcctcgcgcgcagacaacaaagcggcgctgtcacgatggtgagatggccaccaccaccaccaccacgacacccccccatgcatgcaacgcaaaatccactcgagaaaacttgtgcgattcatccgatgatgagttttttttctcctttttgtggtggctacggcgtcaacatcatgctgagccggcggcgtgtgtgtcattagctgccggatcagcggcggaatctggacgccggcggcgacggcgacaggaggaatccggcagctgttccgttcccaacctgtccgttctcgtgggcctctctctctttgctgcgtttcatgtgccctcatttactcggctcgtattgcacacgtacgctcttgtcgatcaggcgtttcatactttcatttgccttgcttttggacagttaatttattattagtaccactagtagatcaacttggatgatttcttttgctggtgtaccaccaagatgttcagttagtaacagtaccaaattaggcattcatgcacgtgaggacatcgtcgttgtcgatttattttatcagtttcgacatgcgttgctgaggctcagctcgaggtagattggtggcgacactggctgacacggcggcagctacaacggctacttaggcccctatttagtgctcctactaattgtttactcctttcaaaaggggcaccacgttacagtagccgttatcggttagtgctgttgattacttgattagtcaattagtgttgcgtttaacagttgcttaatggaataatggttggtgctcagtgtccagtgtgccgccagaaactgagaaaagcttcggcctttaggctctgttcgttctgaggagataataggggagattgattctcgttttccgcgtgcacgctttttaaactactaaacggtacgttttttgcaaaaaatttctataggaaagttgctttaaaaaatcataataatccatttttgaaatttaaaatagttaatactcaattaatcatgagttaatggctcacctcgttttacgtatctccccaatctcctcgatccccttctcctcgaacacacccttagtcatggaaacgggaggattgtgtgagccttcagcttgctggcatgccaatctcctgcaatgcaagtaggagaaaaaatggataataaattgcgtattgtccttctgttagtgtacaagtacagattactgaggcgacacgaggcagcgtatctgatgcgatgcctattgtagacgcagaaattttgggctctagatcctgggatgacatgatcggaatcataactctaggactaccaaagttcacccctttttttcatgattttatccatacgatgggctaaaaggatgggacaaattctacagcaaaaggcattccttggattccgccgtgaaacaggaataggagggatggagcagtcttgtaccagacgactcctcaacatcattttagtctccaatccatggtcatcagcgtcccaaaaatcaaagggttcatcattcttatacccatggtggtatctcagtaaattgagatgcttctttttttacacagattctatcatgataaatcgcaattcttgtcatttaaagcccaatcacaaaacagatctacagagtaattatgcaaagcgcatagtagtaacaaaaccaaattcaccaattctaaatttatctgtgactatgtctttttttgagggggagtggacatgcctttgcaaggcgcactcatgtttcattgtttcacatggacaaggttgtaaggttaaagggtgtaaaagaaaaagaaaaacaaagctatctgtaaccacgtctttagcaaaagccatggatgtatagtcacactttcattgcctcattcttgttagacagttattttataagttgttagactgtttgtaccatgaacttcacacagatcctaaatctaggcccccctttataacatgagagttcacttgtttttttttttttggaaatcaaataaaccactcaaaaaatgaaaaaaaacatgtgaaatttcttctctgtttttaaaaagaaaatcagagagctacgaagtgaccataacttgttaattccttttggtagaatctactcacttaggttcaagatctaaacttaacatgcgtgattatatatacgtctaattattttttcatcgatagacgatgtatctatcgacacgatatccatggtgactttgtaaatcaaagtgtatattcgcaaacgtcgacaacgagacgttcatagtcacttcgtcaatctcatagagtgtagtgttacgagtgcttacatagattatttttctttcgtttagagcaagtttaatagtatagcccactattggctccaattcgtctatagccgatctaatagccatttcatataatagttgcttactattctattaatatatggtcccacttgtcatacacatattacgtcttggagtccgtgctgcagctggctacagatctgtagcccactacttttttctctcatcttttatctcattaaaatatgtttacagctggctaatagtctgctactgtacctgctcttataccgtattaaaaaaaaaatcagagagctactactatcacaatcttttttgaaaaaaaaaatggtgctgtcacaatcattgctcattcttagcgctggctaagcaggtttaaaagcggctgctttgctgcacttgtctttttccccttccaccccatctccgcctacgcgcacacaagcgtaacagacgctctctcacactctcctcctcactcgccgctcgcttatctccccaatccaatcccctgccgcgcgacggctctgcgagattgcaaggctagtgtagatctgtctctttcctccctcccctttctcccgtcgtctccgttgttctccaccgagcagagcagcaaaatccttagcggccaaggcttccgggctcggtgagaagttttaaacgcattattacgaggggggggggggggggggggg

SEQ ID NO: 9361 - DNA, 47025 bp, Oryza sativa
ccaagaagagctgcagcaactcaacaggtatgtacatctgacatttattgctcttttttatttcctatgtaaaccaacaaacttgcagataatttcgttacaattttttgctgcagctgggtgaaagagagcaggttggatcagctgcattcgcacggcagaagttggactacttctatttctctgctgctgctaccattttcactcctgaactgtcagatgttcgcattttgtgggccaaaaatggcgtgctgacaacggtcgtcgacgacttcttcgacgttggaggatcaaaagaagaactggaaaacctcgtcgcattagttgagaagtaaaactaatccttaaaacaaattaatgtcttaaccaattctagttcctcaggctaacaaaaatttcagccctgataacgcttgtgatattcatatctaggtgggacaagaatgacaaaactgagtactactctgaacaagtagagattgtgttctctgcaatttatacttcaactaaccagcttggatcaatggcctctgtagtacaaggccgtgatgtcaccaaacaccttgtagaaatagtaagcatcatctctgacatactttggaattattttttttcagaagtgagaactgacaagctaaatatagtggcctctgttaatctgtgtatagtggcaagaattgctgaggtctatgatgacagaggtagagtggaggcagagccggtatgtgccaacagcagaggaatacatggaaaatgcagttgtgacatttgcactgggacccgttgtgctcccagcattgtatcttgttggaccaaagatccctgattctgtcataagaagccaagaatgcagcgagttgttccggctaatgagcaaatgtggccgtctcctgaatgatgtccaatcctacgaggtacagactacagaactactagctgttctgtcgagtttctaagccactgccaaattttaaattttaaattttaactttgtagtttattttaaaggtttttctccgaagcttgttttttcagcattgatttttaaacaatgaaaacagtgtctttctgaagagttgtgcactttctgaagtttgtactagaacttctgaacttgtgcgtcaattcgatctttctgaattctgaagttcccacgatgaatttgagtgtttcacactgtctcatgctgcagagagagggcagccagggcaagctgaacagcgtctctctgcttgccctccacagtggaggctctgtctccatggaagaggctgtgaagcagattcagagacccatcgagaaatgcaggagagagttgctgaagctggtcgtcagcagaggaggcgccgttccaaggccatgcagggagctgttctggagcatgtgcaaggtctgccacttcttctactccggcggcgacgggttcagctcgccgacggcgaaggccggcgcgttggacgcggtgatccacgagccgctgaatctgtcttgttctgtgtgactaactaacgacagaggctggaaatgcagtcaaacttctgtaatcctaaaaggaaagaattgatcttgacatcaaagataatgtcaagttagcatatattatgtagagattcgttgtgttggcgtgaatatcaagttagcatattatgtctcaaataattgggcaaagagagcttgaaaaagctaaagaggaaaaaggcgagagaggagtgactagtgctagtataatactccacatgtgaaggaatcacctttttgcacaagtattagtcgtgtaataatgatcaaaatcatgctaaacagctagttacaaaatctgcagtgctatgtggcctagaggcaaatggaatgactgcccaacaaacttgcaaagaatgtttgcacatcgatctgcatgcacatgcaatgcagcctgttctgctgcatctctgcagtgcaactccttcatagtaggtcgaattggcacttttcatagcctgcagagttcatcaaaaacagcataagagagagaaaatgacttcttagttgcaacaaaaactcagcaagtaggtagtttcaaaaactgaaatttagccaggacagtggacagagcatctgaatgcagagcacctgattcagtgcaatatgttcagtggcaagtgtccttttcttctctgttctagctagcagattgcactaactaaagcagtaaacactataaagtactatacaaaagatttaataaaaaaacattttgtttttgcaaaaaaaaatcatcaacacataacattcctaaataacacaaatccaactacatcaatttcccgtcataaaaaaatataccctaatattttgggttgtgaagaaagaatacgttgagaaggagatggtaataataaatgttattagtccccaaaaatctcttttttttcgttttgcaaaaagattcatcagcccatactactcctttcatcccaaaatatacaacatagtatcggataaagtattagaatatatttcatcttatactagattcctatatgtttcgtggaatgcgatgagaagaagaaaaatgaggaagagagggtaaatccccaaaaatcttttttattttttttgcaaaaataatcatcagcacgtactactcacttcatcccaaaatatgcagcgtagtgttggatggagtaaaatatgttttatcttattctaatcctagattgttatattttgggccgagaagaaggagaaggagaaggagaaggagagggtaaataataaaaaaatggtgttgttattatttacttgggtcacgggtgacgatggtggcggtgccgccgaagtcgcaggtgccaccggcggccttggtcatctgccagtagctgttgaaggcgtaggaggcgtgggcgagcacggtgtcgggcgtgtagcacgccccgctcggctggatcgacccgcactccgcccccgacccgcacgcgtagtccatcgcctcctgcattatcgggtccggcaccgtcggcttcgccacgcaccacagcgcctcccccgcccccggcgccgccggcggcgccagcggcggcgggtacactatcggcggcaagaaccctccccctcctcccccgccgccgctgttcccgcctcctccgctgctcccgcctccaccattgctcccgcctccaccgctactgccgccaccgccaccaccctcgccgccactgccgccgccgccaggcccaccacctacaccaccaccgccaccgccctcgcctccactgccgccacctacaccgccgccgccctcgccgccgctgccgccacctaaaccgccgccgccgggtccggtctcgggagggctgggcacgacgaagatcgggctcggtggggcagacccaggcgtgctcggggtgaagccaggcgtggacgacgcaggcgggctcggctcgaacgacggtggcgtgaagccgccgatggggggcagcggcgggggctggtcgtccggggcgaacggcgtcgaggcgaagggaggtgtcggcgtcggtgtcgttgtcggggtggaggacgacgggggcgcgttcggagggttgacgcagtacggcgagctcgagccgtcgccggtggcgtcggcgaggctcgccgcgtcgccgtccggcttcgccggagaaggagacgaagaaggcagctgcatcggctccaccgtcctgatgaagttgagcttgtacagcgcgttcagcagcgtgttcctcctgcttcgcctcatcagagctctcgcctctgctccatcaacaacaacaacaaccacacaatcaaatgcacatcaaaaaccaaactaatcactgacattacaacctagctatgaacctaccacactgatatgatccggacagtagcaagaacaccatcatcaaccacactgctactctcccatctctgttcttgcgagccatgtctagctagctgcagctgcactggggccagtagccactgatgcaggaggaggaggaggaagaggaggttgttatagcagaggccgcgacgacgacgacgaagggaaagaacaacaacaagtgtggattggccatgatctcaaaggcacaggggggggggggggggggcgggagaaaaggtcggcggcagcagcagaaagaggaaaaggtgagctcgatcagtgaagtggcagtggagtggagtggaggtgatgatcttgttcttctctcgcgcggccgatcgatcgatcccccttcgctttgtgcagaaaacgtcgtcgcgcggtttctagtagcttttcagtaccagtactagtgattatctccatcactctctcacttcacttggagagattaattagttggagtgtgtgctgtgctatcagtgtgtctttctttgtgtttctttttggtttggacgttttgcctttaatttcttgttgtttaattttggtatctatgctttcttgccactagagcaaaactgagagagagatagagggatatagatgggagaatgtgtggacgacgacgtgtttgtactttggttagcttctgggttagtagcttgctttaagctcaaggaaagcatgcatgaacaacagatcgatgcagtggtgtggcgacgatcgatgctgtgtcgtgttgtagcatctgcatgctgagatggaaggtcgattaggataacatgagatgcgagctaattaagctagcttagctctgtgaaaagttggtgatggcaacgtgtgtgatcgatcatgccaggggtcagggtggttttcttgtttactgattggcttatcagagacgtagggttcatctgagcttaggttgaccaatgttttggatggatggcttggccacctttgccttttcgtttgtgcattttaatgagacacttgccgtggggtttcaggcttgatcagtattccaatcccctacagtctacagacgctttctgagttttttttttttgagggttgggggggggggatgataagcttaggcattcgtgatcatcctgtgtctgctggttaatttgtcaatagcaattgtaaatcaatcacctgttaaaggcgtacagtttgattaagatgtacctaataggctactgaggaggaaagatcaaccgctgtcagaactacaagcatgtccttacataaaaaaaactccagtttgattaagatgtacctagtagcaaaataaattcttttttgctactagctgctatattatcgcaaacacgtttctcaaggtgtgtgttttttttaaaaaaatagtttgcacacacaagtttttttaagaaaaatcaaacaaatttattttttaagtttataatagttaaaaattaattaattgtgatataattgagcattttgtcgggtagggaaacaagaaacgttctccatgggctgtcgccggagtcccgcttcagtgcaaaaggccgtgcagaacgccgcctgcggcctgctgtgacaacccacaccggccgcgtctacttgggccggcgccatcgccatgcgtccgtacaaaacggccgcggatttcgctcgggacgccactaaatcggcccaaaggccgttgattatgctcgggaccccggtaatccacggcccgtgtgggtcgcgtttcaccgaccggtttttgtgtgcgcgcttgctttgcagtgcagtggctgctgttacatcagcgagcggagataactgaactgaacagtaattgcactgcacggaggctgcctgcctgtctggctactgtagacggaaaaaaatatgtagccaaaatttttactcatgagtaatagacttgctagtaaaaattttactcgtgataatatgaacaaatttcagacgtctatttcttaacccaacgttttcaaatttcgaatacatacgtagttttgaccgtatattttgctaggggcatctcgatcgagtggccatccgtcgcatcgggactactactactactagaaaacagatttttacaaatgaccaaaacagatttttctttttttcagacgcccatccatcacgcctgcactttttgttccgatccatcgccggtcttcgctgactaattaacttacgcgctagctatcacaccttaattggtacaggcatatgttaattaatatgcacgctacacgtacaccacgtacagacaacagccgttcgatactttggataagaccatatcgtttcatgcatgaacagtgtccatgtacgtatggctgcttggtgcctgggcaatgcactggcggagttagccatgggacatgggtacgtaagtagagtgggctgaccccatagcttaattttatacattcaccttagaggtctttaaaatttctatatgaatctattcagattcaccttagaagtctttagtgtactaaaatataaagtaagaataatccaccttatgccaagttagttggtatttaacttctgagaatatagaggaactaggtttgtcagcttctagagtttctagtttatttcttaaaatcaaattcaaaatctgaattgctcggggaagatgaagtttttgggagaaactacagctgtacaagatctaatatataggaggcggcagccacaggaggcatacgttacgttgcatgtctcgatcgatcggccggtttaattcgtcagcgaccaaacattcttggcgacgatattatggactattgggccataaagcgcatacgcatgcacgtcgtttccttgctagccaggaggatgaaagccgcaagcgcgcgtaccagtttatcatgcatggactgatcgcttgcaacttgatcaacggatgaccgtttggtatatctatctaatcatcaatagcatattatttgtatgtagaagttatatatgtcgcatatgcatgcatttcatgtcatgtatcttcgttttttaatatatgatagtaccgttgactttttaatcaatatttaaccattcattttatttaaaattttaaataagacgaatgaccaaattaacgtataaaaagataatagcgtcatatattaaaaaataggggagtaattattgaaaagattagcataaatatgtaaaattataataaaattatatgttaagattatagtttatttgataataaaacaagtcacaataaaataaataatatttatatatttttttaataagatgaatgatcaaaacatcatgtgatgtcaaaagttgacagcatcacacattaaaaaataatagaggtagtgtagtactccctctgtcccataatagaagggatattatggattttgtagggatgtaacacatatcctagtactatgaatttggataaagagtctatcaaaattcatagcactagaatatgtcacgttccttcaaaatctcttatacttcgggacggacggagtattagttttgctccagcgtttgccgctgctcacagccaaacacactcgtgcgatcaggtaaaaggaagaaaagagctttgctctttttgactataagactcaagggaacctgttttttacccctcgaggggatgttccctcgttatttgcatgtcactcaaatgattataaaaaaatttaaaaattctgagaagatgtattaacatgcatgtgatatatcactccacaaacatgcaagttcaatgcgatatggagctggtgctgtggtgcatatactcacatgcatgggcggtgtaagtgtaacgctccgcttctcgtgagacgttaaaaaactattttggcaaaatcctattcgcgaaaattttcgttctttgtgtgtgagtctaagttgtgccaaggatctcaattcaatcccattgttccctctcatcgaaatcaaaatcctctgcctcaaatttcctcttccaattcaagtctccaaaatctaattccgaaagtcaatcccttcctttgaatcctcgccaaatacatttccgaatcccaaaatatccaaactcccgttttgtttccttccttgactccttgaacccttgtgtacaaagtatcaaatttagattcaaaacccaaactccaaatctctccaaatcaaaatctttcagcaaaagtctattttgcctcccttgtcgatgggctgattcctctctctcacggcccatcccctcctctcggcccagctctctcgagcgtgcgtcgcacgtgttcgggagcgagagacagcgccgtctcctttctctctctctcggcgtcgcttcccgccgacgccgccccaaaattccggccgcgtcaccgtttcccgcgtgctcgcgcatggtcgaccggcaaggacgccgctcccaccgccttcgcccttcccgcgcgggttcgcgtgtggccaacgccccggtcgccgctgcgacaaaccctggcgccgccagcgtcgtgccctgccgcgctgccgctccgccgctccacgccgctagcttccaaggccgagagaggcagcccctgtctcactcccctctccctcctccttttcccgtttcggcaagggtcaaaccctcctttccctcttcctttcccctttttcccgaccaccgccgatgtcatccatggtcctagccgctcgctccggttcgccgccgctcgccggaacgcctcgcgcgtcgtcggccgtccgatcccgggcgcctcctcctcctcctcctcctcccctttcgcccctgcccacatggccgaccacgtggcagccacctcagccccgggcccgcttgaccgggtcaagtcgcgcccagtcagcatcctccctccgtcttccctcccgtgcacgcggtccacggcaagccgtgcggctgcacgtgggcccgccgccatccgtccacccggcgcgccgcgcccgaaccacgcgcacctgaaaccctagcacccgcccccgcgtgcgccctccccaccgtgaacccgaccaccgccatgtgggtcccgcgcggtggaccgcgtccacccgcgtcggcctctctctccccgcgccccctctcctgggccgcccctcccgcgcccgcgccggcccattaggtccggcccagccgcataaacccctcgggctgcacctaagccgccctaggaagtctatatggcatccctcccttctttttcaagggatttaataaaccctttttcccctattccataaatcaattccttattcccaaaattccataaatcatttccttggtcccgcacgtcagtgacggtcaataatatttttgagaatattatttctataaatttcataaatcaatttctccttgttccacaaatatcttcctttgcccagaaattccaattaaacttccaaaattcatatctctcaatccgtagctctgattgactccgttcaacttccagtatttccataaaattgagatctatttaatggcactactaattagtctaaataggatctttcttttggtcttttgtttaggttttcgattgtttgcgtatagttgcggttaccggattttcgtcgatcgcgggttttctcgaagattcgtgaagcttcgtgcagaccttgagcaaggcaagtcaccctctgaccaattgctcctataattggaaaatcattattattttgtttgcaacttgcattattagaatcacacactcaacttgcttggcctcggtatgcgtgccaaaccgacggacctacccagtagtcgcactaattcatgtaggttgtgctaccctgatttccttgtcgctccacctttgtggtacctcagtatccgtgctatctgagcgcgtataccaaatatcccacatacaccgttgtttgtcgaaaacttgggaaatgggttcgagaagccttgaaaacccgacatgtggtgtcggcgtgtttgaaaataaaatggattgtgaaaactcgcgatgcgggggttgtgcctgtgtggcactgtcccgtattcgcatataaggaccgattcctgtggaaaattcatccgagcatataacaagtgcgaccacacgggtgcaatgggacgcccctggctgagtaattagctaatcgggggagccatgatgccaagagacatgtagattcaacggggtggtgttggggagaaccctcgggcttcctggcacagtatggtctgggacctaatctggtgttagtctgggacccctctcgttggcatatggtgaacctgtgtcggctttcgaaatgccttgtcatgaaagccttaaggtctcccgacgtggctgatctcacgggctgggtgatccgggttagtaatgtcgtgtgggtaaagtgtaccccctctgcagaggttaactaattgttcgaacagccgtgcccgcggtcatgggcggatgtgaggtgtttcctgtagcgtagatttgttttcctgtgctttgtgaaaagttgttgtggtgtgggaatcgttaccagaatcagcctatgtggcagatggatgacctgagtggtcaagaaacgaatctgtgtgattcgggatgtctacgggcatcatagaataggcttcccgagtggaagcggattgttgtgctgctgggcagctggactctgggagtccgagaaaatgaaaaaggctctgggagccgattaatcaagtggaatggctctgggagccgagaagtaatgatctgacccgggaggtcggtacattaccaattgagctgttgaaaaacatctcttaaagtcgaatcgagacgcaagtctcttttcggcccaaacttagaaagaaataaatcacttagtgatttcaaaatgatttcaaaacaaaagatttgcaaaaacaaccttgccgctcttccaagcttgcattaaacacctaagttcccgtgacttgctgagtacgaaagtactcatccttgctctatataaatatatataaatatatatatatatatatatatatatatatatatatatatatatagttcctccgccctgaagctgaagtgaagtgaagattagggtttcgtcctggttcccagctgtcgcctatggtgatgggtgttagttcgttggttccgctgctgctgctgctggtgtttcttcgtccgtgtcgtcggttgcattctcaggctgttctgagctgcaacctaagttaaggtaaataagtcctctatttattataaggattgcaatgattcatatttgtcaccgtgggtaccagcgctatgtcctaggactggtactgagatcgcggtttcgtaggaagcggttcgcgccgtttttcctacgacacactcctgtcaggtgccgttgtacggcggtgccagattggggtgtgacagtaagtgggtcagccgcgaacccacttataggtcaaaataaataggttcgctgcttattttaacctataagtgggtttcgcgggctagccacttacacccctacgaatggccgccgagatgagactttttggttgaatttcagcagcaacgccgactcgatcgatgccagccacaatctatcttcgccacggcgatcgacgtgacacgccaagctctagctagctccatcagtgacggcctctcgccaccatcgatcgatcggtggcctataaatccacacccccacctcgtctccttcccagctcgcatcagctagccaagcccaaagacatcaagagagctctcgatctctcgccatggccgccgccaagaacggccgcattgccctcctcctcgccgcgctcgccctgtccgctcagctcgcgccggccgccgcgacgtggtgcggctccaactgcccgacgacgaagccgcctccgccaccgtgccagccgccaccgccgacgccgacgcccgcgaccccaacgacgccgccgactccgtggactccgccgcctgcaacgccgacgccgccgacgccgactccgtggactccgacgcctgcgacgccgccgccaacgccggcgacgcccgcgactccgacgacgccgccgacgccggcgccggcgccgtcgacgccgacggggaagtgcccggtggacacgctgaagctgctggcgtgcgtggacgcgctgaacgggctggtgcacgcggtggtcggcgccaccgccggcgacacctgctgcccgctgctgtccggcgtcgccgacctcgacgccgcgctctgcctctgcaccgccatcaaggccaaggcgctcggcctcagcctcgtcctccccgtcgccatctccgtgctcgtcaatgactgcggcaagtacgtgccctccgacttccagtgcccatccactgatccaccgtacatataaatcatctcaaataattaatcacacacaccatctctgcatgcatgcgtgcatggatggattaattaattaattaagctattaatacctgcatgagtatagtttatcgcctggctatactatatacatgcataaattatataaaatacatatagtaacgtatgtagcatatatacatgagctctgatcgacttgtgtcatggagacatggaggcatgcatatggagccttggattgtgcattaattgatgtataataatatttgtgtgacatatatatatatatatatatatatatatatatatatatatatatatatatatatatatatatatatacatgtggagtttgtggtatttgcaggtttgttgtggtttgggagatttataatgaaataaagagtgtgtgatatgtatgctatgaaatacaaagtttgatgtgtatgtaccatgtatatgtgtatggttgacaaagcctgtcaactttcctatatataaaacgtacttaaaagaatatgtttcctatttccatgtgttttttcatccattgttcaaaaggagtgcataatattaaaaagcagatctggtttctttcaagttcaaggctacgatggaatggaagaattttacgacaatttcatgaaaattaaactaattcaagtgaatttcctgtaaacttcacgggttccagcttccaaattaaaggagcatgcactaagttgtatatgtacaaagtggatatttccttcgcaaaagaaaggtggatatttcaatcttgatcgaagggatcagactaattaacagagatactctgcaactcaattttgatagttgccacatgcagagttaataaagaaaaaaaatacaagaggccgcacaactcaaggcctgagatggtctttaacatccccattatttcgcttatgtttaagcttataatcaaattttaaattttaaaactaaattttggagttaattttgtggatttttcattcagatcatgtgtgttcagccggtcaggtaagctatgaacaatttttagcttttcttttttaaaaaaagagagagttataagtgggtttgttataatatccttgcaaaaatgaaaagtcaaaattaaatctactcaatggtaaaataacatgtagaatccacatgtgtaccacgttgactaattaagttatcatcttagctaaaaccaagagcaatattgacttgggtaccagtcaatgtatgtagtatgatagcttggcacttaccggcggagcctaggtaataaggtgtagggtcgactgattcataacttttttacattcatattgattcaccttagaagtctttaaattttctatataaatccctttgaatttatagaggaagcaatagtcgtgtagtggtggagtcgtgggtgtataatgtggaaaatctaatatgttgtattctaatgttttctaatatattggatcgaccctctcatggggtatatatatgagtacataggggatagagacttggagtacaatacaagtaagagtaaatttatctctaggattctatctataggactctatcttatctctaggattctatctctaggatatatcttatctctatatttgtatttgactcttatctctaactaacatattatacttctaacattccccctcagtcgtaacgggagcgaagctaacgattgcaactggatttaaaatcttctatttcttcatcttctttaactcaccatcatcaattgcatctctgatggacggtcctccacctggtgcctgcgtccccttctgtgtcgtcccttgactctcctctattccctcccgcagtcatagcgggagtgtcatagacgatagcgatgacacggacgctttgactagagtttccgtcaatgatttttgttgtagacgttcgtcgatgtagctgatcatgtagtagttgtagtcatggtggtcatggtagttgatgtagccgcaaatagccgaaggcgaaaaaaaatatttacgccatggtgtgaagacgaaactgtaattgttagcatcttgcaccttgtagatgtcagatgatgccattggagacgtcttgcatatgtcagaggacgccgttggcgatgaggccaccacttcggttggtccttccgcaccatgtagcggtcatcacaatggtgatgccggattgatgcagtctttgtcgtcatagatgacgtgatcgatgccgtcgtcggtgtcgcggtcgttgccgtcgtagaggacgcggtcgatgtcgtcgataaagcgtcttgcagattaatctgtcagaggacgcgagatgtccatcttcgtggacgagtcggcggcggcatgttaccatgttgatgaagaccataggagtcgatgtagtcgtacaactgatgatgagtattgtccgttgtagatccgaagacatgtgttgttgccgcggagggagtcgatctcggcggccaccggtcgccggccgccacaaattcatgcatgtgaattctcctcgggctcggtgcaccgtactgctgcttgcctgctactgatgtgtgcacgcactagatgcctctctgattcttgctgctcgatatgacgcttgaattggctatacagcttgatggacaatggttgcttccgctcaggaggatcgcttttatgtggctaatgaagaaactaatctaatctaatgctaattaatggaattggcggctgattaggcacttgcttcttcggctaatgattgaagaggctagctaatggcgttgccccagggagataccatttgaaaaatctaatatgttgtattctaatgttttctgatatattggatcgaccctctcatagggtatatataggagtacatagaggatagagacttggagtacaatacaagtaagagtagatttatctctaggattctatctctaggactctatcttatctctaagattctatctctaggatatattttatctctatatttgtatttgactcttatcgctaactaacatctaactaacatcttggcgacgatatcatggactattgggctataagcgcatacgcatgcacgtcgttcccttgctagccaggccaggggatcggatgcattgcgcgcgtaccagttcatcagtaattaatcatgcatgtactgatcgatcgcttgcaagttgactaacggatggtttggtatatccatctgtctaatcatcggaagcatattatttgtatatatgtcgcatgatgtagagctagcctaggaatacttttattagtatatttcgtaaaactatatataatttgattaaactaatacgaaactacatatatatatttaaaggtctatatattataaaattatagatttatcattaaatttatcacgaaacggtagacttaaagcatagtagcacaaaactatagatttattattataattctcaacatagctactccctttgtcccaaaatacttgttattaattctaattaaatgatgtatgatgtatggttagaagtaaaatggttgtttgagggtacaaaatttgaatgggagaagctagatggatagaaaaccaactattttgggatggaggtggtaggacttgttttcgtgtttagttccttgcactaatattcttccggaattactaaacttatatttttatggtaactagtgctagagctgaaattttgtgatattgtaccttctctatatattttcatgataattgtgatgcatgctacatatgtagatatattctattaaatatatagttttgtgatagtttagtcaaagtatctattttgttttgttgtaaaatttactctattaaggcccggcgaaaaatttactctattaagagtgcaaaggctaggatttttttatacggttattaagaaaaaaaatataaaaagcaccatggtgtggaattgatatgataataccgtactagctgtgagaatatatactccctgtgcatacgtctcctgtacggggttctccagtaaattaccaaaatttggatgttctgtagtaaaattcatcttaattaaaaaaagatgattaaaggtaagatagaaaaaattaatatgaattgatcaatgggataaatagtactttaaaaatacttatattagttataaatatttagtgtgctctagctgactactccctctatctacttttgatcggtatatttttaaatctgaaaaatttatttttgataggcatatttcaatccaaccacctatcattttaatgattttttcggatttaatgagcgactctctattcttcaacacaagattgactacatgggcatcaagaaatgtaaatattaatgaatcgtttgtttacgaggaataactagtagcatgtttaaatggatgataagtaaaattatttattcttgatctgtgtgacaagatgaaatatgactagtatcaaaagtagatgtagggagtaattagtaattaacttcttctccaatcaatcaaattaagaccggtacgtacgtacatgcattgatcggaaagtagattcccatgcattatacagtatgtgtacttgtacaggtgctcgtacatgcatgatgaactgatcatgtactacttatgccccacacgtacgtacgtacaggagaatccctcccggcaatacaaacctgcatggtccacacattttggaatgcacgactaataatatggttcttttcctattaattccgcgtgtacgcggaagacttttgcgccaatctattaaagagtacttcttcagtttttaaaaaaatcaatctagaaggagctcataagataacgaatataaaaaatgtagtacatattcattgtcttagaaggggatgcttctaggttgagtttttgtttttatggagaggaagtagaagataattaaacgtacaatattatttttaatgaggaagcacggggtcacgccacaataaaattatgggtgcacacgtcttcatatatacatgactcacctatccatcaagcaattaaattttggtgtccataaacattacacatatatacggatgtgttttcagtagctaggattttggtgaaataatcgagttaccactggcatccgtgtctctcttctcttttcaaggggcaccctagctcgcggcgtgcaaaaaaatatcgttcataactgcacgaatatgtatcgtgctatatatagtaccgttcgtaggtataaatatatctggtttaattcttcgttcgcccatgcgaataatcgcctctatttctttcacgctactatatgtacaattggtacatgacatggaaattcatggggccggggcaagctatctctatttgttccagaattccaggaattccaggtcaaatgtctcagggctgaaactatagtggtgtgtttataagtggttaattaatctactactctcttcgtttcagcttataagacgttttgagttgtcaaagtcaaactgctttaagtttagccaagtttatagaaaaaagtattaacattttcaacccaatagaaatttattatgaaaatatatttaattattgatttgatgaaactaatttagtattataaatattactatatttatctataaatttaattaaacttaaaaccatttgagtttaaccaaagtcaaaacgtcttataacctgaaacagaccgagtattatgggcctgtttggttatttacttcaacttaccaagccacaagtatggccatgccacaagtgtggcggacgatttgagcgccacacattcaacaaagaaatatgcggcagagtagttcacattcaacaaagaaatatgcggcagagtagttcactgctgttgaattttgtgcggcagcctcaggtgcggtaagcaaacaaacagtgaactaactatgtgtggtacgcctaacttgaagtgcggcaaaaggaggcaaccatccaaacaggtgtctgtacgactgatggtcaatgggctcgcatatatgcatctgagctccaaaacttggacagagctagattccaccgtatctatgttttagaaaacatgcatgcatgttaattcctgccaatttcggtacttgtttcaccggccgatcgattgctggcatgatttgtttgatcaatcatggaaaaacaacagcttaacggtgctctctctcatatacgtgttgcaaaaataaactgtcttggaaaaattaaaatggctagatctgtagtttgtagctagtattcgataactaaacgatattttaatttagataattttaccatctttaaaaaagtaataccacgaagtatcacattttttatgtaaaatttgatatctctagatgctactagataactgaggtatcaaagtttctagtgtaaaattataatgccccaccttttaccagatgttgaaaactaaattaataaaagcctatatgtgaaaatttcattctttgagtgagagtttaaatcgtgtcatggatcccgatttaaatatacccttgttccctctcctagaatcaaccatcaacacctcgaaaatccccgttccaaatcgagtccgcaaaaatcaagttcgaaatttgaccttttgaacccttgccaaaaacttctcccggtttcaaaaatatcaaattcccttccttgactgctccttgaacccttgagttcaaatatccaattttaattcaaatcaatctcccaattccctcaaatcagttcctgcaaaaagatcaagtcgtttccttctctatttgggccatctcccttcctctcctcccggcccagtccttcttctctccatcccacctggcctgtccctcccttccccctcctaccagcccatcttcgctagtgggcctcgcgctacggcccagtggcgaaagccaccaggctgctggcctgctgcaggacacgcacgcgctccgcacgtgctgcgctttacctcgctgggccgcgccgctcctccggcccagtggaccaaataccatttattcctcaatttcttttccagaaattcccgcaaatacattccctttgtatagcattgacgcattgtatatacactaaatatatgtgtatgcttactgaccattggtcaaagtctgtaaagtttgaccttttttcaatataaaaatattccttataaaaagttcgaaatcaaaataccccttataaaagtgaacggaggaaatactaaatttcacaaaactaccacatacttcaacaaaacaacaaatttaattagtcatcgtactatatctccgccccagaaaaactacagttttacattgtttgtgaccaatgtttgactgtccgtcttatttgaaaaaaaattatgaatagtattcttattgttattagatgataaaacatgaatagtattttatgtgtgactatttttttaattttttcataaatttttaaataaaacgaacaattaaaatacagaaacccataactatacttaaaattgggacggatgtagtaatttgtagtggttctagctttctaggcttagctagggcaacaggactacctagtttactttctactagcagtaaattactagagatgtatagccatacataaagatatatgtcaatgttgaaagcaacaactacagctaaagaacgtaaccgatgaatgcaacccggatcatcaatcaaaagtacttcaactcttcaagacagtaaaaaggaaaagaccaatggcctgtgtcacacgactggtacccaacaaaatcaactcaacaagacaccacatgagcagtagttttaattttcttgtggcatccaacgtagacacgctggaagcaggaaaagcacgcagggcaagaaacaaaaccctaattaagagagagatggatgatgaatgaattaagaggtagcaatgcaaggcaaggatagatagatgcaagttgagctggggatggatggatgcgtggatgtcggcacgggaaggcgccaaacaggggacgcgccttactcgccatttgcttccaaaatctccttaattttttctatcgcttgatgtgcccattccttggaggagactgagaccgtcgctctctcgtcctagctcggctcatccgtcagcgtaaacgcgcgtacttagcagaaaatatgtctacatgagactacgtagatatattttctgcttagtagcccgaccgcacgggattaaagattatcccgtgcggttggaccacccgcacatgaaagtgttgattttcgcagacacctgaatgcagacggacgggatctctgcatgaaaaaatccattttgaccgcacggaaaaatccaatctgtagtagtgtacaagttatatatgcccgtacacgaatcaaaacaaagctttatcgtagtccaaacaactgatctagctaggatccagttgtgtagatgtgtgtgcacacccctggtcacacgccacagctagctcagctctgatcgatctcctttttctgttttgttgtgttgtgtctggaggaggaagaagaagaagaagattggattgatctcagcctctagattttggtagtgaaaataaaatgtgattatattgaataattgaaaggagttgaagctcactggccacctatcctagctctagctaggcctctaaatatctggggacagtgccaatggagtaagggcccataggcatgcatatatgccatgcaatgtatgctgagtaatgatggtttcatactttcatttgccttcatgcatggcaagatcagagatgatttaacagctaacccgctgtcagtactcggtgacacgttcattagctagcaaaggtaagactgttctggattccaacaataagggcatgtacaatggttgtcaatagtggtctcttagcgttactaattaggaatacttattgacatggaagaaagagaaagagaagagacaaaacgtcgttgttatacatgacaacggcttaacaacgactcttaatcactataatatgaaaatatggttgcacgagggtaaaaaaagggaaagaatattaacaaatggaatattttttgagttaatgattagagtctttgtcgtctcaactattgtaaagacagggtctctaaataatcttgtattgtttaagagatcatactcgtctctaccattgaacgtgccctaatagtgaattattttgcatgcggaccatgctgtgtcgatcgattaactcacctaccatgcagtaatttggaggttgcatgggcaccatggaatatccgaataaatagaatagacataaattaaaggtcctctttcaaaagaaatttagtgatatcaagaatttatcattaatttctactatatctttcgacgtaaaagttacgattctttcttgggtgtgatatgcacggaaaatattttctacatctagtacttgaatagggaacctttttaagataacagaagaattttatcaatctgagtcaattatattaaaatgatacaactgcattaagaatagtctcgacctgttgactgttttaaggttaaaaaaaaaaaagctttgctcttttgactgttgactccccaatcagtcggttttgttttaaccgcgacatgcaatatgcaggggccccgcatttgctcacaggctcacatgcctgcgcgagtaatccaaagcacgagtcatccaaattaagtccaaaccgagatgacttggttgaatttcagcagcagcaaccaccgactcgatgcatgccagccacaatcctcgccaccgcgcgcgacgtgacacgccaagctctacctagctagcgtgctccatgtccatcactagctagcttcagtgacggcctctcgcctccaccaatggcctataaatccaggctcccagctcgtcttcttccctcgcacaccagctagctatagctaagccccccaagagacatcgagagcgagatcgccatggccgccgccgccgccaagaacggccgcattgccgtcgccgcgctcctcctggcggcgctggccctgtccgcgcagctcgcgccggccgcggcgtgctcctactgcccgacgccgaagccgcctccgccgccgccgccggcgccgtccggcgtcccgtgcccgccgccgccgtacacccccaccccggcgacgccgacggggaagtgcccggtgaacacgctgaagctgctggcgtgcgtggacgcgctgaacgggctggtgcacgcggtggtcggcgccaaggccagcgacacctgctgcccgctgctgtccggcgtcgccgacctcgacgccgcgctctgcctctgcaccgccatcaaggccaaggcgctcggcgtcagcctcgtcctccccgttgccatctccgtgctcgtcaacgagtgcggcaagcacgtcccctccagcttccagtgcccatcataaatcacctcaattatgtatgatcactaattaattaataatcacctactgcatctgatctctgcatgcatgcatggattaattaattaagctatcaaattacatattacctgcataattaataagtatagtttatcacctggctatgctatatacatataaatatatatagtgacatatgtagcatatatacatgagctctgacttgtgtcatggagatgtggaggcatgcatggagccttggattgtgcatttaattgatgtataataatatttgtgtaacatatattttgctgtgtcatgcatatatgcatgtggagttgtggtatttggtttgtagtggtttgggagatttattatgaaataaagagtgtgtgatatgtatgctatgaaatacaaagtttgatgtgtatgtatcatatgtatatgtgtggctgataaagcctgtcattctgtcaactttcatatatagtataaaacgtgctatgttgtgcttaaatgaatatgttttcctatttctcatgtgtttgtttcatccattcttcaaaatgcgttcataattgaaagcagctctggtttctttcaagttcaaagcctctcttatggaacgaaagaattttacagagaaatttatttttaaaaaattaaactaattcatgtgaatttcctgcaaaaactcctgcgttacagcttccgaaggagtactaagttgtatatgtacacccctccccacaaaacaagttgtatatgtacaagtggatatttcaatcttgatcggagggcatcttacattggctcatttctctggtcaaaatattgatcccttctagtccagaaaaacggaatgctttgaattttggcgcaagcagtttcctttaagggagatattactgtaaacagggccggccctgactttttggtggcccggtgcgaaaaaaaatgtaggcccccattcaccataaaaatataagataatatttaaaaactcattgtcattaacgaatttcacgctaataagcttaaaatacaatcaggcaatcacgatatgctcgatcgtcgattggttttctgtctttcctctaagcctatcaggcctgataccatagtacatatattttggaggcctctaatttttggagacctaatacggttgcaccgtccgcactgcccaggccggccctgactgtaaatcagcaattaacacagcaagatgatagattgttacacatgttctaagctcagactgtgtagtagtaagtgcaaagatctgcatgcgacatacgctgatatgcattgcactaccagagatactctctgctactcaattttgacagttgccacacggcagagctcagaaagagaatacaaggcacaaggcagcccaactcaagcatccctatcatttcacttacgcttataaccaaaatttaaattttaaaagtaaaacttgaatttatagttgattttgtggatttttatcaagatcaagcgtgttcagataagccaagaataatttttggttttctaaaaaaaaaattatagattattatgttatatatccctacaaacatacaagttcaaattaaatatactcagagaaaataacaagaaatttaggaataactttgaacggggacattgtgcaattttgtatttccatgcgtggatcaaaaagacacgatcatatataggttattcaatgttctagaaacttcttatagctgtttaaaccacatgcaagaaacaggagcatgcaagcaaagatggcgctacataacgtcaggttccacgcgaggaccacactttctagcacaagaaaatctgcgaggtgcagcacggcgcacaaacgaatacaaagaatcgagcgatgtaacaacaatccagcagaatataacaaaatgtcgatgctgaccacaaacgtcaccattcaagattctacattatatttgtttatacagcaggggttcagagtacaagattggccgggtagtatatcaccatttgagcaaaacagactgagcaaatgcaacataattttcgctgtgttaaggcactcaaaatggaacatgggggatcaattgtgttatctgcaatctggcaagcgttttccgcggacgtgttcaagcgacggcttggagagctctctcgaagttatcttctgctgatacggcacgctttactagcacatgatcggggtgtgatagtttcagctggctgcagatggaaaagaaaggttagaagtgtggtaagcatttttgggttcactaaaagtaaagcattgtgaaaatcacgggatagtttccaaacactgaagcaaagcatgaaagatgttctacggtttaacccgcacagatggtaaattccaccgaaccattctactggtaattatatgttaaaaaaaatgaattgtgaagtcatcaatcttcagtgttgatattcttctcaacagttcacatcagtttcataaactattactaactgactcgtttagtaaagttttggatgtccctaactgataggcattttatgaagaatctatacttatatatattattatatactattaaaagacattagtggtggtagtgagcctgccaccaccaccaccaccaccaccatcactgacacatgggccctgatatagtacaacacatgtcaatgctctgcttgctctttggacttgttaggctgtaggctgtagtctataggagaagaggacattgggatttgggtgattacttaatttgtaggctggagctcttaaattttctaagcatgtaatttttcttttgttctttaagatgatagatcttctttcaaccaatgaaaaaataattaatttccacaaggacttaattttgctattttcaatatccgttgcaaagcatgggtatttggctagtgaagacaaaagatacatagaggatcctaacatgatagtctgataccctgccgcttcttttcatactggaccagtaatatctaaaacaaagtagagaagttctgtggaatctgggtggaacaattggaatgttgaacacagccaattggaatgtcagtttcaagttgctgggcagaccttgtcttgatatatcagatcaggaactagtggctataacaaatttgcttggatacacaaaatcagatcatagccaaaaaaaaaaaacagctgtctttcgcaaaacttgaacatataaattcaatcgccgaaataagagaaaatgattcactagttcaaagaggaaaagtatctcatgacattttgccagtggtcctactcgtgacacgtctttcaccatcccagatcaaccaatgctatagttcatgtttctttaatagctgcggggaccagtcatacgattgccaagatttgactagacttattgagtggctattgttttaaataggctgaatagtgagacacaaatacaaatatttctcttgggtagcagcttttgcaccatgccatgagatatttacatcagtctggtaatttctgatacattattgcattttcattttaactttttaactactaatcttgaaggtctctgtagcataaaataattaggtggagatataaattttaagaatgtccccttatcttgctagcaatttaactttaaaatattgtttggtagtaattgtccctctggatacatatttaatagtttgtatatgcaagccacatgatttatcaacatgtaattcttctagtttggcatgcatcttccaaataataagatagaataatataatgaaatcctgcttgacacagcatgacagtgttgccttccatgcaaataactaaacagagcaaacagttgaattgtacagttgtgttacagtttgtacctgaggtatcttgatgacggtttgccaaggtggagattacacacaataagattagcaagagtttcaggatcttttgcatcctacaagagtagaaacagggtttgagtaccttgtgtcgaacatgccaacgtggcatccttatgtgagtcaaataaaaaaaattaaatgtcataagtttttttttccaactttaattcaaacttagttgcgaggtgtgtcatcaagctaaccttgttcaatgcttcgagtaaaagagtctcagcctcatcaaagctccccatgtgcatacagcaaactgccttgccatttagaaccattcctgtcatcgggtatttttcagcaaagtcttggaatatgaggtaagcttcacggatcttagagccaccctgcacgataacttgattgttaataagctcgatagattaaatgttgaataagcacatttgtccagcagttgtcaatgcaatgctgaattttcggtactccacaaagttggactgtcaaagtacttacaacagcaatgtccagccatgcgtttgcaagttgtgtcagtgtatggtcctcatcaatctgttgcatgatctttaattgcttctcggcatagtctgaacggtgcatcttaatgaagatctggacattcaatgcatgcctgtaaccgaaaagcaacagatagtaaacaagatcatcaacaaacagtattccacaaatgaagggggcaccaaacagaagattctgaccaccaaggtttgcagttaactaaatgatcagcaacatcaaatcgaaatcagcaaagatcagcaattaccagtgttgaacaatagaaaatattaccatgctaaagatcatgaagccagaaagcacatttaagatgtatcatgcagtaatgcattttcaccaactctcaaaacgtcacattttcaacaagataaacataagtgcatttgcatgtgcatagttagcacttagcagcatataagaaagaaaagtgcgttgaactacaatgtccgagtgataataaacgtgcacaacactgagcatttgaacataccttttcggaaacaagatttttgacttatcttactggataccaataaacttgaccattattgtaaggtgatcaaaattcacaaacaaaattttctattgttctgcacctatgttttctaaaaataaatctacacctggaaggatgaaccatataaagttcagaggacaaatgaaactcacaggtccagagttccaccagagtgtgtgtgcttgagagcttcagtgtagtcttgctcatgcataaatataattccagcaatcaatcgtagaacaggattgcttccaaccgccgaatcactcaaccattccttcagactgacaatcgcactttccttcaaaagttgtacaaaagaataatacatagcatttcagtgtatggacaaaccagagggaagagaagacaatatgatggaaaaacaaaacaaaaaactatttttctaggcttagctgtactggactactggttaaatactcataaagtgcatgacatgaaccaaaataagaccataaaaactctgaaatgcaccagaaaacaatcgtattattggaccataatgtatgcggtagggttaaagtgaaaacatgcatacacaagttgagttcatggggcctcatagcaatttggggaaaacatataccaatgatccatctatgtttgaggaggtggtatccctgaattgcctgtgattgccaagttgaccatacattccccagcagactaccaaccaacattatcactgatgaatgccggtagtcctagtctcctagatgcatggtaggcagtatgtatgttttcccccaatttatctgaactgaacaccctgagatcaagtttacgttatactggttccgttttgttttcttcttttgggttttaacagtgaggaggaagtagctctaatggcatatctttgtgtatgcaagtgtgtctatgctcttttttttttactttaaactttaaaggaactgtggtttcaacctatggtaactgaagtttgaaacgaaaggtcctaatatgcattgcgcaattgagctgaagaacttaacagcttcagcctctgaacaccatcagagtctattcatccaattgaaatgaaaaataggaaatcaatgatcaagtatcaacgaactaatcaagccctgagcctctggcaatgcatacgatccactagatctaactccagatcacataactcaatatagatctagcccttcgatcacaacaaagcacaccagatccagactcagacatcacgttacagaggcgatgggatcagatccagcgtgctaaccttgtctccggagaggtacagcgcgagcagcttcacggcctgcagcgacgtcgccgcggacgagtcgatctcgctgatcaccaactgcaacagccacatggggggaggggacacgcaccgatcagagccgccaacccgttgtagagcgagcgagcgaccgagggggaagggaagggagctgagctcacctggtaggagccgagcgcgacgtaggagcggaagacgatggcgtcgcgctcggcggcggcgtcggcgtcgaggcccgggacgtcgctgttgttgatggcggcctggtaggcgccgaggtagaagaggttgcgcaggttgaagaggaggtccggggacgccatggggtggctgctccggtgctctgccgccggcgacgacgaggaggaggcggctcgtcggcgacgaggagtaggagatctcgcgagcggtggcgctgctgctgctcctctctccttggcccgtttggtctctgtgtgggttggtaaagactgaggcgtatttataactgggctcgattgggccaaaaacttctggcccgttgctaggtgggcccgtcggaaatctgcagagaggtgggcccattgtttgggccttagttctatagtgggccaaaatatatccggcgctagcaaattctagtacagtacatttttgctatatatatttttgtcgatatttttttctaatataatggtaatgtacattataacttacatggtaactataatataactttcatataattttaatcgttatatttatttcaacattcatgcaagttagaaagaaaaaaatccgagcgcatatgtgtgacgattcggtcccacaatcttcgttttataaaaatagcatgtaactaacaaatttttgaaagttacaagttacaatataattacatcatgattgcactataatttatatgtataggcagtctcagtataatttggtcgtgctgtcgtggtacaaatccaactccgacttggtaacaaattatcttctagattctaatcgataaatttcaacgaaaatttgacgagccttttggccaactcgagagtgacgtcagcgcgcacggcgtgctcggcccatcgtcttataggctcttagctcaagacactggcggagtcataaacagcgctgtaaaacgagcagcgcgcgcacgccgatcagcaagccgccactggctacttaaagccgtagcctgtagctcagctccaccgcgcataaacctagccagctagcaaccgacaagccaaggcgacggcaatggcgccgacgacgacggccacggcggcggcggagcaggcgccgccgccgcagcatacgaggaaggcggtggggctcgccgcgcacgacgactccggccacctcacacccatccgcatctcgcgcaggtatgaacagccaaccgtataccgctccatgctaagaggatctttgtcgtgctcgatgattgctcgatgattctcccgcgccatggcgccattgatgggagattgggagacatatggagcttttttttttctctccagagtttaagatgatctatcgtgtttgaatttgactgttactctcgtagcaacaatagtttacaggatgtccacatcgaattagtgaaaatcgccgtttggttcatggagttaatagaatctgaagctctcatgagccagcgtcacttgagctttcgatttttgttttccccttccatttccagtcatttccagccttctcatcggatttgtagattgtagttttgcatttgatttccctgcgagcaacggtgctcagcatttgcacatcgaatttcggtcatccatgtgcaaaggaagcaaaattcaccactttttgaaactgttcttttttaaaaatcttttagagaagtgtatttattacctggcctcgttcaaccggatatatgcagccatttaaattggttctgaaactgttcttgatcaaatggagtatctcaaccaagccctttcgtgccaaatcaacaaacaacagcaaaatctttccccagacgtctacagtacaaaaaccctgaccatccagcaccagccagcgctggctcactgacctgcagcaaccagctttaaaaaccatgcgcatttgcagcacgtattctgtaccaggaatacgggatccgtcagatctcaactgcaaggcaccctttcttcaattgtttttggtggtgagttaatactgttcaacagtgaccatactgggcatgcctcagctgcaagaatttatggtgctcgatcgctactacgtcatccatcttcttttcatgtgcgaccattctggctgtgattggctggctgctgctgtcaaagtaacaggagtgatttactttcacagtctggttgtatggtacataattcagttatccttctggaatctgaactcctcctggcttagtcatagcagtaaaaatgttcattcaagaaacaggctttcaagcagtaggcggcttgctgcacatggcttgtttttgttaccagtttttttgtcgagcctatgtgaattttcacaagtttacagccatctgtgtgatggtaaattgaggatcttgctgtatgccaattcacttgctagtgttgtaagcatgcatcttctttcagcttcagcagttcaaggctgttgatttgatggtactgaattagttccctgaaatacttcagataaagtaaaagggaaagcaaaataaaagaaaaatttcagttctaccagttcatggcttagttaaaatcttgggaggtgaagcatggtgtttaggctctctcttcttgtgtacttgagagtctgaactctcaatgctgaagtaataaccactgcagttctgctaaaaggttattggctcagtagagaaatagtatatgtttctgacttgtgttctatatattgccatttttcaggaaaactggagatgacgacgtcgctataaaggtgctgtactgtgggatttgtcactctgacctgcacaccatcaagaatgagtggagaaacgctgtctacccagttgttgcagggtacatccttcttattgcatcaccaatttatcaatcaatcgtttttcttttcttcttggttctgtgcgcatccagatggaaaggctggatgcaatttcattgcttagtgaaatatccattatcagttcatactttcttccggcaaagctgaattatcatactgtaaactgcaaatcttgtcagttttttttcacgataatgaaattcattttgtttttacttcaaagaagctacaaccaaccactaccgccgtttcaggttataagacgttttaactttagtcaaagtcaaactgcttcaagtttgactaagtttgtagaaaaaataataataacattttcaacccaagacaaatttattatgaaaatatattcagttattaatttaataaaactaatttggtattacaaatattactatatttgtttataaacttagtcagactttatcaaagtcaaaacatcctgtaacctaaaacggagggagtattactctaaagtgctttcaacttacttggaaaaaagaaatgcaaactttggctgcatggtttgattgatgcaggcacgagatcaccggggtggtgaccgaggtggggaagaacgtggcgaggttcaaggccggcgacgaggtcggcgtcgggtgcatggtgaacacctgcggcggctgcgagagctgccgggacggctgcgagaactactgctccggcggggtcgtcttcacctacaactccgtcgaccgggacggcacgcgcacctacggcggctactccgacgcggtggtcgtcagccagcgcttcgtcgtgcgcttcccctcctccgccggcggcggcgccggcgccgcgctgccgctggacagcggcgcgccgctgctgtgcgccggggtgacggtgtacgcgccgatgaggcagcatgggctgtgcgaggccgggaagcacgtcggcgtggtggggctcggcgggctcggccacgtcgccgtcaagttcgccagggcgttcgggatgagggtgacggtgatcagcacgtcgccggtgaagaggcaggaggccctggagaggctcggcgccgacggcttcatcgtcagcaccaacgccagtgagatgaaggtaattttaaagctagtttgatcaagtcaagagattattaaatgaactttaagaacggattacacgatagtaattacaatctacaactcctgtacaagtagtaaattaataggaccactttggactgagttaagaagagatcaatgaactattcagttctacattaatcgtgtagtcatatggaaggacatcctactgatgcagatgcagtaatatggcacatcacaaacatacaatttcaaatttgacttttacaagttgcgtttgatatgttatttttgttacaaattatagaagtcgaatttgaatttgcatgtttgtggagtgttatattagtagatgtcaatctattttttcaattttttttaatatttttataatcgtttaattaacatgcaataaacgggttaacatccactcaagtggttataatccatctccatcaatttattgatgtgctgcagtgcaactttgcaaggctatgcaagccgaagaaatctttgaatacaactgatgcacctcattgccgacagagcatcttaagattgtttggtcaagtatctgaatttgcattttggacttgtgtttttgcaggctgcgatgggcaccatgcatggcatcatcaacacggcctctgcaagcacatccatgcactcttacctggcactcttgaagcccaagggcaagatgatcttggttggcctgcctgagaagcctctccagatcccaaccttcgctttggttggaggtaatttactagtttgtctgacgctgcatcgtctgattccttctcaaattcatggcaaaatttgacagtttgttttgtgacaaatctttgcaaatcaacagggggcaagatactagctgggagctgcatggggagcatcagtgaaacgcaggagatgatcgacttcgccgccgagcacggggtggccgccgacatcgagctgatcggcgccgacgaggtgaacacggccatggagcgcctcgccaagggcgacgtcaggtaccgcttcgtcgtcgacatcggcaacaccctcaggtcggattgactagggagctcactgtcactggtctcagctctgtagcataccggacctgcaatcctgcaaagtagtgcaatcttcttgctacaagacatacatatcacctctacttggtgtcaataaatgtagcaaaagtggtacattgttgtactaatctgtgtttaatatagcgttgcaacacacatgtatattgtgtaatggaatggaatgggtcactgactcctatccaagaacgagccatttgcattttgcaataaagcattactgtacttgtacacagggacaagggtaacgttctcactctgatggttggacaaaaaagttatactagtatacaatatgccaatatggattctgcttgaatgaagctaaaacgacgtactacagagatagacatcatcaccttgacatactaagggacctggggatagagagcgatcggacctccggcgccgaacttgggaacatcacgttgagcctgtgcatcaggacgtcagccttggatggtatctcgttgagcaggaactgctgcacgatcggcttcttgaaccactcgagcaccgagtcacctggcgcccgcagcaccaccttgctcacctcaaagggggactccagcgacgccagcacctgcgccaccaccatcttgagcgttggtccagtcactagcttgatgcggcgcggcaccaccccatagtagagcatacgcttcctgaaccggtgcagcgtgtgcacggttgccactagcgctgcgccaacggagaggtttctgacgtccagtgaccaggcgatgtgctggtcgaagacgatcgccttggcaaacagcttattctcgtaggcgaccttccagatacagcgggcacggttcatctgccccatgagaactaaatagttgagaagcacattcacgaagtaccttgccgcactctcctcattgtcgtagtcgatgccctggaagaactcccggacgaacgagagcactggcttcttgcgctgctcaggcccggtgaacagcccgcacatgaagtcatgtgccttgtgcttgcttacactcaggatgtccatgattgcccgctcgcgtccctcatcctggcaccgcaccaaatgtgcaaggatcgaagtgtagagtatcaagtccacctttgctgcccccgcgacatatgtctcgagcaatggccgtgctgagtcatacagccccgtcttcatacatgactcgaatagctgccttatgatgaaattgttggtccttatgccagcggagcccatgaaccgaagccaccggagtgcaagctccgtcgacccttccttgatgtaaatcatcaggaggtcgctggcggtcacctctatcgggaaccctgatgccttcatctccagcaatacctttgcagccaaatccagcatcctcttattcgccaacatcatcagcaatgctgtaaatgtgctaagccccggccgttgtccagcatttgccatcgagtggtacaaccgcatagcagcatccacctgccctgcagaagcatgcatctcaaccagacaagcgtatgtcgctggcgtagggaagaagccggacttctccatatcaccaaacaactgtgtggcaacatccaacctcccggaccgtgcattcgcctcgacaaccatggtgtacagaccaaagcttggacggagccctcccctcctcatctcctcccagagctccatccctgcatccaacttcccagccctcaccagcccctccaccacggctgtgctcaccgccgggcttgcacggtgccccaccgccaccatctccctgtacatccccatagcagcatcgagcctccctgcttttgccagcacgtccaccagcacgccgtacatcccagccgacgcccgcccaatcccctccctcttcctcatttcatcaaacatcttgcgtgcggcatctatcctcccggcgcgcgcaagggctggcaccacgagctcgtaggttccctcgtcgagcgcgcaccccgacgatgacatttcgtcgagcacctcaaaggccttgaaggcgaggcccctggtgagcagcagcgagaggagggcattgtaggcgtgcgtctccaggaccctgaaacccgcgtcgcggaggcgcttgaagcagaagaaggcgggctcgaggaggccatgggtggcgagcgcggagagaacggcgttgagggtcttggggaaggcggcggggtcggggagggcgagggtatcgtcgaagagggagaggagttcggaggagtgggtggccggggcgaggcgggcggcgaggagggaggagaggtcgtcggaggggacgaaccatggctggacgcgcgcccaggcgacgagggcgaggagcggggtggggtcggaggcggggagggaggacgcggcgaggaggaggagagccggatcgggctgggacggcagcgcggagagcgcggcggagagggatggccccgagcggaagcggagcgcgagcgccgccagccgcgccgccgccgcggggcgcgggagcgggtgggccgaggagccggacaggatggtcgcgtcggcgcccggcaccgcggcgcgcgcccccggcgccgacgagaggacctcccccgactcgtccaggtagtccaccgtgtcggtccactccgccgccggcggaggcggcggcggcgaaggccccgtcgagagccgccgcccccgcgcggcgatcgagaggggcagcgccgccgtcgtgaggcggcggcgcgagaggccgacgcggagtagcatcgcgatgacgctgccgccgccgtggggctctctgcgactgcaagtaggggacttcgctagggtgccctttgggccgtgctcggcccatccaattacatgttgttgggccgtggcccattacaaggcccatcgcacaccgttgccgagtcgtcttcttcctcttcttcccctcttcttctgctctgctctactcgcgaagccaaagcctccgccgcgatcccctccgccgctcccacgagcttcgccgcccgcttccgtcgcgcgtcggcgattcgcgctctccccgactccagcgccttcgtcttcttcgacctcctcctccgaaggccccgccgatcgatccccggtgtccgcgccttctagttcgccttttcgagctctttttcgccggagacgacgggcgtgggcgattcggctggattcctctccggtacgtgcgatctcgctccagctctgctgatttatctaccctagctttgtggttgcggaacagccctgagtagcacccatgttttgagatgtttcgactgtatcgacttgctgtgcgcgcgtccctgttaggtctagcttccactgggtgttgtttactgctcaatctatactttaccactgtagcttctgccaccaatcggttggtcatgtgtatgcctgtgtgaattccactgggtgtgtgtgcacatgtatgaatgtgtgatgcaaaccaatatggtagatccagtggatgcttatactattaactgcttaagtaagatgtatatgccatagttttgcgcaatgtttgggtgtagttcattccatgttgttttccctgcagctggttgtataattcatggtgcatattttgtcttgcctctgtttcagcattcctgttaggacttaggagaagtaatgtcaggagtattagcaaaattcgctattgcatctgcggtgatgtggacagctccagttgccatcgtgtatggattttactaccagatgattccaggtttgactattgtatctaatttacattgtttttcatcgctacttttaaaactgggacacatgatattcataaggagacttcatttgctccctgatcaggtgtgagtcaactgtcatcctcgacgcaaactctagcaagtggattccttgctgttatatcgattaatctggtaatcggcttttatatatgcatggcgatgaaggagactccccaccaagagccacaacctgatccaaccttcttggcaaatgctaaagcaagcattgatcaaccaactccgtctcaagtgaatgatgattcccatggaaagggaaaggtggagtaggtcatatcacaacatgtgcatgtttcacatgttatccagaaacagttcttctcgataccctgccttctaattcaatattatcttctgtaaatcttgagaattatggaaccaatatgagttttaccttttgtactgttattatcgagatactgtgttagaattatttttgtttggctgcagagaactactttggctggctgtatttaagtcaatttcgtttttcttcaatgtggtcagagatctcctttagcatacatttaataagataaatattatatctatttagttatccattcgcaatgtggcactgtttttttaaaaaaaatttctggttaggagaacaaacctggagaaagttgtgttccaaacttatgcaaatgtttgcccattggaagtagatgatttcatggagtaagcctattatgctttagggagataataatttattagtgcccatgccactcactcttatggatgctcgacgctagaatggtactgatctgaccaaatgggaagctcagaatctactttacccttagtcattcacatggcttagcagctaagaacaagttaagtcatcatgtattatcatatcataaagtacaaagagatcacctgagataagctttggttttagaaaatctaggatggatacaataaatactccaccaagagtatgttattttgcgaagatagaaaactcatagattaatacaaatcaagcctatctgggaaataagatcctctgttattctgaagatctatgcccatatggcaagcattgacatcagtccagcacctaggaaaagtgcaaggtatgccatgagctgaagctttgtattaatctgtagcttcgggttattgaaatctgttgctagaaggtcaactagggacatgtagatcaaaattcctgctgaggctgagttgaagactccttcaacgacgaaggcagttgagctatgcacattgtagctcgatgaaattgcaattcctagcacgatgcccacaggtgcagtcagggagaaaaatattgccataatgacggttgcccttaccttaaaattagcctgcagtaagaagaatgaatcaaacatattagctttttgttgctgtaagacatgatatgttatatgcatagttgtctctttcttctttgtgtccaattatttgatttctcgataaatctattattattcttacctaactagtgaacctatgttctctatatgaaacagttatatttctttatttttcttttgcagcctgttactttgttctcggcttcttttttttgtggtctgttacttcgttcttgaagaaaatggctaataacttttcatgcttgcaatgtgtcttgttgctattgtgcctttttttttccaactttgtatgtctctgccttatttctttttttctctccccttctgcggaagggcccttccactggcctacgagcatgttgatgttaagccttttcgagcaagcattttgctatcttttgtcaaaagtcgaaacaacaagttagatatttgtcatcaggtgtctactatctaggttacagtacttggacatacctgaacaatgcaaccacccaaacctacaccttcaaagaactggtggaagctgagggcaccaactagtggcctgatagtagatggcctcacagatgcacctaaggatactccaatgataactgaatgcaccaagattcccagctcaagaacctgcatggccaaaaattcatgtggttattgcaagagggcctatctggttttgtgaagcattcatttagttggcaatcaatgtgcaaatggagttaattctgagtttagtgggaaaagtttcccctgaagtgcagattatcagacatatccattgaataggtatcttctcttccccatatatgttttctatgtgttttatggaaataagtaaaaagagatattagataatcaacatcatcctgcactattgtagtttcaagattacaatagactaaacttattctcattactgttgccaggaaggcctatgagcttcaagtgactgctgttacctgagatactaccttatgtcgaattgattcagctactgaaccctcctctggtgagccacagaccactatatcaccatgtgaatgtgtatgtcctccatgtgtgtgcgcatttatgtgttgtgcatgttcagccctctcgtctccagcatgcttgtgtacgttgatgttgtcaactgggcgtgccttcctgaattgagaccggtgatagtatccagcagccaatgagtccaccaccattgtggacactgcagcagacattgaaacaaggcccgcaaaggggaagggattcctatccccaccaccccttttgaggcatggagatgtgagcgcatcaaacgccgctggaagaatgtgcaccatgccagtggcaaggatgacgccggctgcaaatgccttgacagcaaagaagatgtcaccatcagggcgcagcgcagccatggagcggccaatcactggcaccaagacaccagccgccccagctgcaaggatggatgcaatggcaatgagctttagcttcattgcaccctgtctgtctgccccgtctgtggtgttagcacagtcgcaggcactggctgcagtgtgctgcgcaaagagcagtagccatggaagcacttgcaaggtatgcttcttggctcccattgttgctgattatgttgattatttccctgtgatacgatgtatgtatattgctatgagtcagagatgaaggtagtactgggttctttatataggaggggatgagatgatagggattgatgtcatcctttgaccagaagatggaggcaatgatgggttttttcttcttctttttttatttaagtagaagggaataagatgatgagaagagatgtcattctttggccagaagatggatgcaatactgggtcatttatataggaggggatgagatcatagggagatatgtcatcctttgtctaggtgggatgagctatgcccatgtgtcaaaaactgtagactaaagcactttggacaaagttgacccaaaaatgtggaaggaccaaactctctccataaatatgtaaaccgtaatttaacgctatcactctatcatgatgttaattgacaggtgtatcatggggcatggtaaagccataaaggtagatcaagcctgggctcatgtggaacttgtttgcatccatggtaatcagttgtggggtgaatgtgaaaaatcttcatgttcagtgttaacgtccgcatgccatgttgacccatctcctgattaccaatgaatatggctgaagcagatttcacctgattatattcaccttgagtaaagctggggatatagcattcagatagatttttttttgccttctattgccacccttcttcatctcttaagacttctaattaacattattgttcttatccggttggaagatgtacaggtgcaaatctgatggttcgaacacaatagttttgcattgagctgtcaatctgaatcaagcaaatcagctaccagcctgccagtgagtcctgaatgtgcaatctgaattgattagatggctcatgatgaacttatcgtcggacatgttggatcggtatgttcatcacatttgctccctttaattagctttaggcacaattgtgctgcatcattggtggcttatcgattgatatgtacatgcaagtaagaagtgacttggaaagtatttgttgcctatacggatgggtctcaagatctacactcgtgggttctactgttgacaagaactaatgcactgtttacaagaatattagcaggattctgcatatttccttcaccaatcactactacccgtatcaacctaagactatcatgttttcctttttccttgcacctgtttctgatagttagaagtgacatttttaagtgcttgttgatacagaccattcgtttatattcattttcataaaaaaaagaattcagttatatccaagttttcaaattttcaagcaggggtatccttgttcctcgctgacctcgggctcggctaatggtcgaacggatgcaccagggagaaaagaaggcgacacaacacaccacaaggacagcatagtgggtaggcagaccagctatgttcttgtacacgaacaggagaagcaccactgagccggccggccggccagccaaccgcagcggagtggaggtgagccaataatgctatcctagctcgcaggatttaagtggtatcgtgcacttgacttgaccccataacagttcacccttttgctttttgcctcgtgaatttcttcaggaaaaaaaatctgaccaatcaaggttgtgcagaatgttaacactgcatagataaagttcctcttgatttcgagggctggagtatgtccattgatgattcaagggacaattaaaacccttcctgtgctgatgcagttttgcatgatgctgaagcggtagatcggccgatctgtgacttgctgggtggtaaggacagctaaaaaaatctcagagggatatgaagtgaatcagtggctcaaagttgccatcgtctgggcttgtgcagcacctggtatctcgcattgccgtaagagcgacctaacatgaaatactgcacacagtcatctcatttgcaggacagcgacacagtgtaatgctcttcactgcacacactcagctcatctgcaggaggacagtggcacagtgtactgctctttcgcctcccactcagcaagtcatgcaacagcgccatgtgcttgcgatgaaagcccatcgctgcccactaatggccgaggtgatcgtcgcgtttctacatccgcatcattggttgctcggacggaggccatggggcgcctggagccaaagctgcgtagcccatgttctccttgactccttggatttcgtttgcaagcaggaaaggtattgtttgcactttgcagctctgcactgtgttattcgtttccttatcttctttcttttcacgagtagaattctgctttggaataaatctattttgcctctctcctaattgaatcgcctcacaaaatcacaaaatcggatataacgttttcctcatcttcgaaagctggtgaaaactgtcatccttcctgcctctaatgctgctggaagatgagataggaggaaaatggaagagaggattgatagaggggaaaagataaggagaaagttgttgacatatgggtcccactcattactcaacgagtcaaccgaggttaacttgttactacgtcagtagaaaccgtttccaaaccatcgaaggagctgatttgtagttgagagaggctaaggagctgatttgttatattcggttttatagttgagagaggctactgctgggtggtaactactgtcctcctgtcatggacaagcagagggatgtgacaatcagtagctcaagttacgccatcgtctgggcttgtgctacacatatagcgttgcgcggtgtgtaacgtgtgttaggccgactagtgtagtcctcttcattgcacactcagcacatttgcaggacagcgccagtgtaatgctcttgactgcacactcagctcatctgcagaaggatagagacacagtgtactgctctttcgcttcccactcagcaagtcatgcaacagctcatgaaaatatgcagtgcaaatcacatatgcaatggaaatctggagactacgttggatccaaatatgagtgttttagatttgttcgtgtcaccaagaataaaacttttactcgtggttaaatctaagagtaaatctaggaaaaatatgtagtgcaaatcacatatacagtggaaatataaaaactatcattagactaaaatggacgcctacaatttatcaatgccaacaatagaaaaacttataggcgtccattttagtctaagatagttttcatatttccactatatatgtgatttgaactacatattttcccaaacaacaccatacttttgcgatgaagcccacctgtacccactaacggccgaggatattgtctctgttctactaccttcgtcctagaaaaagacaaaccctgagtttccgtgtccaacgtttgacagttcgtcttatatgaaattttttttataattaatatttttagtgttgttggatgataaaacatgattaatactttatgcatgacttgtctttttaattttttttcataatttttttaaataagacagacagtcaaacgttggacatggaaacccagggtttgtttttttattgggacggagggagtatattacaaatctttcaggtttatcctaagttaaaattcttttaagtgacattaatttgtaaatatttatcaacaacactaaattaatttgtaaatatttatttacaatatatttattttgtgtggaaaatatacctataatttttttataaaatttaatcaaacttaaaaaagtttgatttaggataaacccaaaacgactgtaatgtgacggagggaatagatacggccaagctgggtagctgcgagcatgagaggattggtctgcacattgcagctctgcgctgcactgtgttctccggctcgttgttcttctttcttttatctcctatttcttctccggctcgttatccggcacgacggcgtgggctagcccgtgctcgctagttgctactcgacccagtgtgtagtcgcgacatggctgtgatttgagaagaggaagcttgatgaggagaaggggaagggaggtggggaggaggaagaggtggttgctagcgcggggtggaggcggaggtggaggtggtggcgcttcaacagccggtggcgccgtggcggcgaagactgccgcggcgcttcccgatcgcattgcctcctccccgacggtggcctaggtgatggacgacaccccggcattgggcgtggagcggaaggggaaagagggggcggagcggtccacgggaaactattttaacagcgctcgtgtggacgtccacccgtttattgcatgtcatctaaatggttatgaaaaaatatgaacaagatagatcaatttgtaatatatcaatccacatatttttgttacaatttgtagaagttgaatttgaacttgcatgtatgtggagtgatatattacatattgatctatcttgtcaatttttttaaaaatttttcgtaaccatctaattgacatgcaataaacggatagacgcccacttgagctattagaatccatctccagctgtccacggctccacgccatatatggcccggccatcctgggttcaaagttgttgggctatcttacatggctgtatgccccgaccatcctgggcccaaagttgttcgtttccagcctgaaaaccagccatattcagtcaaggaataagttcactctaggtccctcaagttgtcgccctgtccgatttttcgtcctcagtctagaaaacctgatacaacgcatcccccaacttacaaaacaatacaaaacaacgtcagccaaaatcagggtcaaatactgccgaggacctcgtttgcactggttttgtaatttgttggacacgctgtatccggttttccggtttagggacgcaattcggactgggcaacatattgagggacctaaagtgaacttattccttcagtcaagtgaccgggtcccccaaggacattggtattatcaggcataccgacaaaccagatgggccaatactgaattcagcatacaacgtactccagctagcaccggtttcagtcaaatgatcgatgtagtgcattactacattggccatggatgattggatgtgattgccggttcctcaagagttaagcatgcgtgcgacgagtcgctgtcaaagttttcagaaggtatggggcagttaacaagctgacatactacaggaattatactgatgtcccatttattagtgttggaatacatgagattaatcagtcaaagccaactgccaaaagaactactgtacccctgaaaccaggaaacttcttttctgcatggttgctcgcctaattaatcagtgattgcgtgcctttcggtagttacaagtagcagcagctgtacttactttgattagttctgaatactacataattaagagtttaattgtgcttttacttgtatagatagtactagtagcaggctactactgttatcacctgagacaacagaggatagatatacgagtgagccggtctatccgccgcttttgttgcggacaaatcactgatgctcccgggacagctgctccttctcccgggatttattctcagaagttgttttctcttgacgagatttattttcagaagttgtttttctttttactgtaaactgtccaagtttctaccccgtttccaaaaccattttttctctctcgtttggtctcaaggtctcaccgacctctcttggtcttggccctggggctgatcaactacctagatttattttttatttttttactgtcaactgcacggcatgaggtagtactgtttttcttctctggaattcttgcgaatgcttgaatggatctttgtccatgttctctttttctttagcattacgtcctcatgtcctatgttgcaatttgatgcaggaagcttcttgtaattttctcctgtaattttctctctccttaacttttccacttgatctaggaagtgagccttgtttaggtcccttttgaatcgcaggattgagaaaacgtaggaataggaaaaacgtagaattttgataggaatgtaagtgtaaaacaaagaattgcaaaacgcaggaaaaatacaggaataactgtttgattgaaccacaggaaaaacacaggaattggatgagagagagactcaaaggaaagttagcaaaaggttaggccccctttgatttggaggaaaaatataggaattttagaggatttcaatcctataggaaaatttcctatgaagccctttgaaaaaaagattgaatcatatccaatcctttgaaattcctatgaaatggacaa

SEQ ID NO: 9362 - DNA, 10363 bp, Oryza sativa
ccatcttcgctgtcggagattcagatcaggttgggtgaagatgtactttagacttttgtgatctgtatatacctcacaacggttactgatgagatagtgccgccaaatctttaaagcatgaacgactgcggccaattccagatcgtgcgtcgggtagttgccttcatgaggacgcaactgccgtgaagcataagaaaccactttgccatcctgcatcaacacacatcctagcccctggcgagatgcatcacaatagacctggaaatctttcgtctgatcaggcaggattaagactggtgcagacaccaaccgtcgtttgagttcttcaaaacttctattgcattcagcagaccagataaacttttcttccttcttcaatagctgtgtcattggcttagcaattttagagaagttctcaatgaaccggcggtaatagcccgcaagtcctaagaaactccgaacctgagtgactgtccttggtggggtccacttggtaattgactccacatttgctggatccacagctactccttgagcattcacgatgtgaccgagaaactgaacttccttaagccagaagtcgcacttgctgaacttggcatatagctggtgctcttttaacttttcaagtaccagccgaagatgctgctcatgttcttcctcggacttggagtagataagtatgtcatcgataaaaaccacgacaaacttgtctagaaattccataaacaccttgttcatcaaattcatgaagaaggcaggtgcattagtgagtccgaaagacataactgtgcattcgaacaacccgtaccgagtgatgaatgctgtctttggaatatcctcttcgcggatcctcaactggtgatagcctgatcgcaggtctatcttagagaacacagtagctcctttcaactgatcaaacagatcatcaatccttggcaaaggatacttgttcttgatggtgacctcattgagtgcgcggtagtcaacgcacattctcttggttttgtctttcttctccacaaagataaccggagcaccccaaggcgacgtgctcgggcggatgtatcccttctgtaactgttcatcaacttgcttcttgacttccgccaactcgttggctcccattctgtaaggcctcttgtggatcggtgcagttccaggtaccaagtcaatccggaactcgatatccctttttggtggcattgttgtcagatcatccggaaaaacctctggatactctctgactatgggaatatcctccaacttcttagtggttttctccactgctacctcttgttcttcaccagcagcctggtttaaactaatccctggcttccgcggcactggagactggaaagttaccacctctccttttgcattggtcaacttgatggtgcggctggcgcaatcaatcactcctctgtgccttgtcaaccaatccattccaagtatgacgtctaggtccttggattcgagaagaatgaggttggctggaaaaatcgacccttgaatttcaactgtcacagatgggcagtagtgagttgtggtcatgccacctccaggagtatgcactcgcattggtatcttaagcttcactaaagataacccatgtgcaccagcaaaacgcttggaaatgaaggaatgggttgcaccagaatcaaacaatactactgccggtgtcgagttgacggggaatgtgcccaatataacctctggtgctgactgcgcctcctctgcagatgcatgattgacacgggcctgaacggacttgggtccagcacgtcttggcttcgagcactttccaaccgtgtgtccgggtttgttacaattgaagcagagttcgggtttttctcccaacctcttgggctgttctggcagagctggctgaactgattgagctggaatctttagtgaactcggagtagggttgagactgtgctgctcactgttgttgtgactgccactatggtggttcttgttgaagctacccgggtggtagggacggtgctgtcggataatcatggtggaaggtccaccgtgacgtcccatcgtgaaacgaggcttctgactcttcccctggggagtcctgaactgagctgccttcctcttacggtttattttgttaccgtgctcctcctgacggatagccttatccaccagcttctcaaagtcctcataatctctagagatcaactggttagtcaattcatcatcaagaccagacaaaaacttctcctgcctctcggcatcagtacgcacgtcctcaggggcgtagcgcgcgaggcggttgaactcatgcaaatactctataactgttctggttccttgttgcagggaacggaactctctcttcttttgtgccacaattccctcgggaacctgtgctttattgaaactatgacgaaactctgtccaagtaacctctgccccagctggacgggtcaccatgtagttgtcccaccaaatagaagcgggaccttgtagctggtgtgtagcaaaagcaaccttctcctgctcgttgcattgcaaaagattcagcttcttctcaatggcatgaagccagtcgtgggcctcgattgggttggtggtgcttgagaaagtgggcggcttgacacgaagaaattctaacagtttggactgaggaggtggaggaccaaactgcaggttctgctgctgctgctgtgcttgccgctgcacctgttgcaacacctgatggtactgttgttgcatctgttgcatcattattgccatcatctgagtctgattgtccaacacctgagcgatcgttgggttctcgggcggtggggacggactgctattaggtgcattgctggcacgtggtccattgatctgctcttcgctgccactggcgttgttcgagtcgcgtgaaccattccttatctccatctgaaggggataggtagaaatatgagaaaaggaagaaaaacagggggctcagaaactaatcttgcttatgaatttaagtgcaattatcttaatcttgattaaaacactgaaaaagaggcacgcaactcctaattgaggcagtcataccactgacacatgatatcgaccgccgactaacccacaagcaacaaacctaaacacgaaaactagcaagcaaacagactaagaaggcgataaagctaagggcggcgactctgaagctcggggcggcgcttgcaaacgagggataggactgacatctaaagtagacaagggataggaaccaattcatgctcaaatccaagttaaacaaagcaaaagaagactcaaataaataaccgagcatgatgatttttatgcatagaacatttttcatgaactcaaataaagacactaatgcaactaaacaataaattaatgcatagactagttgcatggaaaatgatgcgcataacattgcccccatcgaatatagacacgacctaatgcataacccccaataaattcccgactgactgtcgaataaactccaactaaaatttttctaaagccctagactgagctaattttttttaaaaaaaaatccgatccgaataaatgaccaagatttttcccgcaaaccaaagaggcaaaactccaaattttcccaaaacaaatccaagtgaaaaagggcatatgcatatgaaaaggggttcagaaggctgttaggtgttccagttggcttgtcctacggtcaaggtcggctctgataccaacttgtcacgcccagaaattctcgaaccagaatttctaagctgaatgtgcattaaatccctgtccaggaccagccagggtacacaaacgacaattgttgacatacagatccacgtcttacaaaaatagaaaagattacaaatgcagcgggaaagataaaagcgagctaaaccgggaagcttgacttcagcagcgagcgactccactccacaggcaaaccttgacggcagcgacgaaacaaactttggcaaaacagctccaacaaggaagatcttcagctctggtgtgggggaaaaagagagcaagactgagtactacccactgtactcagcaagtcataccggaagaggaggtatgatgcaggatataaccaaaggaggctagaggttcttttgcataaagctagcatttaaaagcagtagttgaaggcagtaaaacagttgtagtaattaatcaatattaaccaatcactgtccaacgctacaccacgttgcaacaggcccaaccaaccacctgaactacgccagttcattaagctaaactaggggtgagactaatcacggtgaatctggttgatcgcccataaccgcgggcacggctattcgaatagttttactctggccagaggtgtacaactgtacccacaagacacgattccacacatgtcgccatgccccgaagtatcaccatgatactgcaaagggggaaatcgtgacaagaccctccacataaccctcccctaaccatccacaccacgctaaggtttcacccccacccctcaaaaggcagtgggcggtcccctcttgcgccgcggtgaatccggcagctggacaaccggacaccccggccgacccaactccatcacgcccaccctcgccaccggtgcctaggaaagggtcgagctatacttcagatcaagcagttacccactcccgcttgtggtaagcacggtaagtctcccagggtttcccgtgaaccggtccttaactgccatgggtgcgaccagcaaaaccatgcacccacagcccaccattcagtgtattttaattaactgacacccatgcggtggcaccaatctaaagctatgctcatagtcaaagtctatgtaataatgtgatccccatttgtgtgctagttgaactaagcatggctaagcatttcctaggccaacatctagtcattttgatacccaagttatcaatggcatatggtaaacaataaatggctgagtaataggacccatcccacattacattgtaaaaggatgcaacatttaatagaaatgcgggatatttgtaaattgggtacaatatgatcaaacgtattgaatgacttgccttgctctcgcactgatgagacctcagcaacgtcttcgagaaaccgcggaacgacgaaacggccgaaacctacgcgacaaacagagcacacaagcaaacatgctataagactacagaaacaggaaacaaaaccatttttaatggattctttgcatttttcttgatttactgagacttgaatggacttaaacggagctcggatgaattacttatgaattttagaagataaactgtgtttttactaataaagaaaagtccttaatcactttattgcgcaataaagcccagggctgacgtcatccaagggggggggcggcgccgacaggtggggcccgcatgtcagcggttcaagagagaggaagggggcgccggcacgtgggccccattggcagcggcacaagggagggaggtggcggcggcatgctcggcatggctcaagccggccggccagccatggggcggcggtcgaagacgacggcgcacgcgcggagggcggcggcgctcatgggagagagaggaaaggaaggaggagaggggattcctcaccttcgagcacggcggccggcgcgaagaaagaaagcggcggcgacgaccggtgatgcggaggcacggacgggcggcggcgacaccctaggagaagatggagaggcgttagggatggagaaagcgaccgcgacgaccaaaatggccggccggagatggaaacaatggcgagcacaccggcgacgcggggaaatcggagctccggcggtgattcgcggcaacgaagcggcggccgaggtagctctcgcggcggcgaagctaacggcggtggtgggttggcgcggcggcgaccctagcggcagtgacgcgcggccgaaggcgacggcaagcggcggcgctagcaacaagcggcgcgagcgcgataggaggcacgggagagcgcggcgaatgagggaaaacgaaagagggggctcgggagagtgcttttatgggcaagggaggggaggacgtggccgggaaccctcccgatttggccggcgacgtggggaggagagagagagagaggggtgggattcgaaatcgaatcccgccctctcgagcgcgcgcgcgggccgggagatgcgggggaagaggcggcgacgtggggaggacgcgggagcggcgcggcgtgggcgcgggaagagcggaggaggcggcggcgtggcggattcggcggcggttgccgtcggaggcgggtggctggaggaaggggacgacctgacaggtgggccccacctgtcagcgtcccggagagagggggaaggagaacgggccggcccacaaggggaaggccgagcgggagagggatgggccgacggcccaacaaaggaaaaggagggaaaagaaaaaaaagaaaaaggattttcctgggattaaaattgcaccttggtgatttttaattggtaaaaattatttccaaggctctgaaaattccactaaaaatcctgttaatatattgtgacatgtggaacccaagaaaaaaatcccacaatgccaattccaattattaattgcatttattaattatggaattagctctaggttaattaagataatttcttcggacaatttatttaaccaatttttttaaagcaagaaaaaggggaaacttccgggcgtgacatcccttccccgcttctgatctcttgcgcgcacgagagattggaagaagcagtgcctccgaaaccacaccttcgcctgagatctgcaccgggtaggcgggtgatcaggtttttggggagtgcctcctgcacgactgctcatcgccatgtctggagttgctggcggaggtggtgcgccgccgccgacaggagctggatccggagctggtgcgccaggaggaggtgccgtgaacgactacaacaacggaggcaattctgcctcaccatccagcggagggccattctcggggtataatcttctcctcctactactgttgttagcgctatactgtgtgagctatgttcttgttcctgttctacatgatgcctctagcatgttatcgcattactggtatgttcctgtttctgacattcatgatgcgcatagtatgctactggttatgttaagatcaccctacactgcttatgccatgatcattgtttcaatttcttggattaaaatatgccgaataatgactatatttccaacagaggtagcggacggaaagcagtggccgtcactatcctcccttcctcgtgccgacattgccccgccgccgtcgccgaccttggttccggcgccgtcgtgcgcggctctagccccctcgcggccaaattgggatggagcgcgccggccgcgccgcatcgaggaggaggccgcaacgccgggggaggaggtcgcgcaggttgtcaccagcatcgtctcggccgctcgtctccatctccctcttgccgccgacgctcacctctctccctctcccttgtcgccgccgttctccctctctctcccgttgacggcaaccgcgagggcgatgaggagggccaacgccgccgccggagccacgccgttgccggtggccgacaacgcgtgagcgcggtggtcaacggcgagaaggggaggtggaagggacgagggtggaagaggaaaaacaggggacggagcggtgtcgttgggctactcccctacccagctcgcctcctctatcgctcccctagccgaggcgctcgtagagctgcgtccctttgctaagggacgtgcgcttctgctggggcactgagcggcgtgaaaaagggacagggatggacggcgtgagctagggacgcggcgtggagagccgcattgtacatggccttatagaactactccagctagattgattatagtatctagtaacatgtttgattattttgtaacgaaaagagtactctatctagttctatgaatgcgttcgacacaagaagttcatttcaaccagtcctaagttttcaaaactgcaaaatggggtgttttttaataaaaatatcttaaaattgtttttaaaaattatattaatttatattttaaatttgcaatagttaatactttattaatcattcgttaaatgagatatctcgttttatgtaaacaaatttcagttccctctacacccactgcccacctagcttaaatagttgtaatactccaaaaacaagtttcttattttcctattataatgggaagttcaggcttcatgtcaacataaattagtattatcttcgtccttaaataactttatttcacactcctcccacacgtaacaatataaagacaaaatgattggaattacctccattttataaaattctaatataattgtttttcactttatcaaatcctaatataattgttttccactttcacaaaccctaatgaaatggttgtttgaaacatagagttacgttggaataaataagatggtggaaaagaaatatagattcactactactccatgttgtacgaggtagcgctagcgcttgcacccggtgaggcagcgcacaatgctgatactccatgctgcacgatgtcaagcgcaggccatctcgacagccatggtcagcaatcaagcatgtgctattgtttcctggatgccgagcaaggcgccgcacggcgaggtggacgaaggggagagggtgcggcacttttaggagaaggaagagaccgcgcggtcgcgatatgacttttagttttagtttccccgttctctgtgaagaacgtttctgatgaaattttgtgagggagatctgatgaaatgggccaaatggaaccgggagaagtgaagaaccattgcaaaagcagagcacctgtgttgcgacttgcgaaaccgctgaaaacaaagagaatccaagagcaaacacttcgatcgctcctaggcacggcacgtacgccggcgcaacgaaagaaaattcaacgaaaagaaaaaaaaaacagcaatatgttaaccgcggaagcggggcgatcttcgagccggcgacgagcggaggctggccgccggaggaggagcaaatgagttccccgatcaccaccggagaggacgagaagacgaagacgaagagtgcgtcgcgggggagtagatgatcaattgcttccaatccaaaaacctgccactatttataggctcacacattttccacattctgctgtgcttctccaagcgtgggtgggccgtgggctccacgtgggcccattcatcctcggcaaccggtggtgccgcgtcaacgtcacgcctgcctgatgtgcattgctttgtggtcgtttttggtttacacgtacggacaccgtgcgggccccacctagttagccaacagtgtagtacagttcagcttcgtctccagaagttgattttttatgagacggaaggtgtagtccacacgcagatcggcacagaagatccaggccggtacgtgtggggcccaccgtccgcactgacgggcgcacagagagatgctgctaaaaccagagaacacacgggcggaccccaccaagccacggggccccaccgtccgcgtaccgacacgtcggcctgatcctggagaaggaaacgcggccgtggggcccgtggccctgtggcgataaggtttgctgggtcgtagtagtagtagcagcgccggcgcgggggccacgtcggatgccgcgcgggccccacccgggtcgcgctccggcccccacgtgcgattgcctctcgccgcctcggtggcttcaaatagaacgtcatcgtggacgccggtgcaacggtggccgtccgttcgcgcgcgcgagagagagagaccaaccaagctctcgtacgtgcggctctcgatggaccgcatgcacgatgcgggtgcgatgcctcactctggaaagcacccaatttcgttctctttggatgaagacggttgcggtccatctgaagctgtcgattcataacatattaacatgtgtattgtttgaaaccagtttaatcaaacttacaaactctgaatgcaacgtggatttagaatctagatatactctctccgtattttaatggatgacgccgttgactttttaactaacgtttgaccattcattttatttaaaatttttaagcagatataaaaatatttatatcatacttaaagagtatttgatgataaatcaagtcacaataaaataaataacaattacataaattttttgagtaagacgaatggtcaaacgctgaataaaaaaatcaacggcgtcatacattgaaatataatatagaggtagtatattttatttcgtgtgggatataagagtgtcttaccacatcgacatcagccacaaaagaacaacactccctccgtcccataatataagggatt

SEQ ID NO: 9363 - DNA, 91207 bp, Oryza sativa
gccctcccagagggcggtaggcgactatttccgtcaattttcaaaatggaaaattatttttgtaaaacttttaataaaaaaaattataaataaaaaaaattcaaacatcacctgctcagctcgtacgaaaccgattaaagagcagttttccgtgtacacacaaaagcgtgcctggatcaagcgagaccccaccacacacacacacacacactacgctagctaggttgctgtacgagagagagagatagagaagtgatcacgattcacatggcacatgcagatgcatgcatgccaagctcgtttttaaagggcgtgccatgcatgcatgcacgatgcatgaggacttgtggagtcgtctgtctagctagctgcatgcatgcatccatccatgccagcgtcctctctcgtctgaatgcaagattcacaatccatgtactccctcggtcttaaaaaaaaacgatcctaactatgtagctagacatatgttatattcaaatacatacctaggagttgctctttttgagacaaagagagtacttactgcatctcaaaatatagcgacaaatttaaattggataaatcttattatgataaatctgaatatatatccatccagatttattatgataggatatgttttatcccgtcttagatctatattttaaaacggggtagtaccttttgctcaacttaagtccatttttcatttatttcacacggttccacaaaactgaaaagattataatacctcaatttattaaattctaatacaattatttatttcccatgcattatctatccttaatatatattctttatttttacaaactacgatacaataattactaacaaatagtataatctaaaaatgattgtattcgagagagaaaccgccgggggtgagggagagtagatacaccactcacaccagtggctagctgcatctgcatgggacccctgcatgcgtacgtcgtcctgcctgcgacgacggtactgcgggcgatcgatcgatcgatcggcgatcccgtgcaagcatgcacgcgccggtatatatttaatgtataatgtcattgacttttcatttaacgtttgaccattcgtcttatttaaaaaatttatataattattattaattttattatgacttgattcatcatcaaatattctttaagtacgaatggaactcgatttgagggggtgaaaacgttgagcgttgttggacaacatgaatgaaatcgatcatattaatgcagtagtaatattagacgacgcatatttaattatgtctcttcgcttcgaaggacgttattactcccttcattctacggtcacgcgcatatgatacatctacactacaaatagtagaaattgtgttgggtttgttgctgttgtggctgcacacccgtagcaatctctcctgatcaatctcaacatactccctccgtactcgtaaagaaaatcgtttaggacagcgacacggtctccaaaacacaactttgactttttttctataaaaatatttattgaaaagtgatatatgtatacttttatgaaagtatttttcaagacaaatatattcatataatttttatattttcaaactcaacaacttgagagttattcatgatttatatttctaaagtttgacttaacattgtcctaaacgacttttttttatgagtatggagggagtaggttattttaagtcttttctaattaagtccaactcctttaagtttgattgaatttatgaaaaaattataacagcgtctaaaacacataattagtttcatcaaacccattacataatttcaattaagtgggtcatattttgatttttcttttgctttaaaaatttatgatcttctaaaaactaaacacacagacggtttattatttgaataagtgatttgctttcgattatgctcttgtattaattttcatcgaacatattttctcccataaagtacttaaagttttcaacaaacaaatgtacacctataaagaaataaactcaaatgtactacacacctataaagaaataaactatttcctggcttctcacaaagagaaaacggaagaattaatagcgaaacagtaaggggttatttggatggagctaacttcgccacatatttattttatcgtaagtgctgtagacagtacgttgtgtctcatattgacgaaatttaacttaaaaaattaaaaatatgaaatgtgagccaaacatactccgtgacacttaaaaaattatggcatacctaatcttttgtgcttaccaatcttcgaccaactaaccagacaacccctaaacttcagcagttcaagcaggcagtacaaaaacaaatggacggcaaagccgcaaatgctcatcagtgacggcaaatcggcaacacggataagctgccactgaaaatccgcgcgctgtaacgcacacgcatgcattcatttgtttttcccccctcctcgccacgctgcgggccatgcacgcacgaattatttggcgcgcacacccggccgtctccttattaatccatcatcactcccattttgtatttgcactaataattcagtttattttagtttcgtgattccttttggcgtggctgatggggacaattaattaaaaaaacgaaactggctaagaaagggctaatataaaaataaacaactccgtagacgtacatcgatcagctgaggtgagcatgatcgatcgcggttacacgagctccactaaattattgttgattaacttgcgttttcatcgagcttaattatataatccgtaattccgtatgatttacatgactttttatttatctgtatacagttgattgtaacatcgtaaccggttcgattaatttacgttaacttgtactcgtacatatgtgctcgctagtgtgattttttttagagttaatttcactttgcaccatgttttatttccaaagtaaaactttggaccactctttatctaatcttttcactttagtctaggtaattttatttttattgcacaatgaatcaccccaaaccacatctctttagcatttcaatgacttttactccctctgtcccataaaaattacatttctagctaatttaggacaaaatggtaggattagaaaatgaccacaatgaccttatttaatgaacccattgcatgcacatattccatatatacaaatgattaaaaggaagtttgagagaattaacccatataattagcatacttaaattacaagctgagagaacttaaggaaacttataatgaatcaatttgctggccccacatggatagaaatacaatttttatgggacaaagccttagagctagaaatgcaatttttttgggacggaggtagtagcaaattgttaactaacgacataccgacaaactttcatatctatatattcatgctataccttcatcgaatgagacgttaaagcggatagagataggccagcaaaaaagaaaacgaatagagttagggtgatctattatgcaacaaaagtaaaagtaaagttacctagttcaaagagaaaacgttggatataggatgatacaaagtgaaactttaataataaaacataaacaaaaagtacatttcactcattttttatactacttgggttaattatgggaacagttagtacagaacttacgtttagtaaacaaatttgtaccattaaagtataggggcacctaattacttacgtgtgctttactattactccctcctccgtcctataatggaagagattttgacattttgcttatcatatttgaccattcgtcttattaaaaaatagaattattatttattttatttgtacttactttattattgaaagtaatttaagcacaatttttcgttttttatatttgcacaatttttttaacaagacgagtgatcaaatagtacaagcaaaaatgttaaaatcacttatattatgggacggaggggtactagttagccacgatcattgatacaggcatgaagaaaaatactattatactactacaacaactactaattaataaattaattaattcagaacaaggcatgcaataaaaacatgcatgcatgtgcatgcatgcaccaactaacctatactatgggattatattggagtagtacgtcgtagcaaaagagcaaatggcgtccagccagcgtctgtgtcattggacgggccctttgcgtgcatttgtaaaattgcacgtatgtgagcccactggatatatgattacgaaatagagatgtgtagttgctatctataaataagtacgtaggacattaggactatatataggtaataatattgttgagccagaggctaccgtctctacgaggcatcatgaactcatcccacacacatatgacacgtgtgattaattaagtattagtattattttaaataatagttaatatgattttttaaaacaacttttctatagaaaaatttagaaaaaacataacgtttaatagttttaaaacgtgtatgcgaaaaatgatggagagataattaagttgacggccgaacagtctaaaattaggggcaattcgaaattcgattcatgtacaagacatacaaattaaagagaccacgcaagaggaaaataaaaaaaaagaccatattgccatttaatatcatgcatctctactctctttttagagccattgattcgcaaggaaaacaatctaaccatatcttcatcgaaataaaccatgtatgaacataagcagctcataaaagaacggaagggcaacccaacattgctacgtgcatgaaccaacgaggctaaggcacaagacggtatagcctattatatatagatctatgctaggcctatgatggtgaaaaattgtccaagcctgtaggtcgtcttttagcccaaaccctcggaccatgacccaaataagttgtccatatcactacaacaaaaaaaaactcatacagaggaactttcgtagagatgttttgtaaattgtttctaagatgagtagttttatagtgtaaatacactttatagaggcactttaaaaatgaaaaaagcacgaattacactcccgaactatcgcggtcgtccgaattacccccctaaccataaaaccggacattcttcacccccaactatataaaccggacgaataaccccccttgacccaatccgctgtggttttggtctacgtggcgtacgcgtggcagtccagtcattattctatttataaaaaatatatataggacccacatgtcctcctctctctctcactcttcccctctctctcacgggtcagcgaaggcggcggcgggggatgaggaggacaacgaggatgttgaccgggtaattcgtactttttcctttaaaaattgcctagaaaacttttactctagagatattttcaactcagtttattagattttatcttgttgagacattctttcggcattgtaaaatgagtctgatatgtaaagacattttcttgagatattttaaactatgtagagacactttttagaatgataatgtgtactaaaggactaaatataagtaactaaaggcacaaacatacaggtatgtctataaaaaaatgcctctaccatcttatagacagtttacaaaatgtatcttcgtttgtagagacaattcaccataagacactttttagacattttttaaaatgcctctacaatattgtaaaggcattggttttataagttgtagtatgtctatagaaaatgcctctaccatcttatagacattttataaaatgtctcttcgtttgtagagacaattcactataagacacttattagacattttttaaaatgcctcgcatttgaaaaatgcctctatagtactagaaaaatatctctgcaaagcatttttgttgtagtgtatgtttgcccttgtgcatgcataggcacatatagatagatctaagaaaaaaataaatttgcgttattccatctatatttgcgtgcaaaggaagctgacatatatgagatatatagctggcatcgtagcttctttcgttttataatcgcttctattactaaattgatatttagttctttttgtgtgctacaaggcaagatgacacgtgaggcaaacctccctcctaacctcctaggtggacggggtggccacctacggtgcatgtctcgtggcacatatgacgcgtgggactatcgtgccaacctcccttccatgtagactcaccgcttacgatgcatgtgtcttcctagaacaaagtgacgtgtaggactgtggggctaaccttcattccatgtggggtgcgccgcttatggtgcatgcgtcttgacatgtggaatgcgcgtccacgatccctctcagggtatgcatcaagcgtgaatgccatgtggaccatccctccatcccttcatctcacgtggacatcatgtatgctatgaatatagctggcgcctatgcaaaagaacggtgtgtgtaagatcattatcctctctcttatggatggaaacatctagctattgtgacgcatgcgcgttaccagaagctcggtgcacacttttcgatagtatgaaataaaatattttatcaatcatatataaaaaaatcaaacttaatttaggactatttacgattgtcaggattatggataccacatacttgactaaatctcggcaggacccaccacataccatgtcttatacggaaacaacctgtggatataggaggagttccggataaggaaagacaaccagagttctatatggaaacgacaaagactactcggattgtatccatattggtttccttagttctacttggacaagggaacacctatgggtataaatacaaggctccctaggaatagaggggacagaatcaacacccaccacaattaacatagacgccacaagccaatacaagccaacatacgccaagacaagacgccggatatcgacattagagatacgcctggatcgaccctatccggtacctacagaggccggccatagggatctagcgctgtctttgatctcgccgggtacggattcgaggaggaagactaccctgttgtcgactacgagtcagaccttcagaccgccatgtcgacaacagttagataggctaccccaaatattgtaatggtgtgattatggtgaataagagcaataccggcttcggccaacaggatgtagggttattacctaacaattcagaggcccgaacctatataaaaatctctgtatctgtctcttttatctcagtcttgcgtatatcctagtaccaacgatccccatactatgcaaataccggaatcgcgacatcaaacgtcgacaacgatgtcttaaatattcacattgtgagacgattcatatcacatttattagtgctacaagtttaattaccttaatttgtgccttcgcagagcccataagagcaagttcaatagtatagctaaatactagctccaaatcatctataaccaatgtaatagccaattcatacaatagttgcttactatactattaatacatggtactacctgtcatacatatagtacgtcttggagtccgtgctgcagctggctatagatctgtagcccgctgcttttctctctttaaaatatatttatagctagcttatagcttgttattgtgtctgctctcagcataagcatgcattgcatatatccttccaacgagaaaaatccacacgaagagggaaaaaaccaacgtgcgggacacacgaagggaaaaggaagggacgcaagcgcgcgcggtctcctcgccttatcgtctactcgatccggtgtttatcctgaggcgtggtgtgtgtgcgcggagactatttagcgtctaatcacaccactgttctcgcgatcaggacggcataaattaagacgcaatacaacgtacccacgcatagtacgtccgtccatcctctctagctctgtaatggctctgatctgcactacacggatgcatgacagtaattaaaaaaacgcatcagcgctacctgcatgcagctagttggtgatacagtgatttatggagtacatctcggcaacatatatcctatgcagacaggccctcacgtgtacacacgtgcacaccaactaaaaaatatcaccaaaaaatttagaaaaaatcatacacatactttcaattgtattacacctagggttaaaatcttaacgtcaaattcattatattttagccgtaacaaaaaaacaaaaaatctgacagttttaaggttgcaattttgtcagaattttatcttttttgttattctctatgtagaatgaatttgaagatgcgactttgcacgtagatgtaatactattgaaagtacatgtatgaatttttctagaattttttgtgataatttttagttagtgtacacggtgtgtatacgcgagggcctgtgtgcataggatacgctcccgtacatctctaacactaaaataacatcagtaagggccctttgaatcgcaggtagaaaaaacggaggaacaggaaaaatacagaattctgacaggaattgaagcgtaaaacagagaattgcaaaatacatgaaaaatacaggaattgtcgtttgattggagcgcaggaaaaacacaggaatcaaatgagagagatagactcaaaggaaatttttcaagaggttggagctcttgctaaatttcctccaaaatccacatgcaatgtgtcattccataggaatttcataggatttggaaagcttcaatcctttgaatcaaatggtcaaataggaaatttttctataggatttgaatcctataagggcccatttgaatcgtaggaatgaaaaaacagaggaataggaaaaacataggattctgacaggaatacaattgtaaaacataggattgcaaaacacagaaaaaacagaggaatgactgtttgattggaccacaggaaaaacacagaaatcggataagagagatagactcagaggaaatgtttcaagaggttagacctcttgctaactttcctccaaaatgtgcataggattacccattacataggaattttaaaggatttgatatgattcaatcctttgtttcaaaggcctttataggattttttccatagaattgaaatcctccaaaattcctacaaatcaaaggggccctaaaattcttatataaatcctttgattcaaaggggtcctaaataatatgtttctctagtactactactatactgttggttcggaatacgcccttccattctataaaaaccaacataatactcgatatgatatactgcctccattccaaattgatctacatataggctttttgaggttattcctaaatgatatacatatttgtgttcatttattaagtctattcgttatttgtctattggagtaaaatagacattgatgcatgcatccatgcacacaagtatttataacccacatgcaatatcttaatttgctattggctaggaaatattggggatggtgcatgtattgagtttgttgatatagtaaatatagtatgagagagttattagcttttcttggtcttggtgtacctataaaatatgtagatcaatttgaaatggagggagtagtatacaacattgtttccggaaaagttttaaccagatttattggaatacattacatctgacagatctagatataagtttgtaattagatttgtagtactattagagcaggtataatagcaggctataagccaactataaacatattttaaaaagataaaggaaaaaagagaagagcagcgggctatagatctgtagccagctgcagcacgaactccaagatgtaatgtgtgtatgacagatgggaccagatattaatagtatagtaagcaactattgtatgtatgggctattatattagctatagatagtttggagttagtggtgggttatactattaaacttgctcttaaacattatattcggtactaattaatgttttatggggcgtatattttttcttttttttttcttgtacgacggaggagccagggatgagaggagggggcggggcccaccacggcacggcgtgttccaagctgtttttacgcaggtagtagtagtacgtactattagtacgtaacgagtacagctagaacgctttgtttttcttgctgttgtagttgtacgcaacttttggcttgataatatttgttattttggataaaaatacggtctctaaaaataactttaaatattattttctattataatatatataacagtgttaacaaacataagatttaatatgttttgttaaagtactttttaaaactaatctatatatatagtcactatatttgaaagattaatatttttaaaataatttataataaagattttaaagtttaaacttattcttatctaaaacgataaatattatcgatacgagggagtagtatattatggttatatcagtagtacataccagcagtagtataattgtagcagtagttgtagtagtagtagcatacgatattttttttctctctcccggcccctttcgtgatggggaaaaccgatgacctgctgctgttgtgctggtgcggtggcgtggcgtgctacgtgcatggggctgcggctctcgccggtaggcttaccgcccgcgcgcggcgcgcacccacccaccgccccccctgcgccgcgtgaccgtaccgcgcgcccccactctccgcatgcatttcgcatgcatgcaccgcaccctataaaacgttcacggaaattccccgagaatcgttttcgtataaagtgtatcgttttttataattattgtttttagttatatataaattttgtttttctaatttatttatacatcgcattgacgttgatagcgtatagttgaaatgataaacattattaattatcgatcgatcgagtatcgtttctgaaaaggatatcgattcggatggttttggaccgttctcaaacacccacacacccacctccctcccctcgtcggcggcgagccatccgccggccgcgccgcgcaccgacgcgtgcatgcaccggccggcggtgacgagtgaccacacgtagtatagtacaacgttacgtacgcgccataatgattctgtcagtgaccgtggcggctagggacgatggacgaacgcacaggacatgtcgtgtgtgctgtgcggtgcagtgcagctgctcaccgatcaagatgttcagatgcatgcatgcatgcatggtggtgatcagtgtcgcggtctggtttggttttggattgatcgaatttttgtgtatggcggccatgcatgcagggtgggaggtgagggccgagagaggggaatcgatcgggaattcggaactcgcaacgtgcatgcagagagagcatggagccaggcatgcggcggttgactccacgccgatataaaagaatggttagtgttagattagatttagatcgaccctaattaaacacatccatcgattgatctctaattaatctctctctcgttccaagttggacagaaaaaaaagaatatgattattcgtccatcacgtagacaatcacagtacaacgatgagagattagtatataaaaatgagtagttatgagcgagattacgaataataataaaattgggtgagagagtagtagagtgtgttggggggggggggggtgtcgtgtacacgtagcaggaggaggcgctggtttgagtagtaatagtagtagtactactacaacaacaacggcaatttttttttcttttcttctgggtctcgctttaaaagcctcctcctccgtctcgcttcccctctggctctctcgtcttattccgtccgtcccccacgattcccacacaccccaaaaccccccctcctctcctctctcgccgcgcggcgccgcgcgccccggggggactcgtcgcggccggccttagggtttcgaggcccatgtcgtcgccggcgcagccgcccccgacgcggccgccggtggccgccccgcccccatccctcgcggcggcggcccccatctcggtgcagccgcccccgctccagccgaaaccgccgccgcatccgcagcagccgcctcaggcggtcgtctcggttggggttgggccgccgccgccgacgccgcagcatcagcagcagcagcagggcccccccggtcacgcgccgccgcagcagcggcccaggatctgcttcaacgcgcactgcaaggaccccaaatccgacggcccgcgccgccgcggatggcgactccgcaacggcgacttcgccgagctctgcgaccgatgctagtacgtacgggtaacccccttaatcgcctccctcccccttccccctcccgcgcgcaatcggcggcgcccccccgcgtgctcgattcgtgcggggaggccggctcttctcctcctccacgcgcgggcggattcgcctatggcgcccaccggatctacgtggagtgatcgccacgtcgttgtaatttccgcggaatacgcgggggttttctgtaaaatttttttggggttcctcgtggtggtttgactcgcgtgcgactccgagagagctctcctgatgccatgcatggtgtgttctgtttcagtcactcgttcgagcatgggggcttttgcgagactttccatttggaggttgccgggtggaggaactgcgaatcctgcgggaaggtacggtgccccatgcatgctcgtttctctaatctttcgagccttgtggtggtgttcgtgatttgtgcttcctggctgatccctcccttgtatctctgttcttatcctgcagaggctgcactgtgggtgcattgtgtcggtccatgcatttgttcacctcgacgccggaggggtcgagtgcgtcatgtgtgctcgcaagtcgcatgctgcaatggtatgtttgtggtggctgttgctactgttgcgtgaatattggctgtaacaattggattgacggtataatatgggggatagatgtcttatgtagtattgtgctcccttcatgtgtattttgatccttggttggtgattgataaaattgcatgcattgcttggcagaaacttcataagtactggatggttcgttttatcacttgtgttccacttattgtcaccttctggcatctatttttttctcattgaaatggaaatctgagaaacatccatcattaactaaattgcagtctatcttggttggcagcattaattagggaaagtctgatgtattatgtagctgatgttctgttgatatatctttcttgccatttactttgaagctgttcagtgaactatgtaaagggtgtttctcatctacttctatgcatggatttttttttttttgaattcaacagcttttgcaaccgggtttgttttctttgggagtagttcgtactttttacttatcattataccttgtagttcgtactttttaattatcattataccttgtagttcgtactttttaattatcattataccttgatcctcatgtttgtcaggcaccaagtcagatatggtcatcttccatgcatatggctcaaaatgtagctgatagaaaagacaattttgtcaagagctggagacctcctgccgggcaattttcaagccagtggcggcagaataatatgtggagtatgtccaccatgcagtctgacttgcagcagcgcctagcttttgagtttgataggcctagtggcagtgaaaaattgcttccagggcgcacttttattcatgcccatgagaagaaatttgatgacatgcatgacagatcaacaacacctgctggcatgaaccagattatgagggagaggtatgccaatgggcatactcagcacaccaccctggatccgacgtacgcttacactctctatcacagagaaggaacaaatccaaatcttcatgaccatagtcaccatgcaggagaaaatgaccatttgactgcaaggaaaggagtaacttcagatccttgttcctctgtatctactaccttcaagcttgattcacaccatccgtccattttgaaagatgatccatcagccgtaccagctgggttgtcttctaatttttcatcagcaaatggcccaaaagaccatatcagaattggaccaactcagcagcagcagcaaatggcttcctcctcattgcagaaacaattctattcccatagtgtgattgataacgattttcaagcgcaattgcgcaatggaaggcctagaatggatgcaaaggcgagatctcagttgcttccacgctattggcctagaataacagatcaagagctacagcacctatctggagagtatccaaaaaattctatgtatcttcatcagcaatttcctctagataatatagatttactagtaaatactgtcatttttttcacgtgtttttttttgtttaaactcttgcctgttcttaagtgtttccttaaccctccaacagctcaaattctgttattacccctttgtttgagaaaatgttaagtgctagtgatgctggacggattggtcgtttggtgttgccaaagaaatgtgctgaggtgagttattcagttatcgttttaaactgtcttttcttttattagattgtattactgaactgtttattatgctaggcttgccatgcatgggatctgccctcattagtgtttactaataacccatgtatgatgtatggttatataatctgtccttttacttttactaggttttgcaacttatcccgagtcatgcacagatatttgacataatctcgtgatttggttatatatatgtgaataagcttgtgatttaaaactaatctgatgtatgggaacttctatagaaatgtgggttatttagaattaccagcaactattgccttcattttagttgttttaaccaaaagtgggttgaaatcagttgatgctacattataattggatgtgcagtcattttacatactttgctgatcacctccaattttgtttattttattgcataaatactcttctaacaaaaaaaaaagtttcgaataggcgtacttccctgccatctctcaggcagaagggcttcccttaaaagttcaggatgctactggtaaggaatgggtgttccagttccgcttttggcccaataataacagcaggatgtatgtattggagggtgtcacaccttgcattcaatcgatgcagttacaagcaggcgatacaggtatatatcttctacaaaagactcagtatataagtttgctaatgtgagttaatggtatgctgcaaacctatttctaacgcatagagatttggcatgcatgtagtaaatcattaatatttttctgcacattttatattagggcacgtcttatccatttagatgcgttatgttctaatgattttattgtatttgctgttttattccagttccagttgtgctacatttcttaaaaatgctatctgtgtgattcctatatcttctttttagtatacacatgattgtgcttatctttctccatatgagaaacatttttgtttcttttaaaattggcttatgatttttttgacatcctagttcatgttgccatattttttcagtaacctttagccgaatagatccagaagggaagctggtcatgggatttcgaaaggcaacaaatctttctgcagaacaggtaagaaagttttggactttgggttcttcaatatatttgttgtactgtacctctcattagttccagctgaaacaaacatgctatttgtatatttgtctctagaagtcttactaggcgaccatatctgacatgctcactattagatgttctacttctgctgcatactatattatttctcaaattttgagatctgcttgactctaggagtttttatctactgatgaaatgagataattatggcaacacatgttgggcttcaagaacacaaaaaaatgatgtgtttttaaaaccaaatttaggtgtatcatatgttaggtatcacacaatttagagtgttttgttacttactcctggagagagtgcttattttttagcgtgttatatcatgctggttctacactagcaaactatttgcaacgaatatgagatctgtcgaactggtaactagtttgttgaagtcttcctttggttcatttgacaggaccaacctacaaagcctgccaatggtgtactaccccctccagaagcaaataataaagttgttgtcccagattctagtcctaatgctgctgtacctcgaccaattaaagtcaacacagagagcaaaagttccagccctgtggaacaagccactgcctgtaaaattgacaaaggtgcattaccacaaaaggaagggccaggaacttcaagttcctccccactacctgtcaagagaaaggcaacttctgttggtccgaagatcaaacggttccacatggacagtgaggaatccatggaattgaagataacatgggaggaagctcaagaattacttcgtcctcctcctaaggccccttcaattgttgttgttgatggccatgagtttgaggaatatgaggtatgctgtgcattttattatttcttttagcattcagatcttggctagtgggcacaggcctgcaaacttgagccctattcagctgttcaatgttatgggacaattactatctgagacatagtttggagcatgcttaagcttatttgcattcgtgacttgctttactgtgttcttggtatagaagattaaacacatatcttctatattgacgtcctataattttcaggagccaccaatacttgggaggaggacatattttgtgacagaccaatcagggtaatgctcttagctttgctatctgcatttgttatatatgtggaaaaggacccagacagaccattccagttctttctttttagtaacatttatctcaacactttttctcataatgcttaacttatctagctaccttaattttttatgtgttttttttcaatgttttggaaacttttaattgttgaaaccattaatggtctatctgaatagaattatcctattggtgcatgatgagacgacaatataaattctcttgacttccatttgtaggactcccaacagtttactttttggaaagtacagtagcatcttttttacttgcttacaaatgatcatcattttttaccagtgagaatcatcaatgggctcaatgtgaggattgctctaagtggcgtaaactgccggtggacgcccttttgccctctaagtggacctgctctgacaataaatgggattctgaaaggtgacctgctattttagaaccattcagccttttgtatgctgtatttatgattagctacaatagaaaaacgtatttacaaatgttctaggtagggatgcaagtgggctgacccgtgaacccacatataggtcaaataagtgggtaacccgtaggttcccgtgtcatggcccagcttgccacacctagggctgcaagtgggttgaccagtgaacccactgggttacccactaatttggcctataatagggttcgcgggttggtccacttgcatcctaagttcaaggatagctcttagggttatgcttatggttcttttttgttaccgaatttcaattctattaaccctatttccacccatcagttctttataaatattgcaatcacgaagtttgagctgtctgtttcttaaatctacggtggaatttagcatgtttgaacacaagaatagcttttttttttctttctgttcacgtgtggttggtaggatggtgggatagtctcaatttactttacacacgtagctaataaccaccactacttatcactaggtcttcctgtgattctgcccaagagataaatatggaggagcttggcgaaatgattcctatcaaacctggtatgtatatgttctagtgatttatctatgctgatgtagaagctccatttctgctagtagttctttttaaatagcatgccaaatatgaattccaaaaggataataaattggagaggttcactacgaacaattggctgtatagaactatgtgctactgtgctacatgccagagcctacaaaagtacatcctgaggcatgtaaggctggttgatatctatcactactgatggctggatgtcacaatgaagcatcatagtattagtacatgttatagttggcaatgggccgaactacaaaaacgacttgccatgatccagcctgaggcatgtaaggctggttgatatctatcactactgatggctggattcacaatgaagcattggcaatgggccgaactacaaaaacgacttgccatgatccagcctgaggcatgtaaggctggttgatatctatcactactgatggctggattcacaatgaagcatcatagtattagtacatgatatagttggcaatgggccgaactacaaaaacgacttgccatgatccactgtgttgagaatgccatcttgaaccaacacatccccaatgttactttggggctacatatttctatctgtggtaccagtatgaaagtagtcaatgtttgcataatgccactatattttctttgctgtgtggtaggctataactgcactaaatgatctactataattactgttctagcatttacttaaaattcatgttgttgcatttcaggtgctgcaaaaaagaccaaagggaaggtagatactgacaatattgatgtttcagatgggctggacacactcgcaaatcttgcaattcttggtgaaggtgaatctctcccttcccagccaaccacaaggcatccccgccatcgccctggctgctcatgcatagtctgcatacaaccacccagcggaaagggaccaaagcacaaacagacgtgcacttgcaacgtctgtatgacagtgcgacgccgtttcaggacgcttatgatgcggcgcgagaagcgccagcagtcagagaaggactctggggtgcctcgcaaaagagagccaggtcaatccagcgagccagttccacaatctggctctggtgctcatccaaccagtactagctctcctcaccagagagcagataccaacggcgaaggtcctgaagacatgtccattgacaacaagaggacctcctctcctgtcaagaaccagattgacctgaacagtcagcctgagcgggaagacgagcagtcaccgaaatccgatgcgacgagactcctcagggacaacccaacctagggctgcctgcccaaaagggaagtcatactggcgatggtagataaccgatgaaaaagataatgtctataccaatggagaaatgcggcgggcggatttgtagtgtagctctgtagatgttacctttctataccaaagatctagtttatcctgtggcgggagagatccagttttaatgttatcataccatagaaccaggcgtcggtgttgtagtagaacccgttgctgtttgcctagggcccgttgctttaccctgtatgtagtgatgtagcgtgagagcggcgcccttcggcagcatgtacctctgggcaaatttatttcatgtaccggatcatccatccctgtgcaaggagaggatttactatgttgcttaccggggtggtttccctttggcattatagcatgcattcatatctatagtgtgatctgacgtgataatgtttaccatcaaagtttacccgtactcaaatcacggaattctgacgtgatatgtatagtgtcggtgtattccgttcatatgatatcatctcatcctctctttcctccacgctctagactgaggattgcttctcttagctgcagtcttacagaatcatcggcttttgttggatacatcaatttattgcattttatgttggaatctattttttaaaacttattcatcggattattgaaaaaattgtttactacatacttcgaataaagatctcaaaatactttactctctgcatgttacaccagtttgtttgagatgtttgttaggtttatttttaaaatttattcctatagtcaaatcgtcaataatcaaaatgaaaccgggcctctaaacatacgctcggttctttgttacagttgtggctaaccgtaccttttatcaataccaccacatatgacatgctaaaagctcatattcttaactaattttgtcaaagttgtggttaacattttgataccgacgcttctcgtgatatgtacaaccaccttgtgtaagctactagtaaacaaccaaacaaatacattgaatatttggtgcatttgtgaagccttggcagttcaccttttatgtaagacgcacacgaaacaacatacacaccctcgagtgtaacctatagcagcacatctaagaaacaggttcatatgctacacatgaacacagaagaacagaacatgtgccatgaacaatctcagtaagcaaaggctaattaatatttaatacacaagaccccaatagaaattgggttgttcttttcttcactaatctgtcgcccctaatatgaacagtcttgtcttttgtgtactatcactatcatccttgaacaaaaccatttcttacacaactgatagttgaaggaagaaattaaaaaaaaaaagggagcccaaaagaagaaaaaaaaggccaaaactacaaaacaaaacaaaaaagcaagctcttgcttgctgctattgctgctctgcatcgtcagtagacgctgcctctgctgatcatttcgttgtagtgcttgagcgactcctgccgctgcagccgcatctccatgttgaacttgttgatgaacgcctccaccctccggttcagctcgtcctgccccagcgacggctcccgccgcactttcttccctcctcctcctcctccggcggcctcgttgaacgtctccgccttccgcatcgccgtcgccggcggtggcgcgtcctcgccacctccgctgccggactggcggcggccgggccgggtctcccaggtgtccgacttcttgagatgccgcgccagcggcggcgcccgcccctccgtgatggccttccacgtgctctccagcgtctgctccttccgcggccgcgacacccccagcgccctgctgctccctgcaaaacccaatcccgcgagctcaatcaatggcgaattggcgaaagaaccgagacgggattagaggagaattcctgatttgttgtttaccttctgggctcgccttgaccggcttccggccgaatcgagtggacaccagtggcttctccctcgagttcgtcaggtccgcgaagggggacaacgcctcatgctctgcctccgcctcggcggtgctcctccgccgtggcgtccatgccgacctcgagatcgtgaagttctcctccgcttcctccgcctccggcgccgtcttcaccacctccggcaccgtcacctccacgggaatgggctcgggagccatcgcctccggcaccggcacaacgggcacctccatcggcatcgtcaccgccggcgcgggcaccgccaccaccgggactggaaccggaaccggagccggccgcaccaacgacgcgtcggcggaggcggcctgcgggcggttaggctggaaccgcgacgacgccgcgatggacaggatgatggcgttgatgacgaggtacaggtacggcggcgtcagccacgtggccgccgccgcctgcgcccgcggcagctcgtccgccacgaaccccgccgcagccggcgccgccatcctcaccccgaacgccaccagcaccgccgccgccgccgccgtcgccgccttcaccgtccgcgcgtaccccatccctcaaccccaccaccgccgtcgccgccgcctccttctttacgtcttcgcgcggcgaaagcggaaacggcaatcggaagcggaagcgaaggcgaagcagagcaaagcgatatgcgtgcgagtcacgaggtggggtgcagcgcagcggccaacttatagcgggcacggctcgctcggggagacgcgtgagccgtcggatccgggcgcttggacggtgggagatccgtgtggcttagcgtgcaccgctttcttcttccgcaccggaacggtctagatagagccagcctgtgcggtgcggtgcggtccgtgtgagtgaccgcgcggtgtttggccggtggtggcgacatgtggacgtcacacacacgtcgtaatcaccgcgccccccgacttaatcccctaattagcaggggctaatgcactaaaaaattgtaaaaatgtaatgcggccgcttcgagatgccacgtgagatgatcggacggccaggattggaaggctgtgggggagtacgggccacgtgggggagttttacatgtgtgtgtgagaaatgatgggagaggagggggggggcatcatgcggcgtcgcaaagctcaaacggtcaaaaaaagaaccgttggatgcgaaccgcgcggcgacggtgggcccccacgtcctcctgccacgtaggccggcctcgggacgccgccgctccggcttttgtctggtgctgagctggaccgctccggggcgccacgtcagctgacatcatcaccgttgggttagctcgtctcccgcgccgcgacccgaacaaacaagaacgaaacgacacacacggaaaaaaaaaagaaagaagaaacggcaacacggtcacgtatcgatacgcatttttccccctctctttcacatcgcgacgtgtacgggaacgagaccgagagacgagcatgcatgtgaagggcacgcacagcagggtgcaggcctgcagggtgcagcgtgcacgtgtacacgaccacgtcccgcagctggtacggccgcacgtcgacacacgccgccacacgtaatgcggctccggcgacggcatacggcaaatcgacttgtagtactatgtgctgccgatagtagtattatatatctgctggtgtgcacactgcgctttggcctaattacacggcagttttgttgaactggtcgtgtgccctggccggtcaagaattaggtgagggatatctgattagtctctgtgtttttcagtagcctgtagctttggcctgcctgcctgttcatcggcaaccacacaacacgcgtagcaaatgttcgtgtgctcgcagtcgcatggtccctggtcgtcatatagctagggagatcgatcgtgagcacacactaattcgtagtgtagtaggcagcattatagcacgcaactgcacgtctctctagtagcttctatacatgcacagttgcacaccacacaaacaaaagcggtttcatggatgcatattgccggccactaccactaatctcggcatcattagttacatgactcataattaattcctagcttggtggttattggatatcggttaagtaggtggcgatgggcgacggatcactgcatatctcgatcgaggttaatatgggcgattcgacgacgggtgcacgtagcagcacaggtgttgagcgttttgactgacgtgcggtggacggcacgcgcgcgcggtgattttcatacgagggtgtgtagtgctcctacgtactaccggagtactccgtaattgttaatttccaccgtgcgcgcgtgtccatgtacgacgcactacgtggcccgatcggtcacgttctacctacgtcgcgcaatcgtgtctccgtcttaggcaaacatctcagccggtgatcgacgaactgtccccgaaatatggtaaacaactactccctgcatacgacgttgcctgtaaccatcccttcttttatcaaggcagtcagtactcagtacacaacctcagtacataagtatttttttactgtagcttaattgaacatagtgtgttaatccctcgttaacgagctatctatccacgagacgactctgtcccagatgtatatataaaatatataatatattactttctccgtcccataatataaatgatttttactttttgtttgcactgttcaaccattcgtcttattcaaaaaatttgaaattattatttattttatttgtaacttactttattatcaaaaagtatcttaagcataacttttttgtttttttatatctacacaattttttttaaataagacgagtggttaaacagtacaagtaaaaaatttaaatacattatattatggaacaaagagagtagtttctaatcagggtaagctaatcttagctgctacctagccagcggccggcccgtgtacatgttggacccggcggatcccggtgacagcgacggttcatccaaagctgccaaccccgagcccgcgaggcgcgcggctgcgacgtcgtacggcggcctcgcgagccggcgaaacgtcgccgcggcatatcatggcgcgccaccaccacgcgttgcttcgcgagacgtttccttcccgtacgcaaactcccgtgtctcccaaggcgtgggcgtgcatgtggtgcaacacggccgcacgaacgatttggagatccagagtacaagaccgtttcggccgagcgagcgcgcgcgctccgcctcgcaaatgagcctaacttttatttttttcaaccagaccgaacttttgtaagtatacttccaactcttcatgtcctctcgacgaatattattggcttagctataggctctagcttgcctacttgtcgcaacctcggtggtgtaccaaaggagaggttcaaaggttcaagtactagcagtatgtactgatccggccatctggtctaaaatgatcaacttttgcttttaaatctacatatagactatgctcagattcaaaatcagtagttgattaaataggtggcataaatgaccggagcatgtatatgtacgttgttacgagcatcaatcgtccatcaaccatataaatatctgagcatgtatgtattagagggtatgacatgtgtgtctagtgatatgtttgaatgtgtgtcttccgtgtgataaaatttgtgtatttttattatgattttagtgaggtagggatttattgatttctgtttctttatttaagtatgtacgaagtattacgaggcatactcgcatatgcaagaatataatgtggtgtacgtgtgtgtggtgattatgtgcatatgcggttacatgattaaaaaaatcccctgaaattcactagccaaaagccgtacacccagctcgatcgtacggcctctaaaaattgctgcgagagggggcggcagatcagatcctgccgcccggctaggagcaagtacgtcggccggttggcacttggcaggagggccttttttggaggcgacgtgtagacacgctgttggtgcaggttggtatccttgttcaccgccatttgtagaaaatttcgaggagcgtgcagctgtatgcgctgtgcagtgtgcgccaccacacacgcgagaatctatcgatctcccgatttcacgcggccttacctactatactcatctgcaccttgtcacttctgccatgcatgtgtgcgtccagtagtacgagtatcagcaaccggccatgggggacaaattcaactaaccatgtgaaggtgatcgagattaaagtgcaactaatagattgttggatgtatcacgatgcagattaagatatactaagattcaggggctattcaaatcacagtcaaaataaacattaccaaatttcagaaaaaaaaacattaccaaatttcagcaccgcaaaaaatttgataagttagcaatactaccaagttttggtaggattccttatatatttaccaaagtctggtaaaaaaatttaaatgtatgcacatctttaacaacttaaaaaaagtatagtttgaaataacattaatatgaacaatctcttatttttgtgtggataggacacgagaatcagttagttaagtgaatagagcaaaactgcaaggtcaatatgagtagagagtcagattaattatcagtgatgccgagaagatctatcttacgtatgaattaggtggtgttcttttctcctgaaaatgaagatgaaaattaagttttttacacaaaacgaggtggtattaacgtatgattaattgagttttaattattacaaatttgaaaaaaatatgatattttagagcaactttcatatagaaagttttcgtatgaaatacaccgtttagcaatttgaaaaacgtgacacgaaaatctgattcatccaactcttgttggagaaaagaacgggcctaacctcactagtactcacgcatttgatgcaacgggatcatcggtgcacactgcacgtagctgaaggccataggagagaggcgacggtggagacaagataaaaagaaggatagcaacacatggagtcagggtcgtccctgcaacggacgccatatatacacatctgtcatggatatattcgtgctgcaggtcaaagctaaattaatgccaggtgccgttcatgtatgttaatgttatccttctctatctgcttcacatgcatgcaaagatatatcctgcacattgaccatggaaaaagggtacataccaattgatgttacgtaagtaattaatcctgatcaatctttttatccaatgcttaattagatccttaatctcactgataatttcgtcgccctcgtacagtcgtaatgtcccctctgaggccctgacttcctggcagcctggcctcgcctcgatcgccggccggcgagccaaacgctgcccgacacctgcatattctgaagcttccggccggaggcgccggccagcccaacgaccaacccaggtaagtttctcgcgtcgtcgacgtcgcaaacgaaatttccactcatccacagctgcaaacgtagcgccgacgatcgatcgatacatctcccatccatcgccagagtgattgcatcgacagttcaatccaataatatgggcatatttgacacggttctagttttagttttatctctcttctagagccagaatccaactaattaacggcttcagcttaaaaaaaagagtgaagttagctaaaatattcttacgaaatctccacccagaaaaggaacgaggttggctaaaatgtttctataaaataaactaaacatgttgagttggttttagattgttttacagttccactcaaaacctaactactgaagttaaatttagaagttagaatcgtaccgaacaagccctgagcacgatcagttagctgttactagtagaagaatacgtgtttggtcaacaacgcttcgacacacagtagaccgtgtcaccgtgctagctgggagacatgtacatgcatatatacgacgagattttagacagcgagatcaatatacggacagtgaaacgaggtctcgttgctagctctccgtgtttgttggcttgcaccgactgtgcgcgtgttgcaatcgggcgcactgccgcacatatatgaccagtagtgcatatatatacatacgtataacgtatatatatacgctgttcgcgaaaccgcgtttctgtttcaatgtgcgtctgtgtactgtacaggggtggtatgtacaggaaaagaaccatcgtgtcaacacgcgcaaggttgcactgggtggaggatgtggggatacgtacagtatgcgtgtactcgagcaattagtgagaagagaattaatgggcacatatatatgggtcggtgacaaggaccggtccggatttggataaggtgagtgcggtttagtggcggcacctcggaccatcaaatccataccaacagtttcatgcttgatgcttaacacacaaagaacattatctaaggataggaagcaacgacgaactgaaaaagaatatagttactttccccatatttataacccagtatttttctggcaaaatttctcatcttttgttctataaacttgcagtctcttctatgactacatcggatagaagagactgcaagtttagcagttggaaccatttttcatcattggatcaaagcaatcaacggccgaaacaaatgctacagttgttttaaacagtaattgctacagtacctgctacagtcatgtatgaacagtatcaaggaaagatctaggacgttgatttataatccaatggtgtacttaggactgcttaagttgcagtggctatagccactgcatatgatcccaatcccgtacgtatagtacctgaattagttagataattttctaaaattctgcgtatgtttgttctctctctctctctcttttagaaccggttcaccgccacttgtagaaaacttgggggcaccgtgccggctgctctgttttggaaactggaaaaaacagagacaggagaatccgagaatccatctccagatttcacgcgacctacactacctacccagctatcctgcccatgaatagttttgtcacttccgggattatgaaatggccggctcgctagggacaaaacgcccatgtgaaaggttagaaactgagcagatcagcagaatcgtgagatggagcaagcagctgcatgctgatcagaaattcagcatagtataaacagtacatcactccgttccagattcattttagaaaacacgtatgaatgtttatattaattttggaatgggttagtaaatagtactactactactatattgcaagaacaattagttaagctagctaggatgatacgacgatcgatgatgacgacggtggaaaacagtggaggatccaatcacaatcacgcatcatatatatcgtacattttgattgattgatttatttttttttagaaaaaatgatagccgtattaggatttgtctggcctcaagaaaatttgggcttcgtcactagtggaaacaagcaagctttggcaagtatagctagatactatatgtacgtacacgtttcgtcgatctgtatacgtgtacgtacgtgtgtgtatatcgttcggtatttgtagctgctgcccgttttaattatcggcttgcaacttttgacgtaagaattccgatcgatccgcttgcacatggataggcatagccttcattcctagctatatatagcttgctaggcaacaataattttagaatgctgatcacatcgatcgatctcgagatatatatatatatatatatatatatatatatatatatatatatatatatatatatatatatatatatacacacacacacacacacacacacacatatacacacagagtagctttgcacgtacgtatatgacgtgcatgcggctaagctcgctcacacgtgtacacgttatacaatggtgtgatcatgcagataaaggtagtccagattcattaacccctccgtgatggctttgtagatatggtaaaggaggtctggtctagtgtacatgagggtaatactcatatggagcgatggcaggcgaagattcgccaattaagacagcattttgagaggatgggctaaacatacacgtggtatgtataaaaaagaaaaaaaaagggagattttggataggttggatttgttggataaaaagtctaaatctgttcttctaactcaggaggaaattgattttagatggttttgtaggaatagattatctactcctacgagagaagaagaaattaagtggtatcaaagggctaaaactaaggatattttggagggtgattcaaatacaaagtatttttatttggttgctaacggcaaacatacaaaaaccagaatttttcaacttcaagatggggatcaattgataaatggtgatgcaaatctaaaatcgcatattaccacttattataaaggcctctttggtcctcctgatgattctgatctccagtttgatgaaaataaatttgtggacatcccacaagtatctcaattagagaatgaagttttaatacaagaattcactgaaaaggaaattaaagaggctattttctaaatggaacataataaagctccggctcctaatggatttcctgctgagttttatcaggtcttttgggatgtcattaaggatgatatgttggatcttttcagagattttcataatggtactttgcctttattctcccttaactttggtactattattcttttgcctaagtgtgctgaggccatgaaaattcaacaatataggcctatctgcttacttaatgttagttttaagatctttaccaaagttgctacgaatagaataatgagtgttgctcaaaaggtgattagccctactcaaactgcttttatacctgggagaaatattatggaaggtgttgttattttgcatgaaactatgcatgaattacatcgcaaaaataaaagtgtgatttttaagatcgattttgaaaaagcctatgacaaggttaaatggtcttttgtacaacagacgctcagaatgaaaggtttctctcctaaatgatgtgagtggataacttcttttattcaagggggacatgttggtattagagtaaatgatcagaccggtaataattttcaaacttacaaaggtctaaggcaaggagatcctttatctccaattctttttaatatagtagcagatatgcttactgtcacgccctgaagttttcccccttttgcttgctttaaaaattggttaaataaattgcccgaagaaattatcttaattaacctagagctgaattccttaattaataaatgcaaataataatcggaatcggcatgtggaatttttcttggattctacatgtcaaaatatgctaacaggatttttagtggaattttcagagccttggaaataattttaaccaattaaaaatgagcatgtgcaatatataaatcccaggaaaatcctttttctttttttttcttttccctccttttcctttgttgggccgtcggcccatccctctcccgctcggccttccccttgtgggccggcccgttctccttccccctctctccgggacgctgacaggtggggcccacctgtcaggtcgtccccttcctccagccacccgcctccgacggcaaccgccgccgaatccgccactccgccgcctcctccgctcttcccgcgcccacgccgcgccgctcccgcgtcctccccacgtcgccgcctcttcccccgcatctcccggcccgcgcgcgcgctcgagagggcgggattcgatttcgaatcccacccctctctctctctctcctccccacgtcgccggccaaatcgggagggttcccggccacgtcctcccctccctcgcccataaaagcactctcccgagccccctctttcgttttccctcattcgccgcgctctcccgtgcctcctatcgcgcttgcgccgcttgttgctagcgccgccgcttgccgtcgccttcggccgcgtgccactgccgctagggtcgccgccgcgccaacccgccaccgccgttagcttcgccgccgcgagagctacctcggccgccgcttcgttgccgcgaatcaccgccggagctccgatttccccgcgtcgccggtgtgctcgccattgtttccatctccggccggccattttggtcgtcgcggtcgctttctccatccctaacgcctctccatcttctcctagggtgtcgccgccgcccgtccgtgcctccgcatcaccggtcgtcgccgccgctttcttccttcgcgccggccgccgtgctcgaaggtgaggaatcccctctcctccttcctttcctctctctcccatgagcaccgccgccctccgcgcgtgcgccgtcgtcttcggccgccgccgccgccttcgcgccggccgccgccgtctcccgcgccgccggtcaccgccggtgaccgcgcgtgccgccgccgccgccccatggctggccggccggcttgagccgtgccgagcatgccgccgccacctccctcccttgtgccgctgccaatggggcccacgtgccggcgcccccttcctctctcttgaaccgctgacaagcggggcccgcctgtcggcgcccgcccccccttctgctgacgtcagccctgggctttattgcgcaataaattgattaaggacttttctttattagtaaaaacacagtttatcttctaaaattcataagtaattcatccgagctccgtttaagtccattcaagtctcagtaaatcaagaaaaatgcaaagaatccattaaaaatggttttgtttcctgtttcagtagtcttatagcatgttttgcttgtgtgctttgtttgtcgcgtagatttcggccgtttcgtcgatccgcggtttctcgaagatgttgctgaggtctcgtcagtgcgagagcaaggcaagtcatgcaatacgtttgatcatattgtacccaatttacaaatatcccgcatttttattaaatgttgcatccttttgcaatgtcatgtgggatgggtcctaatactcagctatatattgtttaccatatgccgttgataacttgggtatcaaaatgactagatgttggtttaggaaatgcttagccatgcttagttcaactagcacacacacggggatcacattattacatagactttgactatgagcatagctttggtttggtgccaccgtaatggtgttaggtaattaaaatacactgaatggtgggctgtgggtgcatggttttgctggtcgcacccatggcaattaaggaccggttcacgggaaaccctgggagacttaccgtgcttaccacaagcgggagtgggtaactgcttgatctgaagtatagctcgaccctttcctaggcaccgggggcgagggtgggcgtgatggagttgggtcggccggggtgtccggttgtccagctgccgaattcaccgcggcgcaagaggggaccgcccactgccttttgaggggtgggggtgaaaccttagcgtggtgtggatggttaggggagggttatgtggagggtcttgtcacgatttccccctttgcagtatcatggtgatacttcggggcatggcgacatgtgtggaatcgtgtcttgtgggtacagttgtacacctctggccagagtaaaactattcgaatagccgtgcccgcggttatgggcgatcaaccagattcaccgtgattagtctcacccctagtttagcttaatgaactggtgtagttcaggtggttggttgggcctgttgcaacgtggtgtagcgttggacagtgataggttaatattgattaattactacagctgttttactactttcaactactgctttgaaatgcctgctttatgcaaaagaacccctagcttcctttggttatatcctgcatcatacctcctcttccggtatgacttgctgagtacagtgggtagtactcagtcttgctctcttttcccccacaccagagctgaagatcttcctagttggagctgttttgtcaaagttggtttcgtcgctgccgtcaaggattgcctgtggagtggagtcgctcgctgctgaagtcaagcttcccggtttagctcgcttttatctttcccgctgcatttgtaatcttttctatttttgtaagacgtggatctgtatgtcaacaattgtcgtttgtgtaccctggctggtcttggacagggatttaatgcacattcagcttagaaattctggtttgagaatttctgggcgtgacacttactttattaattaagagggctaaaaatgctggttcattgaatggggtagtccctcacctagtggatgatggtttatctattttacagtatgcagatgataccatcatttttttggaacatgacttacaacaagcgaagaatcttaaattgattttatatgtgtttgaaaagttgtctgacttgaaaataaattttcataagagtgaattattttgttttggtcaggcaaaagaatattatgatgagtattctaacatctttggttataagtttggctctctccctgttaaatatcttggtataccaatgcatgttagaaaactgaataatagagattggaaaatgattgagaaaataattgagaaaaaacttagtagttggaaaggaaaacatttatctgttgggggtagactggttttgattaactatgtactttcaagtttagttatgtttatgatatctttttttgagataccaaaaggggttcttcaaaaaattgattattatagatcacggttcttttagcaaggggatgaccataaaaaaagtatagacttactagatgggatatcatttgtcaacctaaggatcagggaggtttaggggttcataacttggaaatacaaaacaagtgtctcttgagtaagtggttgtttaagttgatttaacgaggaaggtgtgtggcaaaatctattaaagagaaagtatctctacaatcagtctataacccaagttaataagaaacagggcgattcttatttttggtcaggtctcatgaaggtcaaagataccttcttagatatgggttcttagactgtaaataatgggaaacaaataaggttctgggaagataaatggctaggaaacctggcttttaaagacaaatatccatctttatactctattgtctgaaggaaaagttctactattgctaatgttatgagatctgttccactcagtgtttcctttaggagatcattagttggtcagaatcttgcatattggcatgaattgtgtgcttctattgtacatattcaattgaatcaatcccctgatagctttagatggaattatcatcagaatggaatattttctgttaggtcgatgtatctagctttaattaataatggttatattgagagaaacaagattatttggaagcttaagatgccacttaagattaagatttttgtgtggtacttgcttaaaggggttgtcctaaccaagaataatttggcaagacgaaattggaatggtagtttaagatgtttttgtatgaaaaatgagactattcatcatctttttatagagtgtcattatgcaaaatttgtttggagagcagtacagttctctcttggtttataccttcctactaccatatctaatatgtttgatggttggctcttgggggtagacaagaagaagagtaaactcatacttgtaggagcttctgccatatgttgtgctctgtggttgactaggaataatatggtttttgacaaatcactatctatctcatatatgcaggtgattttcagggcaacatattggttccgattttgggcacagttgcaaatgtgtgaagatgatcgagagcttatgaaggttgcatgtcgtaggcttgagacaacggtcatgcaactccttgcaaactatggatggagattcacaaatagacttgaataaatatgctctccttatcttagtttgatcttttattttgttgggtgtgtttaattcatttgaactacactcagtgtttgggtgttacttttataataattggctgtagctctgatgagcaaaggccgggatgttttattccattataaaaaaaaattaacccctcctacgttaagtgttttttggaacggaggtagtatgtcgtgcgtacacaagtacaaaatattaggatgtgatgtttaaatttgttgcattaaaatgcattatgttataatacaaggttagtttattttggaatagaatgagtatatcgcagcgtgccattatatcgatcatatcgaaattgtataaagacggagtcaaggataactggataaggtgcagtgctccatatcgttctattgacttagctttgttgcgggtgaaaaacaaaagggaaaaaaaaatcaacgcccatcttatatgtcagacgtgtacactgcaagttacacttatcgcattgagccattgaccgtgaaaaatatataccagcaaccgcaggtaaaatagttggttagttaggacgacaaagtgaccgtttcaacgtcagcaaaccaaaagtaaagagtgtttatccgatacaatctcaaaaagttttttcttctgaatcttatcgacagtttgactgtcactcgaattgtctcccagctgcatatgctgcttataacatcctggccggccgcctcacgtacgtcgccggccggcaagccaagcgccgcccgacacctgcatgcacgacgacctagcctctgcgtccaaccggaaatcgccgcgattcggccgccagcgacaggcacctggccatgcattagccggccgacgcaattgcgcgtcgtacgtcgtcgtcgttgcatcgcgacccaggcagagaggaaagtcaggagattcagacgttcagagctaatagcatgcagcagcagatgaatctcgacgactacctgctgagagtgttggtcggatcaagatcgagcatgcaaagtatttcaacacggcagagtggcaaacagacagttgggacgatgtaacctactgcagctagcttggaagcttctgccgacggaggatgtaatatgttcagcaattaatgggacacaatacgtactacatgtcgattctagcgtgttctcgtgatcatgtgctagcttaggttagcttgacactgctcgttaagtttggctacgattaatgccactgatgcaaatgctccctgtcgtcatatatatatatatatatatgctggtgattaatttctagccgttcaccgatcagctagccgcctagccgtcatgtcaacacggctgtgcagatgggcacggtcgtctcgcggatgtaacccatggtgtattgtacatgggagagatcgatatacatcgagctatagctagcgagaggccggccggcaggtcacacgtaaacgtcgtcggcgacaggagtgggatggacagagatatgctatatctgtcttttaatatatcttttaatatatggtttcattaactttttctaataaacttttgatcatccatcttatttaaacttttaataaaactatgaaaaccttttaagtcgtgcttaaaaaacataaatcaagttacaataaaaataaataatcattacatataattttttaattaagaaaatggttaaacgtgcctcaaacaatcaatgatatcatacaccaatacttgaggttatattcaccgggatttaatttggataggcttatctagtggcacgcgccagcgagcctggactgtcaaatcaaggaggattgcgtactaatcatgtaactaaaacgggaaaacactgccaatactcaatagggacatggccggcatgctgcccattccgaacttgatcgagcattaaactagtagcaatttagcatgacatggtactcgtctacacgtgtctggccactgtatttagtacagtattcggtcttctcttcagacactgcactttgcgaaaccgtaagcacgaacagggcacttcgttttgaagaaactgcaccgggtttgtttcgagattagtgcacaagatcaacggcagagggggtctgcttcagttgcggtttaactcacgatctgggctgatgctacggcccactttgcttttgcgtgaggcccatatatccggcccgtgggtccacgcggtgtggatttcggcccaatagcccataaccacctcccttactcctcagcccggttgtccccagatccccctcttgtcaccgaggcggcgagcggagcgaagcgccggtggccggcggcgcagcgacccgcggaggagcgaggcggacgtgcggcggcgcatcgagaggagcaggtggctgcggaggcgcgaccggcatagggagccccgctggagaggggtcagcggcgcgggtgcgtgtcatccgtcggccgcgtctccatctcggatcgccggagagggaggaggggtgggggtggtacaggtgcgttctttgattcccctgcggtgagatgagctagcctgccatggattcgctgtgctgttcctacttagctcggtgatcttcgttgtaagcgtggtcaaatttgactttacaattttacattatgtgtgctgcttctagtctcgcgccgcctctaagcacattctttttccccctttctttatacttctgacccgtcgagtagaacttttttgacatcaatcgtgcttgcattctactactagaatgttagttcttgaagagagataacagattgtgcatttgttcattccatttcttttgttttttcattccatttctttttttgacaaggaggagagagacgggcacctaggagaagcttcaccggtttctatcaagtaagcttgttgtatgagtgaggttacagaacacaatgtccagcaatagcgggggtagcgcgaaggagaaagatcctgaaaatgctccggagcttgtggcactgccgttggtccggaccctgaggcctgttcatgcagtgattgatcctgccgctgacccgagatcagcacagctgtcttggccgggccatgtagtcctcctgcctccatatgcaacatggcctcatcatgtgccgaccctgccaccagcggtgaatcctgcaaatccacaacaaaacgtggtactgcgattttatagttgcctatgtgactttcttgatctaggtgttgagggatatgttcatatatcgcctccttcttattgattgtgctgtgctgcaatttgtgattggcaggatgtggcggcggctgatgttagtcctgacgttggttgttgtgatgagaagatgttgccaaaggtagatatgctgtttgatggcgaaaaagaggcatacgatttctacaatgcgtatgcagagatggtgggcttctttgtccggagatcaacactctggacaacgtcaaagaacataatcactaggagaacttttgtctgctcgagagaaggttttcgggagaagaagaggggcaccaaagaagcaaagtgcccgcggcctgaaacaagaattgggtgccctgcgagcatgaccattagacttaataccaacggcaagtaccgtttgacagagtttgtaccaaaccataaccatcaacttgcaacagcatctacaatgcatatgctgaaggctaagaaaatcaggcttaaagcacgggctgcgagagaaaatctggttgatgatactgtgaggacgccagaatttgggagtgaagatgaggcatatgaattttacagcatgtatgctgggaaaattggtttcaatgtgagaagggcaagcatgactatgaatgctgaaaatgtcatcacaagaaggatgtttgtttgttcaaaagaaggtttccgtgagaagaaaagaggggcaaaaagagtaaagaagcctcgcccagagacccgaactggttgtccagcgtgtatggtcattagacttacatctaatggcaaatatcatgtaacagaatttgttaccttccataatcaccagcttggtgcaacagtaccttctgatcttgtggcaacatcacaaagtacagaaactggtcaagatgatggactggatttggttgatggttcagctgatgctaatatccacaggcaaaatcttataattggaaatatcatggcaacatctctagaaggtagaagtaacaaaagattcaagtgtacaaaggttcctcactatggtgatgtaggtgctactctagagtacctgcaaaagatgcaacatgataacccttcattcttctttgcagtaaaatctgatgatgatgggaacttgacaaactttctatggtcagattcaaagtctatcatggattttgtccactttggtgatgtggtatgtcttgattcaacgtatgcattgcagggctatggtaggccacttgctttatttacgggtgtgaatcatcacaagcaaactgttatctttgctgctgcattgctttatgacgaaagtgtggaggctttcagatggttgtttgatacttttaagatggcaatgaatggaactcagcccaaaacattgttaactgatagatctgatgcaataagtgaaggtgttgcagcaagttggcctgcgacagcccatcgttattgtgtctggcaaatttaccaaaacgctcttcagcagttgagtcaagcatttcatgggtcaaaaaccttagattactgcttccagaaatgcctatttgactctgaagatgagcctgagtttttgacagcatggagagaaatgttggaaaagtatgacctagaagataatcaatggctagcagatttgttctctcttaaggagaaatgggcactaccatatggccgcgaggcattttgtgctgatatgaaaagtgtccagcagaaggagagcttgggcactgagcttaagaaacacttatccctagaatttgaccttttgagtttcttcaagcagtttgaaagagtattgtgtgaccgccgatcaacagaattgcaggctgatgtggatgctagtcagagtacaaagaagccaccacctatgcgagtgttaaggcaagcttccaatatatatacacctgctgcctttaaaatgttcgagagggagtttgagttatacatggattgcatgttatacaactgtggtgagatgggcacaatttctgagtatagggtagtcattgaggacaatccaaaagatcattttgttaaatttgattcgcttaattccatggtaaactgtagctgtaaagggtttgaattcgtaggcattccatgccgccatatgctaaaggtacttgacaccaggaatatcaaggaccttcctcctcaatacttcttgaaaaggtggagaaaggatgctaaatcaggatctccaaactgtagttattcattcccacttgatggtgatcctcagttggttcaaacaaaacgttataacttgctgtgtcggatgttcagcatagcagcagctagggctgcaacctctatagaaacttttgcatatatggaaaaccaatcaagcatatttatggaccaagtagaacaagctcttcaaacaaggcccccagacatcgctgccatgattggggctcattgtgatcaaacacaaaatccaattgacaatatcgtcgcaggaggtctacacagccatactaatttcatcaatggccctgctgatggtacttattatattattcttttaccattaaaaactatattgctggcttgctgccatagatcttattaatgatcttatttgcatgcaggttccctaacctttccatttacattgggtgctggtgtgttggattaccgctagatagtgactaatttcttacaagtactagccacaaggagctgcgaattctgtacagtgatcttttcgtggaaatgcattttatatatcaccagaaaattccaggttatgtccctctgctgacccacttcctcatccaggtgattacatggtaatattgtgcatcttgctggctggcaatttgacaatgcttacacattataccgtagagctgagaatagtgatggctagcccatccattgtacatgtaattttcagataaagtttagagaatgatgaaaagtttccatcggtgtatttactgaaacaatattagaaaatccatttggtcacttattagttgttattactaactaatagtcatttcaactcaacaacaaaagtctgtagcctttaagttgtctcctgcagtcattcctgtttagaggaagttggcaatctatcttctgtcagtgtggtggaatgtcgagtgatgaatttggggttcctcaagtgagaagaattgctttggtgactgatgggctccttactagtgatacgtatggtgcagcgaagccggataggatgtaacagtttcaattttgatgtacatatgatgtcgaaccagtattttgatcacctagagtaaactgtttgattatgcttactctctctttgtgtgtgatgtcctcaaagaattttgagaaagatgtcaggatgcatggagcaaacgagcaaataatcgtgctcgtgcaggtgaaatattgtcgaagtttctctctcccttaatcagaagtttgcaacaaaagaaggctttgaaatcaaataccggtaaaaaaattatcgaaatactcctacctgcttagattctgtgagatttctacgttgtgtaaacagccccaaaattggagacctttgttctgttggatttttccaataggctttctgcacgattgtactgagttaacaatttaacatgctcgcacgggaaataattctccgtttctagcttaaagtgaatcgttcatcgtgaaattcctacattcgaaatgaaaattttaaattcgttttgagtgtgttttgattttcttttctttaaagggagggcgctttgattttcactgctgctcggtacttcgggtgtgttcttttctctcgtacccaacatccagtcacttattttccatgtgcacgtttttcaaatttataattaatatgtttttaaattatataaaatagttgcttcaaaaatcatattaatttatttttaattttttaattaatacttaattaattatgtattaatttgtagctccgtttccgagtagaaagggttctgaaaagttccaaccctctagaacacagctcagcctcatcttttcgcttctacttatatgagtaaatatatttacaagctaaaatttgaatttccaaccttaaatttggagttgattttgaagtttttcatcttagtttatttttcattctttgttttagatcactaaaaacacatatataaaagttttattcccaagttattttaagtttgcaaatatgccctggtcgttgctagcaagaacccttttgaaaacataaaaacgattttaacagtaaccctcggatcttccgtggacggcccagatcgacacgggtgggggatcgagccccccaccttgaagccctcccaactcatatttttgccaaaacctccccaaaccctagacacccgccgccgcggcccatcaactccggcgagctccacccgccgccctccaccctcctccctccctccgtctccgtctctccccggatctcctcccgcggccggaagggatccaccggccaccggcggcggggggatgaagaacctaaaggtggttacccggatagcgcagaagcttcagctccagctcgacggggagaccgtggtagtctccgccgtcgacgccgagcgccgccgcgccttcttcgtctcctccgagaacttcctctactccgtcgacctccccgcccccacccaggtacggttcctctgctcaccaatttgttatactgcttgaaatcttcgttttattgtttgcctcgcaacgtagcaatagtagtaccacgctcagtacaagagggatacacatattatatggtgttaatttaccatgcgtatgattctcagattccagttttttgggtcaatacacccgtttatactgctaactaaatttgggcagaacactatgattttttttttttgtacaacgaaacaaacaaacacatcatcatcttcaatttgctatggtagcactgagcgtgtaccttctaacctaaatatttgatatttaggacaagatctttttcaaacttttaaaattccaaccatcaataatttctcaaattcttagtttaaaacaaaagtaatggtgtttgtagattttccttggaaagtacttcctgcttctgtttatatacgacgtcgtcatatataaatggaaggagagtaatatcataaacttgctatattttataaactttttctagtataaattttatggttggaattttgaaagtttgatcaaatcttgtcctaaacgtcaaatatttatggccgaagggagtatataatctgtttttttagtcgatatgattattaccttttcttttgctagtatttctgttttgctgattgcctattttgtctttcagcaatcactgcaatggagcgaaagtaccctagactctgatgcagaggaggttgttcttgaacctggagattacatagttgccatggattatctaatggagaaggagtctttgctgcttggttcatcaaccggttgtctattattgtataatgtggatgagaaaactactgaagttgtgggacgactggagggtggtgtgaagaccattgcttctagtcctgatggggcccttatttctgttacgaccgggtttggacaattgctcatcatgacaaacgattgggaagtgctgtttgagacttctctcgaccctcatgtaagtttttgtttacatgatctgactaaagatatgactaaaatgttctcattctacacatgcttgtttccagtgtgatcttacaggtgatatcaacagtcccaatggtcacatccaaagttctatttcttggcggggtgatggaaagttttttgctactcttggtgggcttgaagggagctctcagaaacttactatttgggaacgtgaatcaggaaatatacattcttcttcagataccaaggcttttataggagcatcacttgattggatgccaagtggagccaaggttgccactgcccatgaccggaagacagagggaaagtgccctctcattgtattctatgaaaagaatggcttagaaaggagccacttttccattgatgagccagcagaggctgtcatccaagctttaaaatggaactgcaattctgaactcttagctgctctagtctcttgtggccagtatgatgttatcaaagtatggtcctgcagtaacaatcactggtacttgaaacaagaactgcgatacacaaagaaagaaggggtgaggttctattgggatcaaacaaaaccaatgcatctcatctgctggacattaggtggtcaggttattacgcacaggtttgcttggactactgctgtcagtgagacttcaattgcgcttgttattgatggttcccatgtccttgtaactcctctcagtttgggtctcatgccaccccccatgtctttgttccatcttacatttccttgtgctgtgaatgaggtttcttttctatcctataactcgaaaaaccatattgctgcttatctttctaatggcagcttgtgtgtgtcggtacttccggtggcagatacttgggaagagtttgaaggcagtggcataagtgttgacccttgcttttctgagtcaacattgaataactatatgcacctgacttggattgatacgtgtaccttgatcggcatttgttgccgcgctgatgccttctcttcaacaccaatgaggtccagtgaagctagtagccttctagagaaaaatgactcgccatattttatcaatgagattgaacttgtatgttccgaggattctttgctaggttcagcctgttcatcaggttggcaggcaaaaatatcgaagaaaatgcctctgcaggctgcagttattggaatatctcaaaatccagcaaaagaaggttcagcctttattcagttaagtggaggaagggttgttgaatactgctcaaaagtgaatttgtttagaatgtctgccccggtacaagttagtgaaacaggttccgaccatacttttccaacatcatgcccttggatgactgctgttcaatgccatgaaaatggaatggttaggacacttctctttggacttgatgatagcagcaagttgcatgtgggcaaaaggttattaagcagtaactgtagcagcttcacattctattccagtgcttatggagcaaaagagcaggttgtgacccacttgcttgtgactactaagcaggatcttttattcatcgtggatatcagtgagattttacttaaaaatggcgaagtgacaaccgatagccatatcaggagtcatcctcgaggaaagcaaagcaaagagcatatcactgtatgggaaaagggggcaaagctgattggtgttctccatggtgatgaagcagctgtcataatgcaaaccacccgtggtaacttggagtgtatctaccccaggaagctggtccttgtttcaattgttcaggcactggttcagggacgttttagagatgcatttgacatggtaaggcgccatcggattgatttcaatatggttgttgactactgtggctggaaatcttttatgaagtcagcggcagattttgttaaacaagtcaataaccttagccacatcactgaatttgtttgttcaataaagaatgagaatgtcagcagcaaattgtatgagacctacatatcatttcctgatcactgtgcaacctctgtggctgatactgtaaatactcatggtctgttgtcagacaacaaagtcacatctgtactgatggcaattcgaaaagcccttgaggtgcaggtggaagaaagctcatcaagagaactctgcatactgactactttagcccgtagcgaacctcctctgttggaggaagcactgaatagaataaaagttatccgagaactggaacttcttggggttgatgatgccaggagaaagctctacccatctgctgaagagtccctgaagcacttgctatggttaaccgaaccagaagctgtttttaatgctgctttgggactgtatgatctgaatctttctgctatagtagctttaaattcccaaaaagatccaaaagagttccttccttttctcaagagtcttgaatgccttcctcctgctattatgaagtacacagttgatttaagactcggaagatatgaaagtgctctcaagaacattgtttctgctggcgacgagtatcatgaggactgtatgaaactcctcaacgctaaccctcaattgttccctttggggctccagttattcactgacccagataaaaggcatcaaattcttgaggcatggggtgatcaactttctgaagagaaatgctttgcagatgctgcaataacttatcaatgctgttcgtcgtatcagaaatctttgaaggcgtatcgtgattgtggggattggagaggtgtgttcactgttgcaggtcttctgaagtttaaaaaggaagaaattcttcaactagcacatgacctatgtgatgagttccaagcacttgggaaacctggagatgctgctaaaatagcactggagtattgctcagatgtcgatagaggtgttggttactttatcacggcaagagaatgggaagaagctcttcgggtagcttatatgcacagcaggcaagatctggttgatactgttagagatgcagctttggaatgttctgctttgctgatttctgagtatcaggaaggattgctaaaggtgggcaaatatctggcccgttatgttgctgtacggcagaggagactgtcacttgcagccaagctccagtctgaagaccgatttatggatgttgaagacgacagcatttcagaagtcagcactagcttcagcgaaatgagtgcatataccacaaggtgtgtcatctgccatttttatctgcgcatcctctctgacccaattttatcttctgtttttagttctttttttcactatttagttccaagtcctcctgctttaggatcaactgaaacttcaatcaatgttgagtaacattgttgaacccatacgaaattctaaatgctgctcgtgcaggtcaacaaaggaatctagtgcttccgtcatatctagcagtgccagcaagtcaagaggggcaaggcgacaaaagaaaggtggcaagatacgagctggaaggtaggcggcttctgttgagagtttttttttttaaataaaataaaataaaatccgagtggtttcttaagacgtcaattctccgtttgttttttcaactcaccgtcaactttatttgtgcagccctggggaggagatggcacttgtggagcatctcaaagggatgtctctgacctccggtgctctaactgagcttaaaagcctacttgtggttctaatacaactgggaagagaagaaaccgcccgtcaggtgcagctggctggagacaattttgaggtatctcaaagggctgcagtcaagttggctgaggatactgtatccaacgacaagatagacgagaatgcacatacgcttgagaattacgtgaaaatgctgagagctcatcagtcagctgatagtgaaaccacctgttggcgaatcaaagcattgtcgccgccttggaccggggtatactccaattcacatgagtgagtcattattactctgttaagaataaactagtactattagcccatctttcccttcagagtaaattgacaaggagttgaccgtgttgtggttttgaaaaaacgtttacaggcatgctgaatgttgatgagtggtaagcagcggtaactgttggaatggaattgaacgagaggcctcaacaatgattgccatatcattctgtggcggctgtcaagggtaacccggctatatatcgatcgcagccaattcaggatatttatggtgttctgccacttgggtggattgttacgtcaaagtggtgaaacatttttgcttataaatcaggatgttggaggccgcagccgagcccgcttgagctttttgctgcttccatttgtggtataattttgatcgagtagttatatgcatggaggaataaaaagttacatcatctgttcatctgaaaattgggtgttgtagacttgtagtgaatagtgattgtgagacatttaactatttgccacttttaagatgtggcatttaacagttggaagaagtcgtgttgttttcctgaaatttgtagtatctcttttgtagcggttgaattgttgaaatccgtatttcgattttttcaatatttcagaatgggtaatttcatttccttcaaaagtttgagcagccgtgcggaatttcatgtccgggaaatttcgagtcgttagtacccagaattttcgctcactgctcgaattttgacccattgggccgaggacttttgacccataagtccgcgtaaatttggcccatatgtggagagatttaggcccactcgtactcagaattccggcccatagatcggttgaatttcagcccattagtgagagtgatttcgaccgattagagcacgtgtcttgggccccatgattcgcgtgctttctggccattcggacgatctgccgaattcggctcataggtcctggatttgggccgtttggtccgctgagttttggcccataaacttggcttttcagttgatggctatcacgttacgatcttagaacattcaccacacaaaaaattaagtacacatgaaaacagttctttactgttacatcctacaaataaataaagtgacttcatcgcaatgccaaacggagccttagaacattcgtcacacgaaaaatcaaggacacgaacaaatgtcagggaattaagtttggttcagtgcgtgtaatagctcacttggcataataatacaatcaaatgttttgtgaataacaaaatccaagtatggtacagtagaaaataatcggcgtcacgtattgtaactatgtcatgaacaaagagaataaaatagttgcattatgctcttataaatgtaagtccaacaaagccacaaggcgtcctctattcaaagagatcggcatcatgaacaatatcgactctcttcagctgtaggaaacaacatatgcaattagctgctatattcttcctcttatttgtccaggacagctacaaggtgtcgtaatatccacaagaagaaatgctgcctcataaaagagtgtacaaggcccccggttccccctaataaaatctgctgtgtccatcgttgcatacaggcccatttgtttaatttccaagtatagcaagtgttcatcgcttggagaacagtccttgagttaatgatgaaaaatcatattctttgcctgattgagaggggagggaagaagaggtcggggatgtgctcttgttagcagctgcacttgcggccccatttgctgggacagatgagctagtgttgtatgctctgcatcaaaacaaaagtaagcatcagaaaagctaagccatgatttgtgacctcaaagcacatctaaatttctttcgcgaccaagtaagctgtggtatgaagttttaattgccaaaaactagtcaagcaatattgcttacccaggtgtactaaaattgaaattcccaaaagagaattcctgattgttgttcgcaacctgccaagtaacaaagacatgaaaagatgaacatacagtaaaacacatatttatacagatgatctaaaagcccttaccttggtggcaccattctgtgctgctactggagccaacccaggattctgataagcaagatttgtccagctttgtgaaggcaagcctccattggcaggattagaaccattaccatttagcagactggcgttccctggaatcatttggggtgcatttccagctttaagagcagccattagtaaagcttgctgctgagacagaagtgcaagctgctggggggtcataaaagcaagttgctgctgctggacagcatatggcgaaaccatactggactgcaaaatacacgtatttcttcagataaaccatagatgtgctctttcttttaaatgacagagccatttcacaaaagcattagtaaaagtaatgctggcgctgaccttctcaaacagactcatgatatcattcttcacatttacttgtggggcagctggagctgaggatactgtcacagctggtgaatctttaaacaagtcctctatgcctgatgtagactggggcttactttctactggcttagcagaatcctttttgtctgagctaggtactggctctgcagctgaacaattgagaaagagaacacaggagcccaaattaaaagatactccacagtatgcaagtaaggaatatggtgaagcactcgcagaacatttcataaaaagatgctcatataacaagaataattcctcaatagaaatgttaagtcataatatcttacactggaagccctcccatgcactatcatcattagaagatgactctgcttctttctcggttgttccatccattgataacatgttgaagagatcagttgcatagtcaaccttaggaggtggtgcaactgatggcctctcaacctttggtggtgttgcattaggaggtgatttctcgggttgaggaggtgaaaccttgggaactgatggttgtgcttttggctgatgtggtgcctgatttcaatgcagttgaccagttgtaccagattaaaactattagaagctagtaataaattattacacaacaaaatgcagcaagtataaaataaaacttaataataacttaagtctccaaattacttgaagtactcaatggatattgtgccaactttaacttaacacttattaacctaatgtggaaaatatcactggttgtaagaatgtgttttcaatcatgtaagcaaagtgaaaccattaattatcatcaagttatcaaggtcaggcacaagaaacaaaactataaacatgatcatccattagcatgatacacgctatcacatgatcattctcatttttcagtttggaaatctacagtttgtgcgcaaggcatataacacacacatatatgaaacttatagatcgttctccattttcgattaactattgaagtggcagatagtaattaagaactacaatttggaatatatatagctcggcttcaagaaaagagtgtcgatccctcaagctgtttacatctaaagatgctactaccaaaggcaagtatcaataaacttaactgataatcaacacctaggaaaagcttgtcataatccagtaggattacctgggtgggcgtcctagaaaccactggagcaattttgctcactgcagctggtgaagtgcggtgttgctcaaatgaagatctttgattatggccacccctgttaacactagtttgtgactctgagctcttctcatctctagcaccagatgatggtcttgatgacccattcctcggtatccatctcttgtcctcgtatctacattttagacataagttaataacattagtccaacacattgttccaaaggttagatccataaacacccctacaaattactccctctggtcataaatgtttgacacttagcacaaagatttggtcaaccttttaaaattccagcaaccaattttatattaggataagtttataaaatccaataagtttatgatattatgacagtacatttcaagtcaaatctatcgatggccattttttgtgtttaaaactaagcattttagaattttttttaatggtcagaattttagaaatttgaccaaatcttgtccttagaattaaatatttataaccggatggagcaactgccttttcattcccccattaatgaatggtaagtattaaaaagcaaaattaaacctttattttggttttgtatttgtttgcttgcgcggggggatgggaggccttggataggcaggtgatttacattggtgtactagatttatagcaagacaaatggattgtactagatttataggtactgaaagttggagaggttcattactttgcacggatgaagttctctatcccaaccctatcatagttagggggcagctccgcttcccagtagctatttgacttttcattccccattgctgaaagaagtgaagacgggaatacaatcatcattgagaactgcattacccctttgtttgatggcaaatattaaaaatttctggtcagggagtaatacatacattgaataaatgcaacttgctctggcagccatgtatccagggtagccgatcttacctgcgtcagggaaaaaaatggttcattaaatagacaaaaaccgcatgctattgatatagatttgaaggcgaggccacatgaaagaaagaaatgcatctcaaagaattaaacataaaacagatacatagctgtttcacgttctctgtttgtaatatacacaaacaatttggtgcaatgatgaccagtaaaaaattgtgagcacgagttctcaaagtacatgaaaaagataagccagccagctcagaagcttcgaagtcaaggttgttgcagaatccagatagctaagcttattggttgatgactatctttgccacaactaccaaaggtgtggtttgccacacaaagtgtggccaacaaatcgttggccacaagtgtggcaaagttaggcaccaaattgagtgtacgacatgtgaaaagagctaataaagtgtggcatgtcacagttgtaacaaaccaggctctaggctattaaagtgtagcacgcctaaggtttggtatggcaaactctggtcaccaaaccaaacagcccggtttcgcatatgatggattgatggccattctaccatgttgaatttatgttatgtttataatcttatataaacttacattagccaggatgcaatgaactgaaagaaacaagcataatatactttgatactataaaaaaaatgacactgatagagcagctaccaaattttcatgaaaagttggtcattcaaagtactcaagttgtgtttcaagccaaatttgtcagaacttgtatgaaggagaaaaaaaaaagtgggcatactgagttcgaaaataaacagttgaactcatgcacataattcactgaccttagatatatgtaccccgaggcttctatgaattccagaacactgcatgcatataaagatcccaagatttacacttgcccatcgaggacccctgaaaaatggggaaacagtcagttgacaagaactatggcacatgcaagtgtctacctatcagttctaacattacatgctcagagatgaatttacaggtaacattagacatgatggagaggaggtttaaccaactatactgactatataagtcaataaatagaacagaaaattttcatttccaggaatagatggttaacatgttggatgcaacaaaccagtgatgaagcaataagaataaatatcttaaataattgcttctagattactagaggccctccaaatgccatagaacttgctcaacacaaatcagcaagcggacaatgaatcagaatgttaacttctataaaaaacaacgtcatcaagtgaaagtactcttagcagcaaagctaatgataaaacataaacttgtataatgcatcaatagccatcttttggagaaccaattgcacaggatcactcactttgacttgcagtctgcacattctctattctcaggcagccgcaggaggccttccaatatctggaaatcaaggacgagccataaacatggtaaataagacagggtacttcatgaacaatacctaatattgttgaggcttgagcgggtcatgaaaaaatcaaaatggtaacaatatgttgtagcaacgaagatagctaggttgcttgtacagttgactgcgaattgtttaactttttattgccacgattgagaaggatacctactataaaattacaaacaatttttcaaataacgatttccaccagtcgaacaattcacaaaatccatataatcaagcttaaattagcaaaagcgcccgctccccgattcataataacggcaaaacaaaggaagcgaattccgatctgcgccacgctcttcctaacgccacaaaaagagttgcaaagcaaccgcgcgcaattcaggagcggggagatcaggaacccacgaaatcgcggatcccaaatctccctcacctaacaacaaacgaaatcgcacgccgaatcgactctgccgtagctttccaacccaaatcgaaagggccagcctccgatccgaacaaatcgacatataacggaacgggaggatatacgaaccttcttgtgcttggcgttgagctccttggagacggaggccttctcgttcatggctgcgcgcgcccccgaaatccctcgaccccgaacggaaactcctcccgaatccgggggcaaaccaggcgccggaccaggattcgccgtctccggtggggggcctcgggatctcagcctcccttcctcccttcccccctctcctcctcctcctcctgatctcgccgcgtcgaggggaagagagagagagagatgggcagcgaggagaggggagggatctgtgcgtgcgtgccctccccggcttgaccttcctcgcttcgcttctcctcccctcctccctccgatttcctttccttttccttctatatttttttaattaattatttaaaacagtttgggtttttttaaaaaaataaatgtgtggtgtgataatgacggcgcgttgggtttgctggcctaaccaatgcagaccacgttttactggtgttttaacccgtgatattctttcgaccggagtagtgattagctgtaactaatattctcggtagccatccagcttgttctcaatttctatttgatggtgaaaggaattattaggatattgtgtatagttgctatgctgtcgaaatacctaatgtttgttttctgttcgtgactattgcaccaatataataaataataaatcatggtgctgtagtttttacaatacaacaacaaacataacatcactatgaaaattgcaaatgaatattgtgatcgcccgaaaagttttcaactgatcaaacaagcttcaaaacacaatacaatgacgtgattttttatcttatagtcccgtgtatgttttattcagtacaaaatagatgcttggctctttcaagttttttttgttcttatactcatcgtattcaataattaattgcacgtggttatttttggaggtcagataacaatataagttatgtacgttatccctcattatatgttctggaacaatataaaagaaaataaaggttgagataaatattatgaagatcttacatatattgatcgtttctaatataagaattttacaagatttttatgagattcattttatttttattataaaaagaaggcatgatctgtaaaggtttttgtcatgctttgttaatgtttaattgcgcttcaaaccgctgtacgtcccaaaatcaactattgtaaatatagtaaattttatcttatgtttttgttatcattcgttggcaaccactcaagatgaaaggagtaacttgagagaagagagtgaaaatgattgaagatgacaggaacatacagtagtccaaagtggggactccatcttgaattgtccaaagctgaaagcaattgatgaagtgtgacctggagtggtgtactattgccactctttgatcagccgcatgtaatcacccatggctttgttagtcaaccatccactatgtattcccctttccattttatttctaaccgacaagatagtggtaatgatttccctttatttttcccttttggtttatttggtcttccatgtaatgcataaatgcatttgattagttggaacccatgtcagtatgttgcttatgcatgattggtcaggtgcagtagttggtcctccatttgccttttttcttttgtttggcttcccattagttttggtttggtggacagctgtcggatacttggggttagaatttttctttttaagtttagaggcttatctcatcagagtgattgtcagaaactaacgatgataaattgacattaatccaaagtctgtgatgtcacgggctcaaacagtgtcactgctatgtttggtttcttattcctttcgctttgtgccgactgaaaactgaacattggattcggttcagttttcaggtgaagaaaagcacacatgattttcggacaggcccatctccgtacatattgaaaaatctgaaatgaaaccgatgcatcctcgcaagagcaattccgttttcacacatttgctttccttttttttccgtttatgtgctatggcctcaagtttcacatattctttgttctcttgaagctgctacggtgtcaaaagttttcttgccaatgccgtcgactacatcgtttactttatagctgataagcccagagaaaataaacaaaaaaaaattaaaataatttatgagtaaaacttgtatagaagtgttttcgtgacttaaaaagccaatgctagaaaaggaaaaagtacaccgaaggtccttcaacttgtcatcgagttataaaatcgttcttggaccgcaaaactagatacaacgcattcctcaacttacaaaaccaatacaaactaggtccctcggcagttttgactccggttttatccgacatagcaactgactcagtgtgggactcacgtgggccccacacgtcaacctcttcttcccctcccatctccacctttctttctctctcctctcctttctcttctctatattgaccacaacccgctcgtcatgccgcccaaggaggtggtggccggcggcgttgccgctgtcaaggggtacatggccaggtggtggcgcgacgcccgcgccgaggcagcgccatcgccgagagccccaaggtgtcgacgcccaaggagtggctggtgtgcagcgtgttgtcgctgggcagctaggtgtctgacgtcacgaggtacggcatcgggcaggcggcagaggaaggaattgcgcgggcggcgggcggcgggcggcaggggaggagcggcatgcgggcggcaggggagcaattgggcaaggggatagcgcggcgagctgttgcctatggtgaggacgccgttgaggtcggagggtggcacggaggacagcggagacggggtgcaaaggacggcgagcaggttggagggatggcgcggtggcagcggatgtagcgagggacgacagcacgaagatggaggagacggggaagaggaagaggtggtgcgcgacctcctcctcctcctcctcctcgaacccatcgccatcgtcgttgtcgttcgccaccgctctgcttcgcgccgttggcttcgcgcgccatcgcctcgtaggcctgcctgctccgcccgcgaccgccccgctccgcgccgccggcttcgcgcgctgccgctttgcccactgtcgccccacttcgcctacctgctctacccgccaccaccccgctggcttcgtgccccgtcattttactccgcctggcttctccgctcgttgccacctcgctctaccccgtccactgtctccccattccacctgccttctccgcctaccgttgccccactccatcccaccggcttcgtgacgcggatagatacagagaagagaggggatgagagaggagaggagagaaaaagaaaggtggagaggggaggggaagaagaggctaacttgtgggacactagggcccacgtgggtcccacgttgagtcagctgctacgtcagacaaaactggagtcaaaaccgtcgagagacctaatttgcactggttttgtaagttgggagatacgttgtatctggttttgcggttcaaggatgattttgtaactcgatgacaagttgagggacctttggtgcactttttccgcttgaaaataaaatacggggaaaaagtacaccgaaggtccctcaacttgtcatcgagttataaaatcatcccccaaccgtaaaaccagatattgggcgtcccttaactaatcaaaaccggtcacaataggtccttgtcacgccggctcaaggacaagaccagctcaagaagtctaacagagagaggcagccctcgagaaggttccctgcaaacgagtggacccggtaactgtcacggggccactgttagagagtgagtgagaccttgtagtgctgtgctatttgtaaaatcaaaggtgtttttgatgattattctgtgatgaacaattgggcatcggagattattggttttgttatttggaatttattcacgaagtggttttggagatgattggatttcacaggtgatcgcaggattcattatttcatgtgaccggtcagaccgggctctggtagccggtcggaccagcggtatgcgcgcggtcagaccagccagcccacggtctgaccggccgacactgtgtcggtttcggtttcgggttgtttgtttggatatccgtgattatttcatgattatgacttctagatggatactatacatatgtaatactgttgtttgctactaatgagtcaagttggagatagcttggtctcggaatatggtttctttgtttgttccatgtgtaggtgactcgatgtctcgggagagtatttgcggtgatggaccgggagtcggcttggggataagacgacgtctgtggtgatcagagatcatgcgggatacttaggctagagttgatgcacgtggttgatggagattccatatggcatacgatgaagttattgtgtgcgtatgggatgtggagtcaaatttggaaggagtccaaatttggtacgattggttatgtaatgtttctttcttctactagagggtttcctaaggtgtttaggactcttagtatgagtttggttcgtggctttaggctgcctacctcatgtataaatagagggggagcgtgaggcttcccggtatcgcttttgagagcaattgagttgagttttgagttagagtttcgagtttagtcgaaatttttgtaaggagtgctgttggtgcactttgtaaacatagagagaagtaataaagtcgtcatccactttaagagttcttcgatttgtgtttcactgggtttcggcggtctaaccggcaacgcaccggcggtcagaccggcggcatcgcggcggtctgaccggcgggcacacgacggtcagactggcggtgacaggagtcgacagcaggcgttctcggcggttcgaccgatcaatctacatcggtcagaccgacgttcatcaagcggtcagaccgacagatcaatctcggtctgaccgcgatccatcgatttcgagggtaacttttatttccgctaaaagttttcggtttttgggtataccaaccattcatcccccctctggttggcttagttcttgtgattcgatcctacactatttaggtcggcaggagagagagagattaactttggagcaatgtacaaacaactttctccaaaatcaattccaatctctcctcctcttactctgaaactctctgttctttctctctgttcttcctctcgactccgttctatctcttccgctatctccaaatctctccaaaacaattgaatcgcagttgagaaaatcgagttcgtgacaatttggtatcagagcaaccaatcctggagaaaccacgctacacatcccggctgcaacttcaagtggaggcgatggagaagcaaaacgtggatttcagcaaggtgcttgtcgagatccaggagtcgatgttggcgctgaatcgagcacaaggcaagacgcaggccaccgtcatcaagatagatcaaggtgtgaataattggaggccacaagtggaggaagtgatgcaggaactgcgcgaggaggttggcgagctccgccagaaagtggacttcctcggcaagacgaagatggcttctccattggcatcttcccctcgagttccgttgacggacgaggaaaggaaggcgccgctgctttcccacacctccgtcgccgacgaagttgatgaccgcggcggaagaagcagagaagtgggcctatggccaccgctttgcacaacatcaccggggtagggcatcagggatggtcaccaccctgatcccaactccgggcaagggtaagttcgaagttactcctgtttcaatgaattctctgggaaattttgattcgggaggtgggaaatttgatggggatcctgatgagagacagtataatcaccgtgtgcctaagttagattttccaaaatttgatggttcggatccacaggattggcgtatgcgttgtgagcactactttgatgtgaacaacacatatccaggtctatgggttcgagtcgccaccatttacttcataggacgagcagcatcatggttgagatcttctagagctcatgtgaggtatcctgtttgggaagagtttagtgccactatgtccagtaaatttgataaggaccaacatgatttactcattagacaaatggatcaaattaggcagacaggaacagtttgggagttttatgagcattttgatgagttgatgaatcagctgttggcttatgatcctgaggttaatatgcgatacttgattcatcgttttactgagggattacatagagaaatcagaaatgctgttttgcttcatcgtcctcgcgatctcgagactgctctggctattgcgtctttacaggaagaggtgctggaggtggtcccggagtctaatcacagtaaaccctttcggcgctcggatggtggagtgcaaccgaaaaacagttctgctttcaagggagcatttccacttcctttacctccaggatcaggaggtgtgcgtgctgatgataagaaacatcaggatggccaacgtgctacaggactattgacaagatgtcatctattaaggctcatcgtcgggctcaagggttatgttacatttgtgccgaaaaatggtcacctgctcacaaatgtgccaccactgtgcaattgcacgcagtacaggagttgttttccttgttgcaagatggtgaacaatcttctttgatggattctaaaaatttagaggagcaatctggtccgtcagttatggctgtgtctgttcaagcaattgtggggtctgaatctggtggaaccatgcgcttgttggggtgggttcaaggttttgaagtactcatcttagtggattcaggcagttcaaccagttttgtcagttctcagattgctgcttctttggctggggctcaatgattagctaaatctgttcaggtcaaggtggctaatggtgaattgttgtcttgtgaccaagagattcctggttgtgaatggagctctcaagggtacttattttgtaccaatctgaaggtgatacctctgagcaactatgatatgatcctcggcatggactggttaatgcatcacaatcccatgacggtcgattggaccagaaagtctttgactctcgcgtggaagggacagactatttcattacaagggattacatctcagttagccacttgttccagtgtctctgttcaacaattgaatgggcttatttctcgttgtgcaatttcaaatctggtgcaattatgttctctgtcagtatcatcaacttcagaaatcattcctgaggcagtgcaagtagtgttgcaggaatttgattctgtctttgctgaacctgaaggtttaccacctgatcgaccgtatgaccactccattccattgattcctagggctcaaccagtaaatgtgaggccatatcgttatactcccacacagaaggatgaaattgaattacaagtgaaagagatgctttctaaaggtatcattcagcccagctatagtccattcttttcccctgttcttttggtaaaaaagaaggatggatcctggcacttttgtgttgattatcgccatctaaatgctataacagtcaaaaataactatcccttgcccgttattgatgaattgttggatgaactcaatggagcgcagtggttcactaagcttgatttacgctctggttaccaccaaattcgtatgcaagtgcaagatgaacataagacagctttcaagacacataatgaacactatgaattttgtgtgattccttttggtttaaccagtgcaccagccacttttcagggcgtcatgaacagcattctgcacccttggcttcgccgctttgtgttagtctttgtggatgacattttgatttatagttctactcttgaggagcatattcaacacttgagaactgtgttccaggttttgcttaagcatcagctcaaggtgaaacgtagcaagtgttcttttggccagcaacgccttgcttacttgggccatattatttctcctaatggtgtgtccactgatgaggataaaattcaggctgtcagggattggccagttcctacctcagtcaaagaattgcacttcttaggattagctggctactatcgcaaatttgtaagacattatggaatcatcagtaagcctttaactaatttgttgagaaaggggcagctctttgtatgaacagttgactctgaaactgcatttcagtcattaaagcagctcttatctcagctcctgtcttggccatgcctaatttcaatctaccttttgtggtggaaacggatgcatctgacaaaggaattggtgcagtcctaatgcaacagaatcacccggtggcttttctcagtcgagctttgggatctcgtcatcaaggcttgtccacctatgaaaaggagagtttggctataattcttgccattgagcactggagctcttacttacaacatgctgaatttttcattaagacagatcatcggagtctatccttcttagatgatcagagacttactacaccgtggcaacataaggctcttaccaagcttttgggtttacgttacaagatcatttacaggaagggtgttgataatcgggcggccgatgctctgtctaggtgccaatcttctgacaccattgttttatctgctctgtccgtggccattccagcatggatgcaggaggtaagggatggttatgttcaggatcccgattctcgcagtaaagttcagactcttagtatcagcgctcatgatgtgcctgattacactctgaaggatggcatactgtatttcaagcagcgtatgtggattggtcataatatttcccttcagcagaagatcttagccaatcttcatactgctgcagtgggtggtcactctggtattcacgttaattatcagcatattaagcaactgtttgcttggccagggttgcgctcgagtgtggtccaatttgtgcaagcctgttcgatctgtcaaaaggcgaaatctgaacatgtcaaatatcctggtatgttgcaacctttactagtgcctgaacatgcttggcaagtggtctcgttggactttattgaaggtttaccacgctcatcttcgtttaactgcattttggtggtcgttgacaaattttccaaatacagccactttgtgcctttgtctcatcctttcacggccttggacgtcactgaagcctatatgcaattcattcatcgtctgcacggattgcctcagtcccttatctccgatcgtgatcgcattttcactagcacattgtggacaactctgtttcgtttggctggtacacagttgcgcatgagttcatcttatcaccctcaaacggatggacagacggaacgtgtcaaccagtgtttggaaacctttcttcgctgctttgttcacgcctgtccctctcagtggagtagatggttggctctcgcagagtactggtacaatacttcattccattctgctttgggcacaactccgtttgaggtattatatggtcataagcctcgctattttgggttgtcagctactgcagcttgtcagtcttctgagcttcaggagtggctacatgaacgcgagaaaatgcaagtactgatttgtgagcatttgttgcgcgctcaatccaggatgaaatttcaggctgatcatcaccggtcggagcgctcttttgctgtgggcgactgggtttctctcaaactacaacccttcgtccagcaatcggtagtgacccgcacaaatcgcaaactttcgtttcgcttttatggtccttttcaggttctagctcgtgtgggagaggtggcttatcgcttggatttaccagcgtcaagtctgattcatcctgtcattcacgtttctcaactgaagaaagcgctggcacctactgaaacggttcaacttgttttgcctgtacttcatccgacaactgatgctgaagctgaacctgctcacattttggatcgtcgcattattcgcaatggctctaagatggttgaacaagtgttgattcagtggtctggggaagaaccaacagctgttacttgggaaaatctgcaagaactgcgccatcgttttcctcaccatgaagcttggggacaagcttcgtttcaaggaagggggaatgtcacgccggctcaaggacaagaccagctcaggaagtctaacagagagaggcagccctcgagaaggttccctgcaagcgagtggacctggtaactgtcacggggccactgtcagagagtgagtgagaccttgtagtgatgtgctatttaggtcggcgggagagagagagagagagagagattaactttggagcaatgtacaaacaactttcccccaaaatcaattccaatctctcctccagttactctgaaactctctgttcttcctctccgttcttcctctcgattccgttctatctcttccgctatctccaaatctctccaaaacgattgaatcgcagttgagaaaatcgagttcgtgacagtccttcggtggttttggccccggttttgtcctacgtggcagctgagtcagcgtgggacccaggtgggccccacatgtcaggatgccacgtcaatctctctcccttcctcctctctctcttctcttctcctcacccgacgccacgagaagggcagcgccgcgacggtggccggtggcggtgatggcagcatggcggcggagaagcagcgcacgggcggctagggagcatatgagggaagaggtggtgcgcgtcctccccctcaaatccaccgtcgtcgtcttcggcggcggcgaccgccatggcggtgggaagcagatggggaagctggagcggcgaccgcggcgggagtggagctcggtggaggaggcacgatgatgacggcggagggagttggggcgccgaagctgtggagatcggcggcgacggcgcattgtcgccccactctacccgccgatagtcgccccactctgcccgtcggctccgcccaccactgtcgcgctccgtgccaccgacttcgcgcgctgccactccgcctcgtcatcaccccactccacccgctgccgctccacctcggggtcgccccactccgctcgccaccgagcacgcgcgcccgaggatggaggggagggtctcgacgccgaggtgccctatcgtcctcgctctcccctcgcagtgttcctgccgccgacgccctctccttctcccgcctcgccgctactgccatccctgcgtcaccggccgctagctcctcctctcggcgtggcagaagggagaatccgacctcggcgcggcggcctcccctccagcgtcacagcctccacgtcgccgcctcgtgttaacgaccaaatttggtaatatcagtatcggagaagaagattagatcgaagcggaatcaaagatgaggattgtcgcggaaacagagtaagaatcggctggagtccgaattggctacgatcgagatcggctaagtccgagtcagactgggttaggtgatacagccgattccgacaatacgacttggtgtacgacattgggtcgagttgatatgcttcaagatgattgccacgcatggatagagtcctgagaatgcaattgtatctattagttaggatgttttatgtaaattccttagagatatgtttgggaaaaagtctgccgcaaagacttatggtatcttagagtttgttagggataagagtcatgtccgatatggacatgttgtgtaattctcgggtataaatagaccccgagccctatgtaatcaatttaacacacacgttcaatacaatctcgacgcatcgccatcctttttgctttagttttatttcgacgagttcttgctttcaggttgagctgcatcggtttcgatcttcaacaagaggtaaaacttgttatgacggcttacgttctcgggattagtgcttccatctttatgatactctaatcttgtttatgtaattcgtcgagttatcatatatcttatataatctctgacaatatcgctatctaacctacaatcggctaacatctatcaatagagggcagccgattaggttaaatatcgatgttggcttagattatatatgatatccaccactctatgaaacttccaatggcttgattgtctagatattgtccttctttttatacttatagctgcatcaattgagtttgatcttatgagtcgtgattagaatctcaatctctagcctgcttcttggttgccgattagggtagtatcggggtttcagccggtcttacctggtttaactatatttgttttatatgctttactgacatattaaatctgccctttatgttaagatcttgccgcatttaagtatattaggctctttgtttggtatatcctatttgcgttgatatcttaatatagagcggtatcgaagtattagccggtacatgctagatctctctgatcggctatgctatgaatatatatagtcttgttgttagtatatattttgatctaagtgatttatactgtctcggcatggcaaccgatctatcccaatcacttgatttaagtatatatcaatataaggattatatattgttaatatctacagccgatcgaatagatttagttctttattatctatttataactgccgatcgatacatatttaacatcggctcaaagataaatgatatgtcatcggcacctagccgatcgactatcatttatggatttaaccacagtttttttgtctttatttcttgttgattgcaggatcaaatcaactggcacgctagcatacccgaaggcgagttttggatctgcactggagttaagcagacctcccagggctcgtgtttttcatcaacacctcatcacccgccgcctcctcctctcctgcctcaccccggcgacctttccccacccatcggccagcttgctgcttacacataaggagaaaagtgagattgagaaggagggagaggaaagggaagagagagggtgctgacatggcatcttgacatgtaggtcccacgctgagccagccgccatgtcggacaaaaccggggataaaactgccgagggacctagtttgtatggttttgtaagttggaggatgcgttgtatccggtttcgtggttggaggacgattttgtaattcgatgacaagttgagggatcttcggtgtactttttcctaaaatacggtgagaaaaacttgcatgcggcctataatagttgggcctcaacgggaatgcgggctacgtgcggcccatattagttgggccgagagctagaatgcggcccatattaagtggtgttgcgcattgctgctttcacagttcgcaccatccggcggaggaagatggaggcgcaggcgacccaccggcgagccggagaccgcggcggcggtggcgacggcgggagctcctccgcctccatcgccaagcacctcgcaaaccagagccaggtacctcgtgagcacgcgcccgcctttccctctccatcagatcgtttgctgcttgctgccccggaggttctgtgatgctgccgattcctgcacacgtttggctcaaattctccacgaattcgtggcttctcctctcggattttcgcccatactcatcgcaagaatcaagcgcgcgtagccaatcgcaccatcgcggttacagttcagcgattgcctcctcgattgcggctgcggctgctcttttgcgctgctagatccacctgaaccatgccggctcacagtgttctgcagaaacctgagaatgcgtgctggcatgctcgatttcgttgtctggctctgatttctggaaggctctgattgcaactgtacatctcagtatcttggctgctctcgtcatgtgttgtcgcgtttcctgctcaggtcttgaagtggctgcaagatttctctgataaggtggaggagagagctaaaggagccgctgcagaagtcaatgtgttgttagatgaggctggggcgctggagctggatatgaagaccgcgatgatctccttcaacaacctgacccgccaaaggttcattgaacatgcaagtagtggttccaaatctgtatattgcacttgtctttggatgcctctagtctagaaagttatgcttgctttgtgattgatttgtttatatcagatgacaatatacttaacttttggctgtagtacacccttctatggtcaagtgtcgtatacttgttttgattacttttgtaaaagacataaatttcaaatttacataaattcaaatttatgatatctcctcattccctcagtggaaattgcttgggacacatttctgtactttgcctcaaggagatgaataacatatcaccgctcactgctgcaagtgcgtcttcaactgcagaaaatttcagatgaagatagtatgcatctgaaaacaacggagagtatgcatggttctctgcaatcccaagtgccagctcaggattatgaacgtgatattttaccaagatacaaagaagcattacacataggactttcttcctgtaaggaccacttccgaagcaagggacgctctaccacctctgtgttcagggtaatggccttacttgcagttcttgatgaaatatttacccccccccccccctcaaacttttccctgcaaattaatgccataatttgtcattactaaaattttgttgcggaggcttgtttaggttgatgccaactagttccagtttttagctgccaaatattatctgaatctttattatttttcttccaaaattctgtcaagattcccatccttttggcacattatggtaaattcattttcttgccgaaacacttccaattttcagcgacctattagatgaccaaattttggaacacattgccaatgcaatttttaccaccaaccctccccctggtcacccagatttcagaagcaaattaactaaaaagcttgctgtgaagtaaatattgccaatgtttttccagcaaactaattatatgccaaaactgacaaaccaaattttggtagttctgtttggtaactgcagctggcattatttcagaaattctatagttcacaagcgtttgttctatggtagcatttccaaattatctttgttgcttgactcttgaaggctatgtctgcatatggccctcttccacatataattggttctgaagagtacattcatgataacagctgtggtctggcaggtataagtattattcaattgtttttctttggaaacaattttatactttgtgaatatactcatgtgagcttttcaattttgtttcaaatagatgatatgcagcctctaagtgatgacttcagttggttgcgggagtttcaaagtgagtcttcagactcacggactgctgatatctctgagtctcaaattttcggggctcagcgaggttatgagaaggtacagtgtatttatagtttgcggcaagaatgatgtgttctggtactgatttgtttgctgtttcatatggagtttgtttaaactctaatcaatatatagtactcctagttgacgttgacactaatagtcttccagaccattaatcatgtgtgcgtgtttcaatccagggggaaactgactctgtggtttctgctgcacgagaattcaaggcaatgctggaggctgcacttgttaatccctataagttctgtatgtgattctttccctacttccgtcctaattttgacatcttataatacctgtatagtgtgttaactataatcttcttcatttattatgctttgtcctctctttgaaaagttatctttctttcttagtccaatttagatgtagtttttttataaaaaaaaatccgttatgattttccttttcattgattttagtagaccgtgcttttcacagatgatgatgcaactattacagcgcaagatgcttctgtagagaagaagataagcacaagtgaggtacagcataacctttctgtggcattgtagtttggactatgggtatcttcaaccgatatttctgtctggctaaaagttgtgtcataaccctgagtccctgatgacttgttcacatgactcacatctggagtcctactcccaaaacatcaaaaaaaaaaaaaaaacttgcatgtgttaattcttctctcatcttttaaatttccctttagttgtaagatttcatacgaagctcaacatgtttctaattgtgagctcttgcttttgattgttcactctggtccagtggatgtgtttttttttgtccaaaagtatatgctgatattgctatttggggaatatgataccaataaaaggagatatttccctcattccaaatttccagttttaaataatttatgaccctaacaaagttgccttgtgatgattctaggaccaagttatgctgacagggacaagtgaagcaccgagtggaagatcagcacaagaagataactctgaacagacaggactttttgcaagcttgcaaagcgcagatgccaatcctcatgacatctattctgctttggttagagaaggcctgtttgatactggtgatgagattctgtctatggatagaggggagtctgctgatactcctatttcaggcctagcgtcaggtttagcaaatcttggcactgctgatccagctgaaaggggctactcaataaacgagactacaaatgaggagggatacttgattgaaggggatgatccatcaccatcaaacaaagacgaacaagatgaccaaactgatgcacatggtgtgtcttcgccagagccagaagatggtgtttctagaccatcctagccatgctgatattggttgatttcttctcgagtgcagttcattctgtcaaaatctactgtagacgctggtgaagcaactgaatggcaatgatttagacgaggaacacacttttgctgccatgtgctgagtgctgtagactaagaaattatatactccctttgtttcaggttataagacgttttgatttttggtcaaagtcaggacaaatttgtagaaaaaaatagtaacattttcaagccaggacaaatttattatgaaaatatatttaattattgatttgatgaaactaatttagtattataaatattactatatttgtctataaactttgaaatagtttgactttgaaacggagggagtaccgttgctccagtgtatcaaaacaacgcattgaaaacataccattacgatttaattccatcactagcgcaacttattattgacgccgcgcttattagctcttttttctccctgatgaggatcaataattcgttacctcatgctgaaatctgcactgtagaatacctaagaccgacgtcgaggtctcgaggatgaagaatttggcacgccaaaaccatcctaagatcgagaggctgtgactgtgcctggtggcatattcaagatgtgatcaggttgatgaagacagcattgcacagaaatgtcttcgattgaatcaatgagcacgatcattggcgtgttttgcacgaatgaccaaaacagagacgatgatcggacgaagagatgaaacgaatgcaactcttatcgatcaagacatcggcaccgttactaccaaaggttcttttataggaaaagtattggtggagaccgggtgtcttataaccggccttatctacagcctcgccccggatgaatgccaaaaccatcctatgagcgagaggatcagattgatgaagacactaccattgacgtgttttgcatgaacgaccaaaacagaaaagatgatcggacgaagagattaaactaatgacactagcccattcttttctccaacaagagctggataaagattaagatttttatggcacgctttttaaactgttaaacggtgtgtttcgtgtgaaaattttttatatgaaagttactctaaaatatcatattaatatatttttcaagtttgtaataattaaaactcaatcaattatacgttaataataccatctcgttttgcgtaaaaaaacttattctttattttcatcttaagaaaaaaaaaacatcacaaagatgaccagaagtagccctcgggcgtgcctagttgtctctctctctccccctctctgtcgaacactatgccagaatatgaccagtggaacgaacacaaggtgtttggtgctgtcaagtggcagcatttctgatagtgttgattgcaaatgtaaaggatacgttagcgggggctttaaccacgactccaactttggatttgtttggagagcttaagattttaagaaactactgattggcagtgtcggtgacatgggaccgggagtatcatgacttagagacttgaggcagacacgatcacccacgtggcctaaccccctcgggggggtcgggcccgagggtgatacggccgcccttctctttgtctccccgaggggtcggaccgctcccgtctcggccccgagggccaaggcgccccgaccccttgtgggttttgcgccgcgtatatagggtaggtgagcatagcggggctcacctaaccgcatttattgcggtttggacgagcgcgtcacgccacatgtagcgcagtatggcacgctcgtttatccggtctgtgaccggtcacagatcggtcagattgcgggttaggtggcaacaggcgatctgacacacgcctcgccccgtcccgtcaggatgagagtctctaggcactcgtccctagccggagccagcgtgctagctcctggagatggcacgttggtcctggtcagatatatgccaggctttatcccaaccattataagcaagacgttgtatgaagaagggcgaacatgcagattgctaaactgacacgtggtggacaaaggtgaccggtctgtgactggtctgacactggttatgtcgccggaagacaaccgtgttcccacgttgcacctgcttccggcggagtggaggtaggtatgggccgtcccatcagaagggtcactcgggcagcagctgttgcaaatctccgcccatttatgaagagatgacagggtgatccccgaggtcagacgaacgaggacgcgtggccacactcaaaaacaggcagtgtttcagcttccaagagaaggcaagccaagttttactatagataggatgggcccccacccaaaaagagagagagggagaagtggtgcatgtggtatccccttgagatataaaaggaggaccttgcccacttaagaggcggggctggaaggggggatgatctggagagtagatcccacgagaggaaaaaagggagaagagggtttttagagtaagagctctctggctctccagctctttgtagcttcttcatacacagatccaccagaacacaggagtagggtattacgcttctcagcggcccgaacctgtatacatcgcccgtgtcttgtgctttttccattctcgcgaactttccacagactaggagcttagaatctcacccagggcccccggccgaaccggcaaaggggggcctgcgcggtctcccggtgaggagccccacgctccgtcaggcagatattttataagaatatggagaagtttcgtttcttagattatggcttctagttagtttttgaattttataactacaatttatcaggatttggatgaaaagctaaattgtttggaaattttgggagaaactggagctaccatagactccccaaacaaaaccctttgtgcgccacgatcggttcgcagcgtgtgccatcccacgcgctcggttcacacaccacgcagggaggctctggctcttcatgcgattctaacaaacctaacaaaccttatctaaaagagaaaaaacgaaataaagaaagagaaataccgaaaatactggtttgacacgcaccaggattttctaaaaaaaaaatccaacagtatcgatctaagacatcgtcaccgttattataagaggcatttgtaaatttgttatcgattttttcaatattgtaaggatgccactcgaatgatagttttagtagtatttttacaattttttagtggcagtcttataataacgattcaaaatagtggcaaatttgcaattgcccgttcttttatacgcagagactccgagagtcagtgcaagcaagcaggagctcgtcactgtcaattgacaaaattcagtagcaaatcctactctgtctgcatcaatggctggcccaaccatcgtcctcctcccggcctggggatccggccacttcatgtccgcgctggaagccggcaagcggctgctcgtcgccggcgggggcgccgtctccctcaccgtgctcgtcatgcaggcgccgacggagatagaggcgtcggtggtcgaggcccacgtgcgccgggaggcggcttccgggctcgacgtcaccttccggcggctccccgccgtcgagcaccccaccggctgcgaggcgaccgaggagttcatgtcccggtacgtcgagcgccacgcgcaccacgtcaaggcggccatcgccggcttggcgtcccccgtggccgcggtcgtcgtggacctcttcttcacgcccctgctcgacgcggcgcacgagctctcgctcccggcgtacgtgtacttcgcctccaccgccgcgttcctcgcgctcatgctgcggctgccggagctccgggacgacctgaccgtcgggttcgacggcatggagggaaccgtggacgtgcccgggctgccgccggtgccgccgtcgtacatgccggtgtgcctcgtgagcaagacggtgaagaactacgactggttcgagtaccacggccgccgcttcacggaggcgaagggcatcatcgtgaactcctccgttgagctcgagggcgcggtcctcgccgcgatcgcggacggccgccgccccgctccggcgatccacgcgatcgggccggtgatctggttcgacgccacgctgccgcccgagcagccgcacgagtgcgtgcggtggctcgacgcgcagccggcggcgtcggtggtgttcctctgcttcgggagcatcggcttcctcgacgcggcgcaggtgagggagctcgccgcgggcctggagcgcagcggccaccgcttcctgtgggtcctgcgcggcgcgcccgccggcggcgtgcggtacccgacggacgcggacccgggcgagctgctcccggaggggttcctggaggcgaccgccgggagagggatggtgtggccgaggtgggcgccgcagaaggacatcctgggacacgccgccgtgggcgggttcgtgacgcactgcggctggaactcggtgctggagagcctgtggttcggcgtgccgatggcgacatggccgctctacggcgagcagcacctcaacgcgttcgaggccgtggcctccatgggcgtcgcggtcgagctgaggaggacgacggcgaaggacggcgacgcggcgagatcgctcgtggaggcggcggaggtggagcgcgcggtgaggaggctgatggcgccgcagggcggcgggtcgtcggaggcgagggagaaggccgcggaggtgagcgcggcgtgcaggaaggccgtggaggagggcgggtcgtcgcacgcggcgctgcaacggctcgtgcgtgagatcgttcgtgtcgtggcaggccacactaggccggaatagctggctggttgcggttggttggcccatctcacacggtactcggcccagtctagacgagaaaattatactagaaaccaagacgtcaaccacgtgatgcggcttaagggtgtgtttgattcgtggtagggtatagccatccctacccctatgagcaaatcctggagagattgaagtcaccacagacgtttcgctgtcgacaagtacgtcacctaccactgactgaaagcacaacgtcgcgcttcgctgtcgacgggtacgtcacctaccactgaaagcacaacgccgttaaatcctggacgtttcgctgtcgacaagtacgtcacctaccactgactgaaagcacaacgtcgcgcttcgctgtcgacgggtacgtcacctaccactgaaagcacaacgccgttaaatcctggagagattgaagtcaccacagacgtttcgctgtcgacaagtacgtcacctaccactgactgaaagcacaacgtcgcgcttcgctgtcgacgggtacgtcacctaccactgaaagcacaacgccgttaaatcctggagagattgaagtcaccacagacgtttcgctgtcgacaagtacgtcacctaccactgactgaaagcacaacgtcgcgcttcgctgtcgacgggtacgtcacctaccactgaaagcacaacgccgttaaatcctggaaaattcgctcccacagggagttgaacccaggacctcatgtactactgaggctcttgtaaccactaggctacaagccctttcacgggtatagccatttatatttgtaggaatatggtggttctgtttgttttatggatatatgaccatccggataggaacggatagagtaaaatcaataacatattaatcaatgataaatatgttaattatcatcaatatagtcatatctatactaattaacaataaaatggactaattatataatcaacactaattttgacaagtcaattactccatacgcttcaaaatataagaaatctataactggatgagatattaatcatttactaatgattaagattaccaaatgtggatatcctcatccggtcaatttaacccactcatctagtatcttcgtgaaacattttctctttagaccacccaatccattcttacccatcaaccaaacatatttaaaaactggatcgtcatatcccatttagtgatatcactctaaccaaacacaccgttaccttcctcccacccttaacccccatcgcattagaagctgagaagtagctggttgatagctattccctccgtcttataacatagtaatccaaaactgaataagacatttcatattagaacaaatctggataggatggtatttagattcgttatactatgaaatgttccatccgattatagattattatattatgggacggatggactaacttttgagaatctggaaaagttgaaaaactagaaaggctaggtttccaaatttttatctttatttattttctatattctataactacaacttcttaaatctaacttaaaaatttatattatcttaaaatataacttaaaaatttatattgtttaagggagctaaagatttaaataaaagctatagcggttaaaaactcatcaaacagagatactcctagttagcaaaggagggtggcatttcggcttgggaggcccatcgacctcatatctccggcgaaacggtataagccaacaaggcaacaatgtactactacacgtcaagcgaggacggtgactttcgtggaggtagaggactctgtctgaactgttttcattgaagaaacggaattgaatacaggccaagtgcgcaggtacaccatagtcacctattgatatatatacgtacagagaaaatgaactacacgtctatctacacttcaaccgtctctcaactcacatcagtaatttaatttccggtttatcccaccgcatatccgtttgttgacatttttccatcactacttattaagtgcgaaatatgatgactgctcgctgtaaactgcaaggaccatttaacaggcttagctggagcaggatgaactcagttgctcgttttgctcatttctcatttccttctatttaattttattacctgtaatttttctcatttttcactgaaattttagtgagtccttcaaaaattaaataaaaaaacagaaaaaccagctggagtcgaggagtggtcgctgcatgtttgtgtgcagtgggccaacgaaattaaaccaaggttttctggtaatgaaggtccacatcaaactatcctctcgcatggcacagttaatgctaccaacgggtggtcgggtacagaatttaaatgctgtgtgctttaagccaaatgtagagaaaaatgggtctttatttatttcgaaatatctcatggccagccgctctcaatggtgtgactaatcacgttcaagccatgatatgatggatcaaggcgagacaagaaaaatgtatgagcagtcatgcgagcaaaagtagtagtactgatgagtgatgccccttcaaatatcataacctccctgatcttttctataattctattagaagaaataattaaaagatcgatcacacataggctctgctaatgaaaccggtaacaaaaatttaatcaacttcctctcttcatctccagcatatgtacaacatactacatgcacagggattacaagctgcatgcaaagcttagcattttgcaagaaatcaacaaagccaattaattaatactcctccaatagtagtactagtagccaaggcccaacgcaacaagcacacctcgcagagagcacagagacgtacgcagcaagtaggtcgcctcctcctctctctctctccggccatcaccgccggcggccggcgatcgtaggtagcgtagagctagctggcgtagagcctgtagtggcggtaggacttgagcatggcgccgcagaaggtgcagatgatggcgcgccacgtggccctgtgcacggtgagcaggtagcagaagcgcgtcgccgtctccatgtccgccacgctcgcgcacccgccgcaccgcgagcagatccccgccgccggcttgctgctccggaccttcctcctctggtccaccaagaagcagaagaacaccatcctcctcgtctccggccggccggctcgccggaatctcaaataacacgatgtgtggagtggtggtctctgacggcggcggaggtggtggtggaggatggcgcaggggggttttaaggaggagagcatatggatcgcattgatggcggtggtagtgaggtagcgggtaggagaggagagaagggggtggaggtattaatggcatgtcggcttgatggctggacggctggaccatgatgcatgggcatggcgcgttgtatgccactcttgactcccggactccacttgtccggagtaatacaattacagttgttgtttgttaattttttttcttttgacttaatgtttagtacgagatagatcagaattgaacaccgccactccgccacctaaaaaaactgactggcaattctggatcttcgatcagccagaaataaactgtctgaatcttctttttttttttagaaaatttctgtctgaatctttgatcagcatgtttgtatatatgtgatgtggagaagtaggttacgatgtttctcatcagttttatactagcacatttaggcttcctttagaatggaggaatctggtgagaattttacgagttttgaaccgattcctgctaaactgtcgtaataaaatccctagtagtacattttaaatgagccgtcagtgtctttttattttccagaaacagcactagagcgactgagtggcagctataaacatcgtccagaaattaaaaacagggacagttaacacgtcggtgtgagataggagtagatcgcacgacgctgactgcccactgggaggtaagagtctgggtgcgagctaggctgcgaaggaggaaggatgatagccagttggttaatggatagacagcaggagctagcagatggatcgcaagtatccgtcaaccaatttattagttgtgccttcgccaattccatttggatttcacacgaaagcgcctcgtgaagcaagcaaaatatgggtagagagagccttccctgctaagcaagcgagcagtcgatcgagcaatatattcatttgaccgatcactaacttctctttcgaagtaaatgatgggtcactaactaactgtctaactgtatagtaccatttgtaattgcagatcgtttcagagtatgacaaaggcaatctccatcagaaaaggcgccaacggtctccttttttttattctttttgaaaaagagaaggcgccaggcaacggttcttttaccaattcttacaggtttctcttgtttcagccagggatcaccctggagcttggggaggaggaccacctcctttgatgttggatgggatcatcactccaatactcagcatgttcatcaagtttgatttgatcccaggggccagggctcacattaaacttggtgaccacttctacgcaatgataggtccatatgaacacactactcttacggtcttgcccctcaagcggtcgattagttgggttgccgtaaatgaagtaccctttgaaaaatgtaattcacatagatgatggaataagataattcttatacggtctctaatagagtatttataaatatcaagttttacatgacatacaaatatggtacctcccgaaaacgataaaattacctatggaatcataatgaaagtcaaaattatacgttttcttactacttacttttttagtaatggaggaatgtacgtagtctgtctctgttcttactgtttagtgtactgctggtggaatcgaacattaaaaaataaaaacaccaatgctaatgatcttatataaaaaaacatctttttgaaccaaaaaaatgctaagaaaatatcatttccatcacattttgcatcccaatagcatgggacggaaacatatactctaactttaaatgattgacatgtgagcctcacagctcgtaggctcataggttaacgacacatgtcggagaactgtatgttagaggagcttcttcggtatgagatggcattttcctcctcaccgcttctttaatttcattttcatacacttttgtttttactacaacattcaactattgtataatcccaaatttaaaacagcgttcttaattaagcttatccaaacctttggatattagctagagaagaattatggtatggagagaagctagagagttcaaagaaccaggtgactagtcgttgtctttagtaaaggtggttctggcatctctagatgttcttccaggttttgactgccttctgttgcgtgaaaaatatactggtgcttatgtatacagtacataactataagtatatcttcttcaaatcttaatacaatcggttgtccgtttcttcggccaacccggccaaaaaaactagagaataattaattaattttcaataactagaaaaggatccataatatttaacaagcaataatgaattttatacattaaataaaatatataaataaatggatataacttttattgggttctatatatttgctcacaagtcacaactgctctctgtaattttggtcttcatttcatttatttattttagctgcttagaaggcatgacgagacataactacatagggtattgattattaaacttgtctgaaatgttatggcaccaaaagtagctgtaagagttgttgcggcgatttaagatgtgaaacgtgtgatgtcattagctttcttataagagtgtgttaattttcggtagtaaatcatggctgtcacatttgtgatgttatgttacgtacaggtcagctaccgcaataccgcaaataggatgaagcaaatgaatgattagcacacccaccatcgtccttttttcatcctactagccaagaaccaagagaaaaaaaaacaatgagttttagtattaattcgattaaacatatatttaagttaaatagtttttttatgattttccttattgaataaataggtgattttataatttaagaagaatcaacagtgaatcagccaggagatgaccgttgaagggtgtgggttgattaatggaatctatttgcctactccctccgtcccaaaatataagaatgtttttatattttgggatggaggaagtagtcagtggtgtaatataatactccctctggttctatattaattgacgttttggataagattaaggttaaacttttataactttgaccatcaataacattaaaaatatttagtttaaagaaactagaaaaacatatatagatttgtctttcaaaacactataataaaagtaaacatgcatttatttattgtatatattataatagaaaaataaggtcaaagatatatcttgtagagcgtgtcaatgtccaaagcgtcaattaaaatgaaactggagggaatattatataatactagtagggatggtgtggtagaaaaaccaccactacatatacatacagtatagaaattcttcattgtttacattattaaggactactcatacgtaccattcaatcttatcttcaaagtttccaacctcatgtatgccaagccaatccttgctccactacatggagtgcaaatgctacccaatgtatgtcaatcaataaagtgattaatgtagccatgtagggcaagtgatacaagtcatgaacagatcgatatttattgctttgctagttgctactgcaatatacatgctcaaatagtctttaattatcatcttgattcttttactatacctagcatatttcccaagaaattaaagaggggagctatgctggatgttgttgcccatgctgctggcagtataacttgggctgtgtttagttacacgctactaaaaatagaagtttaaagaaattggaacgatgtaacgaaaaaattagaagtttgtgtgtaggaaagttcgatgtgataaaaaaattaaaagtctaaagaaaaaaaagttggaatcgccttgagccatgactgcctccaaaatcggtgcttccttaactcggctgcattactccgtttggctgcattgctccgtttgtcacgctcgcactgattgtcttgtcgttgtagatcagtcagttaattaggaccacacgcaggcagcgcaattagagcaagtttaatagtataaccaactactagttacaattcaactatagtcagtctaatagctcgtccatacaatagttacatactgcactattaatacctggttccacctgtcatacacactgtgtcttggagtccgtgctacagctaggtataaatctgtagcccactgctctcttatttatcttcttaaaatatatttacagctgacttatagcctactattgtacctgctctgcctactcatcctcatatcctttccttccttcgactacagggaattagtagaagatgggtcggtctgacacgtaaacacgggtacattaagttttttggcccatgtagtatttgctgacaacgacaagttgccaatcctgccatcgatcggggcattgtacaaagtctcgaatactacaggaaaagtaagttccatgacatcgaggtttaaaagttcaaatttataccatcaacagagcagatcagagtacatttaaaacatttctgagaataaagcagtttaagcggcagcagcgacggcaaggaatcacggcgctgatcccccaacgccggcgaccggtcgattcctgaagccgccggccgccaccgtactcgtatattcctctccacccgtgtgtcgcgtcgatcgccgtcggcggcgggcggcggcaacttctggtttatggagaggaacaactagggtgggccggtgattggtccagtttcgactaaacggcccaattggttcatggcccaggcgcatcttaggggttcggagatttcttctccgtaccccgtcgaaacatacgcattcgccgttgtggtgccctcgtatcgtattaccggacacctacgaggaatcatcttcgctgtgtgatgcttggcaactcgccggtgttctttccctcgagggtcggcgcgactacgatgttgtctaccgttcatatcgacgtcgatcatagctccacaatagattagggcactatgtgaaaaaagaaaagcaaaattatgccaaaattaagattaggccaaggattttgagtaagaggtgtgtacaattctcgagtcatgaattcgtgatcatgggcacttcacctcgtagaagttgagattacacactaggctgcgtttggatcctcggcaataaacatactagcctcgcttagtaaggtgagctgtttggcactgcagctaaaatgttgctaccgtgggcaagattacctcattttagctaaaatgtttattgggctttagctgcaatgggctagcccatgcttatcaggctaggaaagccgatcaagggatctgcgcgcgcatggcacgagtagacaccgacctgctcccatcaattccattgacccacggcccaggcaagcccactggcttagctagttagcttctccccaatcctgcagatcttctcgtcttcttcgacggttcaatccaacgcctggtggtctctcttcgtaggggttcgggacttgggaggtctgcgtcgtcgccgttgctggtcgacgaatcgcgtcacccatggcgcataaaggggtaagcctactgtttccatgtatctaaaaattaattgagaagttgtgtcagtattgggacgacctcaaggtgttcgatagaatgcccagaagactcaacatgccgctgcttcgtcctatgcgccaacacaagcttcaccacgaacaccaaacacacgaattccaccactctaccaatataggttttagcattgcacgcggccactccatgatgcgcttattctacggtgactaacgaccagaaccgattgattgcagcccgacgtgcctgttgtcagtggcatcaacagcggcagcacggtgaagctcaaagacctcgccccggcggccaccaacaacgtgaacacgacgttcatcgtgctcgacaaggcggccagggcgccgccgccgccgccgcacggccgcgccgacgcaagggaggagacgtgcctggcgctcgtggccgacgagacggcggcggcgcacttcctcctgtggggcgccgagcgcgacgcgttcgagccgggcgacatcgtgcggctgaccggcggcatcttctcctaccacaggagcaacagcctcgtgctgcgggccgggcggcgcggccgcgccgagaaggtgggcgagttcacgatgctgttcgtcgagacgcccaacatgagcgaggtgaagtgggtgcgcgaccccggcgaccccaggaggatggtgcaggaggccgtcgtctcgccgcactctcaggtcttcaagccgctgcagtgactgactgactgactgaccaaccaacctaaggtttggttcttctgtcactgaatttttttgtggcaccgttgtacaattgctcaatgtcgattaaggtgtgattagctcataaaaccttgctttgattaagggcaaattaaactggatgattgagagagagaaaaaaaaaactcgtagggcatgtttggcatagtctccatcctttgtttggtttcacattgaattcccttcaaatctcacgaattaacagacctccctaggtaagagattggtgggaattggacccttaattctcccaaacactctcgaattttcaagtattccaaccaaactacaaacttatactctcgaaaataatactcccattttccatcaacaactccctccaatcaaacagactgatacggatactgatgcagggagtttttagagttattgtactttctagaagtgtggaacgaataaccattaaccaatacgaaaaatatcgtacttctagaagcgtggaatgaataaccagtatggaaaattgttttcatcattgaagaaatgttatttacatgtcagtcagataatcatcagaaaagtatccccatggtgtccgtagtctagtttaagataattttctccattacctactactcatagagtacaaccttacatagtagtttttagtgtaataacgggcgcacgggcgcgtgtctgcccgcaccgctgctaggggacacgcatgtaataacgggagccgtagagatcgcctcacccgacatgaattgattgatgagcccgcagagataatctcttatctgttcatcatcgtaaaattgaagttacgaattgggggagaaaaagatgggcctgtactttgacacctacttctcgtatgaccatgtccatgtaaagaagcaacgggaaagagagaaggagatgatggtattttcgtccaatacatacaaaatacgtatcttagtagcaccaatgaaattacaaacaaatagcagtggcatcgtttgaaatacgcaaaaagtaacagtatatttcaaaaccaataaaattttaatgatatagatctaattaatccattaataaatcatcacttacatagatgaaatttagttcagaaaaacaagtagtaagagagagaatcttccaatccctctcttccagaatgtgtggattattcagagaactgaacacacgtccagccaaatcccgaccaaaaaccatcatcaatcagccgatcctgatgttgtccctgccgcacacgagcgtggtggcccagttgaccgccacgtagaacctgttcctccagctcaccaccctcggcccagacacgcccattggctttagcttcttcccaatccaacgtctggtggtctctcggaggtctgcgtcgtcgccgttgttggtcggagcatcacctgggcggtgtttccctgtctgtcgagcatcacccatggcgcataaagaggtaagcctactactgtcttttcgcatgaatgtaaaaactcttagagaacttgtgtcaggattgggacgaccttaaagtgttcgatagaatgcccagtagaggggagtgggttataatctctcgagacgatagctccttattaccagagcaactagaggttggctgccttccactgctgtgctgtgtgttgcaatatttaatcaccaaacaagtactaataatctattgatttatctttgcacacaatatttaagtattcttgtttcttcgatattaaataggtagattattaatgataaatagattgttgtgagttcaaacatattagcaggtgctttggcttactatgcagtgtggtatggtaggggagcatattttagagggtatgcacataagggtacacatatgatctctttttttttttacgaaagccacctttggatgagcatagagtatagttgtgtgcgggttaccttgcctttaaggtgttcgttattttctatcagcacagagtatgaaactatcttaaggtgtacgttcccttcttgcctgttccgtgacgcacccatgcgcgaaggcgcgagctcagctcgtgaccacgacgccgtatcgcctcggcctagccagctcgcaagtcgcaaccgattccccatctccgcctctgctcatctccactcgcccgccgccggctcacctctcggcgacccggcctcagaaagcgtcggtggagcggggccgggggcccgtcaaccggcccatcaaacaagccgttggcaacaacgcgtacaggaagagggagaggtgtgggtgtgtgcagttaggtgcggcgccgccgccgggcggagtacatcacttcggcggcgctctcccggctaccgagcatcacccatggcacacaaaggggtaaccccgcagtttcctcccaagtacctcacatgtgggatttgattttgttgttgttgttgtgtcgaggcgttgagaagttgtgtcgatcttgggacgacctcaagatgttcgatggaatgctcagtagagccaatgatctgctgcttcggcgtacgcctacacaagcttcagcaacaacacatcactctaccgatatagatatcgactgtgcaagcggccaattcttgatgttttacagtgtaactttgactaacaattagaatggattgactgcagcccgacgcgcccggtgtcagtggcatcagcagcggcagcacggtgaagctcaaagacctcgccccggcggccaccaacaacgtgaacacgacgttcatcgtgctcgacaaggcggccagggcgccgccgccgccgccgcacggccgcgccgacgcgagggaggagacgtgcctggcgctcgtggccgacgagacggcggcggcgcacttcctcctgtggggcgccgagcgcgacgcgttcgagccgggcgacatcgtgcggctgaccggcggcatcttctcctaccacaggagcaacagcctcgtgctgcgggccgggcggcgcggccgcgccgagaaggtgggcgagttcacgatgctgttcgtcgagacgcccaacatgagcgaggtgaagtgggtgcgcgaccccggcgaccccaggaggatggtgcaggaggccgtcgtctcgccgcactctcaggtcttcaagccgctgcagtgactgactgactgaccgaccaaccaacctaaggtttggttcttctgtcactgaatttttttgtggcaccgttgtacaattgctcaatgtcgattaaggtgtgattagctcataaaaccctgctttgattaagggcaaattaaactggatgattgagagagagaaaaaaaaaactcgtagggcatgtttggcatagtctccatcctttgtttggtttcacattgaattcccttcaaatctcacgaattaacagacctccctaggtaagagattggtgggaattggacccttaattctcccaaacactctcgaattttcaagtattccaaccaaactacagacttatactctcgaaaataatactcccattttccatcaacaactcctgaagccgccggccgccaccgtactcgtatattcctctccacccgtgtgtcgcgtcgatcgccgtcggcggcgggcggcggcaacttctggtttatggagaggaacaactagggtgggccggtgattggtccagttttgactaaacggcccaattggttcatggcccaggcgcatcttaggggttcggagatttcttctccgtaccccgtcgaaacatacgcattcgccgttgtggtgccctcgtatcgtattaccggacacctacgaggaaccatcttcgctgtgtgatgcttggcaactcgccggtgttctttccctcgagggtcggcgcgactacgatgttgtctaccgttcatatcgacgtcgatcatagctccacaatagattagggcactatgtgaaaaaagaaaagcaaaattatgccaaaattaagattaggccaaggattttgagtaagaggtgtgtacaattctcgagtcatgaattcgtgatcatgggcacttcacctcgtagaagttgagattacacactaggctgcgtttggatcctcggcaataaacatactagcctcgcttagtaaggtgagctgtttggcactgcagctaaaatgttgctaccgtgggcaagattacctcattttagctaaaatgtttattgggctttagctgcaatgggctagcccatgcttatcaggctaggaaagccgatcaagggatctgcgcgcgcatggcacgagtagacaccgacctgctcccatcaattccattgacccacggcccaggcaagcccactggcttagctagttagcttctccccaatcctgcagatcttctcgtcttcttcgacggttcaatccaacgcctggtggtctctcttcgtaggggttcgggacttgggaggtctgcgtcgtcgccgttgctggtcgacgaatcgcgtcacccatggcgcataaaggggtaagcctactgtttccatgtatctaaaaattaattgagaagttgtgtcagtattgggacgacctcaaggtgttcgatagaatgcccagaagactcaacatgccgctgcttcgtcctatgcgccaacacaagcttcaccacgaacaccaaacacacgaattccaccactctaccaatataggttttagcattgcacgcggccactccatgatgcgcttattctacggtgactaacgaccagaaccgattgattgcagcccgacgtgcctgttgtcagtggcatcaacagcggcagcacggtgaagctcaaagacctcgccccggcggccaccaacaacgtgaacacgacgttcatcgtgctcgacaaggcggccagggcgccgccgccgccgccgcacggccgcgccgacgcgagggaggagacgtgcctggcgctcgtggccgacgagacggcggcggcgcacttcctcctgtggggcgccgagcgcgacgcgttcgagccgggcgacatcgtgcggctgaccggcggcatcttctcctaccacaggagcaacagcctcgtgctgcgggccgggcggcgcggccgcgccgagaaggtgggcgagttcacgatgctgttcgtcgagacgcccaacatgagcgaggtgaagtgggtgcgcgaccccggcgaccccaggaggatggtgcaggaggccgtcgtctcgccgcactctcaggtcttcaagccgctgcagtgactgactgactgactgaccaaccaacctaaggtttggttcttctgtcactgaatttttttgtggcaccgttgaacaattgctcaatgtcgattaaggtgtgattagctcacaagaccctgctttgattaagggctaattgaactggatgattgagagagaaaaaaaactcatacggatactgatgcaaggagtttttagagatatattgtactttctaggaggtggaacaaataaccaatacggaaaatatcgtacttctagaagcgttgaatgaataaccaagagtaaaatacaccagcggtccttaaacttgtcgggaggttttacttagttccatgaacttgtaaagcgcacatcgagttctctaaacttggtttattgtattattctcgtccaaagccgcgtttgaccctggtcttgcctacgtggcacgccacgtgaacgataacatgg

SEQ ID NO: 9364 - DNA, 10249 bp, Oryza sativa
  unsure (1)..(10249): unsure at all n locations
tcccccccccccccccccccaccactacagtctacacaacacaccggcgcaccggagaaaagcgcgaggcaactaggcaagccagccacgcatgtagccggccgccaggcctgacacatggctggctgcccagctaggcgcggcggaccactggctaacggatggtcgcgtcctggcgatatcccactactctgacgatatggcacagtcacaggacactgtcccgccgcagttacacgtaccgatctgctctacacggagtactgatctgcagtccagccggactgtgggcgcgttaaagtaggccgagtttagttcccaaactttaaaatccaaaaacgtcacatcaattttttttatccacacaaactttcaatttttacgtcccatcgtttcaatttcaatcaaacttctatttttagcgtgtaattaaacacatccgtagtgtatagagaacacagtaccccgttacaggatcgggatctgtcctgcagttcgtactctgtagagattagagaacctactagcatcacatgagcagagcactggctacacacaccaaatttgttctgcacgccaagaaatctattgccgggcagtgaatgagactttcgccgcaccgcacgcaccgctcgtgtagtcgtgtgtgacagtgtgagcacgggtatcacaccagccggctatgccggctatacgcagtgctgtatagtggacgtcactgcgtcaaccatattcgaggcatttagcggagggcgacgtcgagacaggtggatgacccaacatgaccaacactccagcgccttctacgccgcacaagactttggagttgaatggcgctaattgctgcgaagtggagctcgggacctcttccagtttctagacaggtcacaagtactcatgatatagcggtggaatactcccgtgtacagttacttgtgtggcttccactcgcaggggatcgagcaagaactccgtgaagagttactgttagccagccgggtgcccgggcagcgggcaggcaccatgtggacgctacagtacgtaacatggttacagcgaccgggtttttactgaagcttttcttttcccttcttctctgtgactgattcgtctgataaaaggctactacttactagattttgtctcaacaacgaacttgcacttgcagtcttgcacatggcaagattcatgttcaagcaacaaaactacaaacgtgtgtcgttcgcaccaatgtttctgaggagataaaacgccggaatgcagcaggaggagcggagaacgcgtgagcgagagggataaactcgccacgaaacgtacgtaccgacggtgtcgccgagatggaacttcttggaggcggcccaggctgtgtagttggggctgcccatgatggtccacccggtcttgtcgcccacctcgtacacggccgccgccgccgtcgccgtccccgcccacatcaccaccaacgccgccgccgccgccaccgccacggccatggccgacgacaccctgctcgccgccgcaccaccacccatgaccgagagcgagaggagtagagagcgaagtgcaggttaggacagtggcgagagtggcacaaaccggccggttaaataaaagctccgcaacttttcgatcccctcgtggggtcgtggtcgtgtctcctcccgaaaatgcccccgcgccgcggccaagctttcctttcggcgtgtgtcatcgccacggtgtgtcagtcaccgcgcgagcgactcgtgggtaaatttctctcgccttttatcatcgcggcgccgactgcgtgtggtgtggcggtgtgggggcgtcggctgtttgttgccgcttgcaagcgttgaatcggttgtgcgaatgccgagattgccctcgggcctcggttgtgaacttgtgatgttggcgcagtatggcctgtagctgaggcgtgatccttactccgttgacaacgtacagcatacgggatctctcgctctttgttccagcaaagatttttgtactctactacctccgtcccaaaataagtgcagttttacactattcacgttcaacgtttgaccgtccgtcttatttgaaaaatttgtgaaaaaattaaaaacatttagtcacacataaagtactattcatgttttatcatctaataccaataaaaatantaatcataaaaaaatttcaaataanacgnacggtcaaacgttgaacatgaatagtgcaaaactgcacttattttgggacagagggagtactactttggtttgtcggattggatttaggccctctttgtttagggttataagccaacttataagtcgaaaagtctaaacctaaacaaacaagcagcttttccgtttggcttttttaaagccataagccactctaacactattaagccaaaagttaggttagagaagtttttttggtttatgtgaggtagatatatgactcaactactaaacttaggacattaaatccaccggcttataaatcatataagccaataagctgacttaaaagtctaggccaataagcctaagcctaaataaagagggccttaatgctcgagatatactaatactactccctttgtttcattttaattgacgctttggacaatgacacgctctacaagatatatctttaaccttatttttctattataatatatacaataaataaatgtatgtttacttttattatagtgttttgaaagacaaaattatatatgtttttctagtttctttatttttaaagttattggtggtcaaaattataaaagtttaacctcaaccttatccaaaacgtcaattaatatagaactagagtgagtactgtcactagagctatattttttttccttttctttattcgagagtttacttttttttttttttgaccagcgtccaaaccaactcactcgagtctaacgagtacgagagacctgatctgtgcggtcgtgaatccgtttgaaaccgagtctgatgcttgtcggtgctaaaacattcggcccaacttacttgggctaacttgaaacggcccattattgatcagttgggcccaagcccacgtgagtccccgacagcataaacccctcttctcgtccctctcctcccaacctcgcttccttatccacaccaatccgccactcccctccgcggcaacccccccgcgctccgccacagaagccgacgccgacgccgcgcgcgtacatgccgccgctccacgccgtctcccccgcggcggcggccgccccgccgcgcgcgctctcctccgccgcgcgcgtcccgcagcgcccaggtaggccgccccccttcctcactcctgctgctgctccgcgcgaggctttggccttggaacccactggaggccgccgaggcatatcgccatcctggaaaatgcgtgacgcctcgttggttgctgtggtttgggttgatcgtttcgctgcggtcgtaactcgtaaccggcttgatgcttccgttgtttctccggttcgcagaataaggtggtttttgtggctatgaacaacggtgattgtatctgtaatagtatagcatctaacattaccgaacaatctcgttttggtagttggatatgcctttggttcaggatttcatggccagattaagtttaacgatatcagcaagacgaaatgcttcaaacttggtgggggtttacagtgtgttccccccaaagctgctggggtttatattttcacttagtaaatactactaaacatcagaaaataattgccactcgttagcccctaatgattttgacgcattctttaaaagactcgttctaatggggattgtctagcattcttgttggctgcccagaatccagacaactttggtggtgggtgttaagggcaattgggcaccctgagtgtctgccggtgaatgaaccatcattctaccaatggctctgcagcagtcgaataagaattcgagagcatcttcggcggggctttgacacggtagtcacgctcgtggcatggacaatttggaaagaaagaaatggccggatattcaatcagcaacaaaggacctgggtggacatcgtgaagggaatggcggcagaggccacgctatggcgtcaagcaaaccaagccatcccagctctgatctttaggagggaattttgtagccaaaacagaccgcgagacgtacacctttgatttcctgcttgtatcctgtctcagtcccatgctgctttgtatttgactgtaaataacttttattcctcttaatacaaaaatgcgctcctcgcgtattcctatatgcatggtctcaccagaggatgttgtgcttgacaggttgtgttccagaacgcccaaacattttaagctcctccacaaacttcatgagtctccgtgctggaccaatgcgcttctatagcaggcctcttattcttcaaaactcggacaagaggcaagctactttggatttaaatatttatcccactgatcgaccctccacattaagctttaataacttgtgattatcatgttatcagagcagtattgaggcatgccactattgaagaaattgaggcagaaaaatctgtcattgaagaccaagctgtaagtgcaatgcatcttctcactgaatgggtattttgccttccttttttgtgccttgggggctcactagctgcagatatgcatcttcagagagaaaggatggaaaaggcaattgaaacagtccaaaataacttcaatactgtgaggacagggcgggcaaacccagctatgcttgacaggattgaggtgtgaggacttagccttgttcctttttctgtttgtaagtaactcttgcatgatcacatcttttatcattacactcaatgcatactttatcattccatacacatgctactgttgtgtgcttttcttaactgaacctatgtctgggctggtatttattgtggctggctaataacaaacacaaacaaggaatgaaactattgctcaaataccatatgcagactgtttggataatttgatcgccttctgtaactaaaactagagcaaaggattttctttaggacagaaaattgtgaaaattgaacatcctattatgccttatgtgtgagaattttgttacaggttgagtattatggaactccagtgaacttgaagagcatcgcacagataaacactccagatgcaacttctctccttattcagccatatgacaaatcctcgtaagctgtttattattcccacttcagtgttggtattgagttttccatcaatagtgttgacacaatgacactcatgcggtgcagcctcaagctcattgagaaaacaatagttgctgcaaatctgggggttacaccaagcaatgatggagaagtgattcgagtcactgttccaccattgacttctgaccgcagaaaggtaatgctttagaatttcatctgtgtgaattatgtgtggttacttggtaattctgggtccataattccatatggaaaattttgtttggcaagtttgtacgttgcgttttcttgccatccaaaacattaaggattagctgagcagagctgtattgttcctgagaacaaaaaataaatgccttatgttcattgaagttacagtattttgaacttcaaaactttgcattcaaacccacatagacacctaatttgtgtttacaagtatgttaacataaacaaggccgatgttctatacaaaataaggtctctaaaatgtatgagatcaccaggtatcacctttactgatgtgggagtatttgtcttgcctcaaacaagaaaagtagaaattgctttggacatgccatgcacaaaagactagggtatttcataaaagacctttatgatggattatccagtaagctgtgatattattgaattgtatttgatgaattgatgtacaactttcttctatcttccataaacacaattgttatttagtatacaaccgtagcgatcaatctacaccattaaatctaaacctaccatgatcgacagcataaatttttctattttccccgaaaaatgtgtttatttctaggacttgagagcccccttttgccttctcttagtactaatataatacatgtagttggttgaattgcggtctgctatagctttcaaacaggttcaataatattcatagatgttttccattgattataaaattcctgccactttcttatccatcttagattcaatctgttttggcaggaattggcaaaaactgttgctaaattagctgaagaaggcaaggtactcttaagcttcacctttcactgttttttactgaaacattctttttacatttttattgtgatttaatgtttttatgcctcaattttccagcctattatttttcttgtgcacccatactagtatgattagtacagcactttagcggtctgattgactctgctaacctgcatttggcatggtgctggtactgcttgtatggagtaatgtagtgcgaacaatagtcgatgtaccgtagcatctggccagggaagacatgaggaagacttcgtcttcttcagcaggaatatctatttccctaattgattaaattaccttcctagtttaaggatttgctatcttgcatctgccagttcagaaagccctcttttttgtaataatggcattgtgatcgttttcattaagcaatatataatctataaacagctagttccatatatttcccctgtactaatctaacagcctcatttcttccttggcgagtaaagtgccctgccagcgccagcagcaagatgatggcgggtggcctgccctcattagctattactgtgcacataacagccatattagtttagtaatactgaatgaatgtatatctgaattttttttatgatgcatcagttgaccagatacttagcacttcttcaagtccatttctgctgcatcttctatgtgtattagttaggaaggtggagcatagtatgagctgtagtggaagaggctttcacaaaaattgtttgccatgcaccctttgctcttggtgctgcacaaatttcaggagtaccatatgattgttgctttgttggttatttatccaatttcttcaaaaggctgaagcacattgatagttttcagaagatgcttttactttatagaaaatatgcttgcttcttttttgacgcctatgtgctgccttctcattgttgagtagcttatacacacaaattttcactgactgataacatattcatctccttgtggattctatgtaatatcgattattaatatgactaacttcttttacaggttgctataaggaacataagaagagatgccatcaaagcttacgataagcttgagaaggtcacccntctcagttaataatactattttgtgggtgctattgtacctcgcttttttgcagtgaaattaactgctttcacatgcttacataggaaaagaaactttctgaagataacgtgaaggatttgtccgctgatctacaagtaaggattccttgcctttccttcacgtggtttagtgaggttcccatgtcctttcggaatctcatctattagatacaggtatgcaacatgaactgacatcgtgtacaaattatgcagaaagttactgacgagtacatgaaaaagatcgaagctatccaaaagcagaaggaacaggtaatttggccctttcattggtctttcttcagacaagatattccttcatgttggacacaattgcatgccccaaggataaatggcttgtctgaaactagtatcagcattgctatcctgtaatcctttaatcctccagaaccataggaattgactcgggcttgtttgatattttcattttcaggaactcatgaaaatttagacaccaggttttaatcttgaaattggtgagttcatcttcctgcgaagtagatgaagccgaagaaaacaatgtcctcagctaacacggtgaattatgcggtcacagatttcttgagccttttccatctttctgatggccggcattttgccggatgcatctttttgggctggagtgcaatttcagacaatgttgccgtgtccttcattttcatttttgtaattattgtgtgtactccgtgtaaaagtaggtcttgaccttatccttgttctaccgctacattgtcaatattcctcacgtgaattaaaatgctacagttgtgaatttatcgccacgcactctgaagcatcaactactggtgccatattgccagttatctccatgttcagtggatctcagttttgtcagcagtcaccgacatctggaccttcgcacattactctatgtcatcgcacggactgacggacaatagcaaaaaggccatttttctttcttaaacacgcatgccttcatttacacgcgcgtactgtacactcataaattcattcctatcagcacacagtatatttctctaagcacatactagtatgaaaactgaaccgatatgttgagttgatgaagttattactataaacgtttcacatcatctactattgagaaaaataattagaaaaatcgtgaagttttgaactcaaggttttctcaatggatacctttgaaaattgtttcaacctctaaccaaaacagccaagaaatatatcactaaaaattaatacccatccacataaatatgaagggcgccccaattagaatcaaaggaaatagagaaatttctcgtaataagatcagttataaataagagcacatgtgttaaggtctagaacttgaagctggaggggtagaatcattcgtaagaaacttttttttaagtaaagtgcatggttagcacctaaacttgttcatctgtgttacttttaactagagtagttacctaaactcccaaaatgtatttttacatcaccaaacttgttaagtgtgtcattctggtccaaaataaccacaacaccttcgggatcttacatagcgctgacgtcgcatgccacatgacatttattattattattattattattattcctttttctctcttcttccttcctgtttgtatggcaaaagaaaggagaaggtagaggagaaggaaaaaaataaaaaaaatgtggttgaaatatccaggtaatatgccacgttagcgccatcgtcaccacatagtatcctagaggtgtcgtggcaatttggaattggattgacattctttaacaaatcacaaacctaaaatcacaaacctaaaaatatattgagagttaaaaaacttatataacgcatgaaataaatttaggaactggtcgtacacttttttattattatttctgaaaaacctcggtgagtgagattagatcagttttttttagtttattcgaagattatagatgagttaatgcgcctgtaaacctcagatgtggttggaaaggatgttttgttttgacacgaccaggaaccaaccggctatacccggtcaaggcctcccataggccaatagtccgatccactacacagcgtgtgtcactgcagcaccggtgtcgagtcgacacgtttcacgccgacaacgaccagcctgcgataattacggacaccgatgccgctcctgcagtacgctgggggcccctctgaccccgctggataccctgctagagtgggcaggtcactgggcccacggcccaccaccaggtgggcctgggagcagagcaagtgggccccagcaggttacagtactccacggagtgattgtaactgtacccagcactagatggattaggggatgatggtgtgaggttagcaactgttctgttcttggtcactactgtagtactaatccatcagttattacagtatcatgagaacaatgcatgatgtctctgtccaaattgtctttttcttttaaacgagagggccgcattactgtttatccaggatctaaaatatcaaagcaacaatgaaatcgagcagattacatgaactttcatcctttttaaaaaaaaatgatcctttttagaaattcctttttatagataggttctcaacgtcagttttattggctctaacctctctagtacatctcaactgttagggtgtgagcgttagcatcattagcgccgagaagttaggcctcgagcccattcttgaaattagctttttcatcagcaatccaattagacaaaaaaaaagatcatcgggacaaggagcaaaacatttgcggattgcggcatgcaaaccaagcaatctaacaacccagcagtaacgaaactcgtgcaagaaaaaacccaaagccaaaggcaagacttggggg

SEQ ID NO: 9365 - DNA, 71823 bp, Oryza sativa
gtttagttcctaaattttttttaaaaaaacatcacatcaaatctttaaacacatgcatgaagcattaaatatacgtaaaatctatttggagaggcctctcgtttttgccttaaccagcgacacctgaacgtgtggagaaatctactatagcgtactacatgcatgcattttttagaagtctactacatcacatgtatgttattttcctcttcaaacaaagttttctctcaaattacttatccgacctacaatccgattacaccattgtgttcgttacaattaaatcttcacagtaagatcttacatgattatattacgatgaaaaaatatttatatttgtaaattacttttattatatatgtaagttactttttatcatatatataagttacttttaaatttgactaaattacttcttagatatataaaagtaaattcaatagagtctaaaagtaatttacatatattataaaagtaacttaaaacaaaacggaagtaactttgtcacgacattagaagtaaattcgttgtacggataaaaatatgactttatctaaaaataaaatttaatcagcacaaatcaacacatgtaagtttaacaatttttaaaagtaactttaatgttaactgaaagtaacttttgcatggttcaaaagtaactatatataaatctgcttaatcatcgattgttttttttcttttatttttagctgtgtagttacgtccaatgaaaaagggcattcattaaagttactttccttttgttataagttatttctataatatatgtaaattacttttaggctttattgaatttactttcatatgtctaaaagtaatttagtgaaatctaaaagtaatttagatatattataaaagtaatttatattttttcatcaaaatataatcatgtcggatcttgttataaagatttaattgttacgaatacaacggtgtaattggatcgttgatcggatgagtagtttaagagaaaattatatttgaagtatatgtggatagtgtctctcatagatggagtggtagctggtttagacaaatcagctaccactagctgtatagtcacatccttaaatatagattaaaaaaactaattacacagttaggagggaaaatcgcgagacgaatcttttaagtctaattagtccatgattagccataagtgttacaataacccatatatgctaatgacggtttaattaggctcaaaagattcgtcttacgatttccaggcgagttatgaaattagttttttcattcatgtccgaaaaccccttctgacatccggtcaaacatccgatgtagcacctaaattttttttttcgtgaactaaacatgccctagtacgattcacatgtccatgccgaaacttctttttttttaaaaaaaattattcacgcttataacacccgcacacccacccatatgaacacacatgcacaccctatctctataagcaagacatattgttagattgacgaagtcactatggatgtttcgttgtccgtggcaaacaattttagatggtttatttaatgttattatatccatatttttttaacaagtctatcttatatcttatttatattaaggaaaatacgaactagtgttggaaaaaaattacaactaaatttaacaaagcctcttctccactacatccattgcaatcatgtccgctctatgttgtttccattcttgtcgattttgccatgggtgaaggaaaggggaaatagagaactaagtaaaatctggacggacaccaattacacagtagcttttaaagaccacaatagtcatccatcccaaaaaatggatcatagaaccattgaaaaaacatcgacaagtctatgccccaatcatagatcagatttgctccttcgccgcaattcatctacgcaaccatagccctccaccagtactagatggaccaccggtgaagcagagagataaggaaagaggtaattccaaataatgttatcatcatctccccctatgtaacgtgccatggacacagaacccatagccaattatgcacccataaaagaaatcacagaggcaagatgatcaggggatcaacagtaaaagatcctccataaacaaccaccattaacgacgaggaaagaaagaaaaacttatttagggaaaaacctaaacaaactactagatccattaaagggtggatttcccttcccctctcgtacccgcgcgccatgttggagaggaggaagaaggggactagtggatgaaacaaggttttttttggcagcgctaagggaggctctatgcaccaaagagagcccaagttgtattgacttgacgtggaacaataagttttatttgggtgcatcttttttgttacggagagtttttttttaagtgagatatgatgagagaagagaattgcccttttatagtagtagagcaatggaactcatggaattggtttttcgaagagttttaaaacaagagtgataattaggacggtttacgcaattttatcttaaattcagtgctatgaaaatagatgcacaacggagacacgaatttttacgtgaaaaacccttgcgggaaaaaaccacgggcgccgaccggcaatgatcactatagatgaattggatacaaacgcaggggatacattgggctgtcgcaccctccctgtgcggcttacaaggaatatatataggagaaatctaggagtcctaataggaaactaatcctataatacaaagtcatattagataactaatccgaatatattgtgggcccaaaatttggatcacatatttaacaatctccaccttgagatgaatttcccttgtagcataaaaaaacttcaatctccaaacaaccttgtgatgagaaatcaatgtgctccaaaatattcacttcgactataatccataacacccttaatccagaagaggtagaccatgcttcaaactcgccattaggaacaaatcctgaatctactggtatgatattgtggaacccagtagagacgtgaaactgatgcacaaatttcaaactcaccatgggaataaaatcctgaatctgctgacattaatttctagaatcctagcagaaacgcgaaaaattattatgctcaaaacgaagtacttagatctccttattaaccttccggtttgttgggcatgatggtagcaaaattcgccggacaatttgatcaccttgtgatctagacaggagcgaggctccctcttgaccacttgaatgtgcttctctttttttttcagcatacttctcctcctaggtaaataccccgctgcaaaaattcacttggcataatgagaatattgcatctcaatccaaaagcagtagatcaaacttcaaagtcgccttgggaataaaatcctgaatctgctggtacaatttgttaaaccctagcagaaacgcgaaacactatgggtgcatataacgaagttgatctacgtatacaacctcctggtaaacatggcttgtgaacgtagcacaaaattgaacctgaattggattcacccaaacagaaccgaagcaccgcaattgaattgaatccctggtacgaaggggcatgtgcatgcagcaaaaaaccaacgtgaaattcaatacacgtgaacagtaacaaggctgagtgtatctgctgatttttctttccttgatcaacgtgctggagtagatggattgctgctttttctccaacacgctgcgcggcggcaccaaatcccgatcggagtcgacggctgactccgcttcgtaccagctaatcttatctcagcaaacaaatcaatctgacggcagcgatagatggaacgacgcgacgacacgcgcctgctactgccgatcagatcttgcgacgagcgtaccggcggctaaaacttgcagatggggtctccaagcagactaactcggcagccaagatggtagtagatcgatgctctgataccacttgttatgaaaatagatgcacaacggagacacggatttttacgtggaaaacccttgcgggaaaaaaaccacggacgccgaccggcaataatcactgtagaggaattggatacaaacgcaggggatacattgggatgtcgcaccctccctgtgcggcttacaagggatatatataggagaaatctaggagtcctaataggaaactaatcctataatacagagtcatattagataactaatccgaatatattgtgggcccaaaattcggatcacatatttaacattcagcatataatcacccttatagtttgatatatcttcaaaacatttcaaagaacaaatttcacagtttaaagaataggccatagatccagggacccgtatgctcagttggatacttggatgtggacagtgacgggttcgaatgaaatgaaaggccgaagctttaaattcagagtaaatccagctttcaagcccagttcaaaaaaaaaagaaagtcaaagcccaacccataacatagcccattcattctagcccatgggccgattcagtaagacgatcaggaagtctcctcgtggtgtcttcctctcgaatccgagcgagacattggccttcctgattcctcccttcctccttgctttggtcaaccgcgtgtgtaccgtagcgcccagctccggggggagtcgccgcgccgaggaatatccgctcgcgactcgcgaggatgatgacgacacggaacgaaaagaagcggggcgcgcgcgccgtcgctgtccgcggcagcgtcagccgcctcgcctcgcctgccgagcaccagcagacaccgcgagaaagtacaaatcggagtcggagctagcgccacccaccccgctgtcgccgcgctgaccccttccaccaccaccacccgcctcgccttccgccggcagcggcagcggcagcgccagcacgcggcggcggctagcggccggcccgctcctccaagacatggccgcccgcttcggccccctcctcctcgtactccccctctcctccgcgctgctcgtcctctccgccgccacggcgccccgtggccgtcccagccaaggtatgggagggttgtggattgttcacgatcgtgtccgtgctagagatttgttgttgttgttgctgctgcttcgctgaccaccttgttgcagtggatgtggggaggcagctgagggaggagttgtgggagagaaaccaagggcacgagatgctcaggtcgtggcgcgacggtgacccgtgctcgccgtctccatgggaagggttctcttgccgatggaaggacggcaacctcttcgttgtcaagctgtgagttccctgaatccctcgttctcactctcacgatcacggccatccattggtgctattcattcggctttgatgagaatttatttggtcgttcctttgaatttgttatatatgcaagtatgaatttgagttgaattgcaactaatgtggtacatactgatgtctttgcaggaacttttcttcaaagaaactgcaggggccgattcccgccgcgattggtaacttaacagaactagatgagatgtatgtttcactaatctttttattccaagtgtattcgtgctatctcagatgcttgttttatattcttattattaattgtgggtgcagtgatctgcaggacaacaacttcactggttctattccagaatctttctttgatctcacacacttgctgaagctgtaagtagatgctgttctttaccatttgctcttacaataaaaaaaatgactatgcacaaattccttgtgtcattctgggatatcaagagttttacataatttagatcatgctggtttcagttgatatacatctcacatatggacatgtcttattaaacatgatcatttgtccaggtcagtaaagtgcaaccccttcttgaacaatcagctacctcatggcctatctatcagcgtggaatttaggtgagatatctgttctgatgttcaacgtatatgatcttgagtggcagtaacataattgtactaaacttgcttatggaatataaaagctatggaggctgcgcttatcatagtccacctggagcttccaatcagagaatagctgttattggtggtgttgccggaggatctttggcatgcacttttgcacttggatttttcttcgtttgtttcaacaaacgtgaaaagaatcctcagaaaaaagactgctcttctacaagaagtacgcacccttctacacaagtttgttcccttatgcttaatttagatagtactcactctgtcccaaaatatagcaaactagtactggattagacacaacctattaatacatatccagattcgtggtactaggttatatcaaatccgatactaagttcatatattttgggacagaggtagtaggtgttttacactcttgcaagtctctttttgctgtttcatttgcatttatgtgtccgtatgtgcatttcgtgtgcatgcgataagaagccttcatttggtagatgaagccgctcttatatatgtctcacactttgttagatgaacatgcatggtagtaggccttgaaatttgagagccgtgtagtaaacaggtttatccaatttttgctctttgatggaggctcatcaacagaagtaggagctgcattcatcagttcatcgtgtcctataaaataaaatacacctcataatcacttattgtctaaatactcaaaacaccaataaattctttctataatgttgtatgcagatcctgtttttgaagaatgtagcacccacaaagctacaaactctgcagtacaacagttatcccttaaatcaatccagaatgcaacgtgcaacttcaaaaccttaataggggagggtgggtttggatcagtttatcgaggaacattagcacatggtgaagaagttgcagtaaaggttcgttcaacctcgtcgacgcagggaacacgtgaattcaacaatgaggtacagatgaaacctgcccctgctagtataaaggaatcttgttgtgggcttggggtgaatcaaattccaaaaaagttgttcattgtgttgcattctggtaaagaagctaaatatggattctttggccgtaaattcaagaacaaggaaatggtagcatcatcagttgtcatattgttgataactttgcatcaacaatcagttctgtttgaaagaatacattaataattagttgtttagtttttcagtatttatctactgaaatcattgttttatgcaaagttctgatcatcaatcaatcaattgacacagttgaggctgctttctgctgtgcggcatgataatttggtcccactaattggatattgctgtgaaaaggatcaagaaattttggtctatccattcatgtccaatggttctctacaggatcgcctctacggtatgaggtttcattagatttaatcactttcagtttaagacccttctttgataaataatatatttcttaggtgaggcgtcaaaaaggaaagttcttgattggcctaccagactatctgtttgcattggtgctgctagaggttagcatttagcactgtcttttttgtctggaaaggcctcatcccattgtttttattgtgattgaagaaaatcctttctgtgcaattcagggacataagttactctgcaaatgtctcaacattgcaaacgctttctatcatttcttttacatgatcgaatgcttgttttgcttgttcaggactagcacatctgcacggttttgctggccgctgtatcatacacagagacgttaagtccagtaacatacttctggaccacagcatgtgtggcaaggttgcggactttggtttttctaagtatgcacctcaagaaggtgacagtaatgcatcaatggaagtcaggggaactgctggatatttagaccctgagtaagttttttcattgctttcacaaaggaacaaaacttttctttcttttcttctatataacaatcaattatcaatgcatttgttagttgaaatgcctacctgtcttgttccctgcatatattatgtgattcaacatccggcttatcaattatgcgtctttctttcagatactattcgactcagtcattatcaaccaaaagtgatgtgttcagttttggagtggttctcttagaaattgtaaccggaagagaacctcttgatgttcagaggcctagggatgaatggagcttagttgaatgggtaagttctcattgcggaccaagtgaccaaccaccaatcacttatctatcaaaacaaatctctctcctcaaagaaaaaaaaagtgaaatctcatttgttcggacacctgcacaaaatgatttctagccactacaattctaacatgtcttaccctggtttgcaaatgtaggctaaaccatacattagagaatacagaattgaagaaatcgttgaccctggcataaaagggcaatattgttcagaggccatgtggagggttcttgaggtcgcatcagcatgcactgaacctttctcgaccttccggccaagcatggaagatgttgtcagagagctagaggacgctctgataatcgagaacaacgcttcagagtacatgaggtccatcgaaagcacggggacacttggctccaaccgctacctgtccattgataggaagatgtttgcttcgggttcagctcgattcgcatcatttgacgctacgaaagggcatttgcaaacgatgccttcgcttccggggtagtttggctgtgcaatggctattgtttttatgacctcagggggatgtcatgcttgtgttgaaggcatcaagcaacgattggcaagataaggatatggagatgctccgtaaactatacccatctgtacagatatcagaattcagagatcatgcagtgatgatatgggaaaagcttcacaaacagagcagttttgcctttgcagtttgtactgattcaatgcttctgaaagtgccctcatatactactctttggtttcggtcttagatcacttcattgtttcgattcctcctccttcagaaagtatagtacaaaggatgtaattcatttaatgctactatattgccttttgcaatctttcagacaatttgagtcgcagttatcaacaattggatgagtgcgtctttgttcaaacaaggattatcgatctggttcacttaaatcaagctgtactgttcccgatgtttcttcccaagcgctatgatacaggaagtgtcaattcaaatggaatggaacaatatggcgttactatcaaaatcttgtgatttcatctctgaaatattctagatatcttacacaggtaaatcgtacgcaacagaatcaaaaagaaaattgagaaagcaaaaacaaatgtgacaccatgcccacaaccccagccatgtgtactcctaaggaagaataattcaataccttcaaaaccaaacagggagaatgacacgattttgaacctttggacgagtcgccacgaaaaaaaaaagagcaaacaaggatcgaatgtatgtatttttggttctccattttgaatttatggtttgcttgacaagattagagttccaagctataatatggttcatagtatttttggttctccattttgaatttatggtttgcttgaaaagattagagttccaagctataatatggttcttatatgagttcattgttacacactttccaatttccagccactccacatagtacatgtaaaaaaaggcaaagagtataactgcaggtaaaggtccatcaaaaacctccagaggaaggtaaatgcttcagcaggtgacttccgaaggagagcatgagtcttgcgctcattggtttcttttcaattaatgttaatccaaaaacacttaacaagacacagaaggatgacctgagggtaaatatccataaaatctggaaagagcattgggtccatctgttcttgatataagcttgaacagtaggaggcatatgcaccaagctatagctgaaattggcaatgagttgtataggcttcctccattagttccttagcccaactcaaagttcgacgaagtattgattctgaacacaatatcagatcaattagttaaacaacagctaatctaacatgcaaaaggttaataaaaatccaaggaaatagctgggcatgaaatgccttacccattttcatgtgatctaaggtatgccaaataattcatgactacctttatcagcagatttgtctgccccaaaaaattcacgagtccctttatcagcagatttgtctgccccaaaaaattcacgagtccctttatcagcagatttgtctgccccaaaaaattcacgagtccctttatcagcagatttgtctgccccaaacaattcacgagtcctgttatcagtggacttatctgtgggggtgttgtcaaggacttgatactgacggttagtcatgtgccattcattgacaataatggctgaatcggtaaaatgagaactacttccctcaccatcagaaggaaatgacactgcaccatcagttaatctccgtggtcgccggacaggtctgctgctcctgcttgaagatgggaagtttccttccgcgcccttctgctttgtcccaataaagccacaagcaagagcttccagagctcgggttgttggtgggcggcttctggtactctgcctcctctgctcactcaatagcccattacaggaggcattgatgtctggaagacagtcatccatcctgttggtttcagaagaatgtatagatctatccattgtatgtgtattcttgtcagaagaaggcacgatgtagctcacagctgactcataatcagaaggcacttgtggaatattcagatcaataacatgcttatcttgggacttttccttgagtaccattttttcatcggtagggggcacattgtactgcttgtgacataaatgaatgttactcatgtcaaagtttatggtagttgatgagttcggaattgaaccccatatgaaaggcttagcccctgcgcttgcttcatttgatttagacacatcatgttgtgcggtgtcaacttgcttcccatgctgtcttttattggcagcagtatttctgcgtccagttctctcattcttacaagatactaacctccttctctttgcaacagatgctgctaagaaaatctggggctcaggagttaccctttgatcaaactgaaagtttatttcagtggaagaattagtagcatggaccctttgagtaccgacaggaagaatagttgcagttgaggaacaggcattattcattaagctgaaaccttgatcaaatgacatgtgaccattggttgatgtcattgtgcctgcgaaagtagaattcttctgaagtacatcaatatccatcctatcacctgttggtggtttacatttcttctcattgacatacttagcacctgtcttgttttgatttgtatttatatgttcataagactgagagctgtcctctgagtcagagtgttcttctgaactgtcactcccagaatcttctgaatgtggtgaagacatgtaaccatgactggcatctgtaggtagatttcttagggacctcaccttgcatggttcttctccttgaacaacactagtatccaccacagtaaatttcattagctctggtgaacacccaggttcactgggccgggtataacaagaagatttcttgtcagtaactgtgcttttctcaagttcagcatcatggatccatccattttcaatcttgaacccaccttcaccattactaccctcaactccaaattcaagcagtcttggttctgatgcaactttgcttaacacatcactaacagaatcaaaataatgatttcctctgacaagcttctttctagaaaatttctttacgcctggaatgaggaacactaaagcatgcttgccaactagagaagaatccttaggctgctccgagtgccaccctcttgcaagcaggcgaggccagacagcctcccagaatagatcattagattttgccttgcttagtctgaaatcaccagtcaaaaactttatgatgtctccagatgaaagcgatgagcaagccttgccgatagggatttctgcacgtgttgagataccatggtttctactaggatctaatgcaaatccagtcaagtcatattttcccttgccaattccaactgcctctacaagaactcgtgcgccaactgtggaccttaaggacaaaataaactcctcaaaggtagatgttccctcgttgaatgttttaaagacctgcaggacaccatatacctcttgagaaaattaacaacaaatataactcaatgcttggattctttgaaaagtagaatgacatgattttaatggttttatcatgaaatactagtgcattaatgctaatggaaggtaatcccaaagtgtttttagcataatgggaagtctagaaacaatgaaacataaatacagaagtgattgcaaacatcacctcacaacgcattaatgttcactaactcaaacatatctaacagggaatggaaaagagaaggtagtagttgagcacacctccaacaaaggatgttgaacttcccttgctataccagcaagcatacgtgacagcagttcctgctgtcttgtaccagaaaatatgcgcaacccaagtatacatctccggcttcttacttttctacatgcagcccatcgattatatgaatcagacctgaagaactctccgtagtaataggatagaacttctcccattgtcttacattgcaaaaattttgtcacctgaacaagatttttgccaaaaatatatagaccaagaagaaaagtttgtgcttcttcatcagtccaggaataatgtgtcattcctggcagaggaatataatcactggctttcccattttgtaagcagttaatatcttgttcagcagattttagaagtttctcatcatgctcatcacattcaactttacagcctggaacatttctaggaatatcttctgtgacgtggctattacattcatcttgtgaagaacatgaactgcgtcctgagaatcctgtctgctctttttttacatgatcgcttgttttttgggtccatgtgactggaatagctagtcccacaccaacaggataatcaaaaccgaaaattccactgtcatcaactggacatgaccttagtttcatgcgttcctcttctgttgctagatttggaatttccacctggtactcatcccccacacgtgggtacactcgtgtatcttcattaacctcttcaggacatatgggctctagaaaccgtggctgctcaacaagcatctctattgaatgctcttcaccatccttgatttcaataggatccatctaaaaaaagaatacaccagattgtgatccagaatggttgaacatatagctgagcaatacagtatgattatacaaatgagcatgtctacctggtactcttcatcattttttacttcaagatcatccatctgtaaaaaaaaaaaaacagtgaagtataaggagtgtattagccaactgttgagtggtcagtcgaaacccatgcatataacctgaacagcaatgtaaacccaggacaagtctgcaaacaacttggtatgaagattaaagggaaaactcatacctcaagcatcagtgagaaagcaaattttgtcattaacaaaaccaaattccagtccgatggacaactaaagctctaacatgtccaaatgtactgatttgtagagcacttaaagtataatgagtttgttgtattgaattatgccaaattccgtccttgaaagacatggtttttgtctttacaaacttgatctgacaattgaaatgcaagataaaaggcaagtacatttattagattttggcataatagataattaaaagttttatatatatatgacgggacggcaatataagagaactgcaattttaagattcaagaagcaacatagttagggccgatttaaatgcagcgtggttctttacagctcataagaacatgcaagttcaatattaggctactggtattaattattgaaaaaacaatggagaattccatgacctacaattgctagttctcaattatctcggagctagtagtctagaactcatgaacaaatgcacgccgcccatatctagacaattcaaaaaaggaaaacttttattgaggatcctcaggtgttcgcgcgggaacattggatggtacatttgatcaaaagatattcaaatacgctactagatccaaaacactaactaccttaatcattacattcctatcagcataacgaattacggcgcggaaagcaccaggagtgttcaagcactgaacccccaacccgttacaacaaaacgttcaaacctcccttgccacagagccccgatcttcgactacgcggggcaattacaacctcgaacgcatctcaaactattcccaaaacagttcatcaccacccactgcgcacatccacgccgccgctcgcgaaccacgaccgcatcgacatcgcatcccccacgcaatgcaatggaaaataatttacatccgcaacgaaggctctctgatccagatcggagggggaggctcacctcgcagtgcagcggggttagcacggccggggaccgaccgggatctggcgccgccgccgccgacgacgacgaccgctaccccgaccgtacgagggacacctgggatgggaagacgatgcgccgacctggaccctggagctcgataacgacgagcggaaaaaggaaacccaaaaaaaaaaaaaaagcggcgcggcttcgaaccagaccacgacacggccgcgcgtcgagcaggcaggcggcggcggcgcgacagcagagagagagagacggcggggtagtataccgcggatacgcggtggtggtgaccgggacgagttgatgacggcggcggcgtcgcccagttggcgagggcggcgtccccgttggaggcgaggcgagaggggggggggggggggggggaataagcgagagggagaaagggctaggaccccatcattcagtggcgagcgacgggggttaattttaagctgctgcttctatagtgctggtctagagtttgcttgtggactaaaaaccgcaaaagctagtacaaccctaaacatctcccccatgaggataattgctcagaatggcagtatggcacatatagtaaaaaaaaatttattagttaaggaggatgtgggagtttaatggaacatgaaaatatgggaaactatgccgaatcgatgtgtggctcgtgagatactttgtccagattatgatttcgtatatagaattaagtaagctcatatggtgactactttgtgacgtagatcggtttggatgaaataattaagttggctgctagattgaagatagtagtatagttacgactataactctacgaaacaatatgatgtgacaataaatatatgataggataatttacaatcaaaagacgtgcactgtagcactatattactaccttgcattaagaaccggtgacacgtataatttagaagtgaatgaacatatctgtggaattttatctatcattaagttgtaatttgtgaaataaatataaacatcgaacgcttttctcttcaaaacactaaaataatggaggtgcacatgataattttttttgtgaagaataattattagcaagtggttagttgaatgcctatggtctaccatgaacagtgatagtagattagcaaatgattgtatcattatctccacgattacaacaattgaaagattgggtgtgcaatttaaattgttgtgatagccaagggcccaaggcataacatatttcatagtaaaatagttaggttaaatctaaccagcaaactgaagaggaggttttgatgcttaaagttacaatgtcactcaccccgtcctattttaagtgcagttctaattttctgtgtctaacttgtgaccgttcgtcttatttgaatttttttatgattaatattttttattattattggatgataaaatatggataatacctcatgtgcgatttttttttaatttttttcataatttttttaaatatgacggatggttaaatgttggataccgaaacccacgataacacttcaatgggacagagggagtatcttggaatggcaagtccaaagtagagggacaaagttcattcaaaagttaattttaagtgtttatctgcatgatcatctgtacaactgccttgagaaagtttaagcatcaacctcacatttatcatatagtatttatttatcatacaatattatcttatagtaatgcaataatagaaactaattctcatgttgaaaattggaactcattccatagcccaagactaatttctaaagtgagtttggattggtctactccacccgtaatcatgagtatgcttcccaatctgttaaatgttgtttatataattgtttattcaaaagaatcaaaatgaacctgctttttcaagtctataatattaatacttaattaatcatacgctaaatgcctccccatattttacgtgctgtgcaaaatcccaacaaacatattcaaacacaccccaaatggacccaatacctgtcagttatgaggtatctaggctcatcggtgtaaaataattaagggcacgatttgatcctgggcaaaccccatcctagtctcttctagcaaagctacgtatttggaaccggtataataatctggcttttggcggcgagctagcttgacggaatgagaaaaatctagcttgctgatcggctctcttttgacgacaaactccattcgtgtggaaaatattggaacgaggggcaaaacaaatccccgaaattagcgattaatctctgtcacagaaagcaaaattcaattgggaaaaactcagcaacaagaggcaaactcacctgcaacaactagccattaatctctgtcacagaaagcaaacaatccaaacagagaatgcatgacaaggctagcaagcgggcaaaaaagagatggtttagcgttgccaagctagactagctgggcgagcgaaccaaacgctccctaacatgcttactgtatctgtgcccatcattgatatttagacatcgttgtgatttatcttactatttactactccctccattttaggttacaagatgtttgactgctttaagtttaactaagtttatagacaaatatagtaatatttacgataccaaattagttttatttaattaataattatatacttttataataaagtatcttgtgtcaaaaatattactgttttttataaattttgtcaaacttaaagtattttgattttaaccaaagtcaaaacatcttataacctgaaacggagggagtataaaatattaaatacatttaatttaatacaataattatcgtatgagccatcctaatcatacattttttgtttggttcgatgtgcaccctaatcataaatggagctgcaggtggtgccaaaagagggactgccaaatggtttactccttccgttcaaaaaaagacaaaccctgatttccgtgtccaacgtttgaccgtccgtcttatttgaaaaaattatgaaaaaaattaaaagataagtcacgcataaagtattaatcatgttttatcatctaacaacaatgaaaatactaattataaaaaaattccgtataagacggacatttaatcgttggcacaaaaacctatggtttgtcttttttttttggaaggagggagtagaacacgagggagggtgccgtcatgcaatgcgtggaagccaccgaagtacgactagtgtggttcagtcatgttctgactcccgacggttttatcgagtactagtacagaaggaagcaaaccaagcgagttgatgaaaactcaaaacagaggacgcaaaccacagaatgtttccgtcgctgtctttgctggctgctgccacggcttccattcctcccgtcccttcctcccactgacacgcgggccccacgtcccccaccccacgacgtctcactgacatcctgtgccccacccccaccagcgcctcggcgcgtccgcctccgcccgccgccgccgcgggggccatcctccgtggaccgcgcccacggcgtgtcccctgcgtgcgtggcgcacccgcacgttttgtcacattccgcggcggcggcgtgcgtgcgggcgcagtggaccgagcccacgggctcgccaccgacgacctttctcgcccccgcccgcgcgccgaccttccgtacggcgtagcggagatacaaccgaggctttcggcgccgaatctcccgtccaccacctgcccccgtcccgatcccccgccgtccatccacctcaccgacggccggatgcgcccccgcgtggcgagatcgcggtcgcgggggcaaaaacccaaccccccaacccaaccccaccgcgacgcgagcggtcggtcaccaccgtcgcgcacctgtttgaatcccactcgtgggccccacccgcgcgcagtaaattccctccccccacccccccgagagcaaaaaaatcccccgaccgcctgagcctccgcgcccactgacaggtgggtcccacgtaatgccccgggccctcgtgtcagcgacagcggagggaggcgggtcggtttgcggtgggggatgcgagggacgtggcgcccgaggaattagaccatttaactcgtcgccaccaccaccagtaaactgcgagtcctcctcctcttctcgtcgccgtgctactctcgctttctctctctctctctctcacttgttccccaaggcgagaagcagccgccgccggcgagcgtcgcgggggaggggagggaagggagggaggagcggtggatccgggcttgattggattgggtcggattcgattttggatcaaccccggagggcgggaggtaaaaacgctactactcatttattgctttcctttcctttctccggtcgatccggccgaaatcggcgattgctcgccgcggaatcccgattgggtgtggggggatgggctgatctccttccgagaaccgggagctcggatgcgtcgagttggttttgtgctccttttgctttccctttttctggattcgggtttccatattggaaggtttcttgatctcgatttcgtggcgagagctggttgctgaatcttatatagctttccttcttcttcttctagcggttgctacagatgcgttgagctttggttaatctatccggcgagagataatgggcgagcttgctgatctcgttgtcgtgccgtcgcagccgccgctcgccggcggccggcgggacaggctggcggcgctgctggagctcgcggcggcggatgatgttgatgggctcaggggggcgctcgcggagggaggcgaggaggcggcggagttggctgatggggtcgggctgtggtatggtcggagcaaggcgtacgaggcgcgcacgccgctgatggtggcggcgacgtacggcagcgccggggtggtctcgctgctggtgggcctcggcggttgcgtcgacgtcaaccgtcgccctggagccgacggcgccaccgcgctccactgcgccgcctccggtggctcgcgcaacgccgtcgctgttgtcaagctgcttttggccgctggcgccgatccggccacccccgattccgccggccgcttccccgccgacgtcatcctagctcctccggcttcgccagatgcccttggcgatctcgaggtgctcctcggccgccgccgagcactcgccgtggcgacctcggtggcttcaggttcgtcatcccctccgctctcgtcctcaccagatgagggcaacaggtcgccctcgtcgcgttcgtcgtcgctgtctcccatcactgtggatcgtgggaagaaggagtatccggtggatccaactctgccggacatcaagagcagcgtgtatgcttcggatgagttccgcatgtttgcgttcaaggtccggccctgctcccgtgcctactcacacgactggactgagtgcccgtttgtgcaccccggcgagaacgcccgccgccgtgatccccgcaagcacccatacactgctgtgccttgccccaactttcgccggcctggtggctgccctagcggcgatagctgtgagttctcgcatggcgtgtttgagagctggctacacccatcacagtatcgcacaaggctctgcaaggagggagcagcttgcgcccgtcgcatttgcttctttgcccatgatgaggatgagctccgccatgtgcctcacaacagtggtgccggcctgctgtctccccgcgcttcttcatccattgatatgactgctgcagctgcgctcgggcttcttccaggttctcctaccagacactttgcaccgccgcctgtgtcaccatctgctgggagcaatggaggagctgctgctgcgcattggctccaaggcagtaggctgcgttcttctttcaatgcaagggatgctgctgttgatgaccttggcatgctcctcgaatgggaatcacaataccttggggcactctgcctgccacccagcagccgcccccaaccacgcctttcagctggtctgagtatcaggccaacaattgctccatccaatcttgaagacatgtatgcttcagacatggcaatgtctccgaggttccctaatgaccaaggtcactcagtctactcaccagcccacaaatcagccctcctcaacaagcttcatcaacagaagggcctcttatcacctgttaacaccaacagaatgtactccccaagggctcttgatccgtcatctttggcacattctccatttggtggcatgtctccccggtccccccgtaccatggaacctacatcacccctaagtgctcgtgtaggagcccctgccacacagcggccttctgttggttcaccacggaattccagtgcttggggcaccgtggggtccccgatgggtaaggttgactggggtgtcgatagcgaggagctagtccgcttgagacgccctgcacaaccagggtttggagaagatgagacagatgtatcatgggtgcagtcactggtaagcaatgctgagcttaatggcaagaggggcgaagtacaaggcatgcctggtacttctgcattgatgaacaggcctgacctgaacaatcagggtgacttgttggaccagacggtgatcggtgcttggcttgagcagatgcacctggatcagaagtgatttccaagggaagccatgaagtcccaaagtggatgaagcctttattttgccaaggttatttaccaaagaatagttgttggtcctagtaaataataatttattctttttaattcttgaaatttttggtgggcaaagtcagagatggtggtcaagttcaacaaaacatttggtcacagattggtagctgaaatcagttccagagattggtaaacaacctcattacttggggtcctaactagtattcttttgattagctcagatgagtctttattttagtgggttaaaattcatatgttccccatggttattatgtccatgatctcttcctaacaaaagagagattataattgtccatttttcatttatcaatgaatgattttgttaaaacaatgtaagttacattcttaattttttctctgttcaatggaattaccttccttggttagtcctctattggattgtgttttgatgcgctttctgactgttcctatcaatgtttgagacatgggaatgggccactgccataaaattgtgtgcataaccatagttggaaatttgacctggctaggcaaaggcagacactaatggacataaaaagcgatataataactgctcatggtactgtatctaactgctcccaaaaatattcattatgtggaacaatggaaggttcgttctccatgattgttatccatgaaaccagtattatatttatttatttactaaaaaaatgcccgtgcgttgcaatgggtgaggactattttaatcttattattgttgtattatttagctaaagtgaaattctgggaattcgcttggatatttttcttacaaaattataagatacaattaggagtccgatcatctcatgttagcccgcgaatttgtttaaagagatttttttatgcaactccttttgtatttcaagtgtacgaacttaaaaaccgactcaaatacattccaaaagcgaatgacttaaaccgactcaaacacgatgacgcaccaaagtactgtatttccaaaagcgaattgacttaaaaaaccaactcaaacacgatgacgcactaaagtacgggtaaaaaacaacttcaatttttataatagtagatatttttataatagtagggatagagattactgcgtgttctgcaaatatggtcggctgttttctctatgatctactcggagtaagcctgatgtgtggttaatgccctcggattattcctcaaatcagatttattttctccattcatgcgacttaaattgttctccacgaaactcacgctaagggcaatagtttgtgttaagagacctcaattcatgtttgaactctgtaatctgaagttctgtaagtttacaatcgactgcagtttttccctttttggccaaaattgaatagtaatgaactgcgttgatcggtcttgtgtgaaatgagatgcattcattttcgcatcaaaccaggcagacagaaaaacatttacagaacctcatttgtactaggggaacacatccttgcacacaaatttcccctgtacactccgtgcagatcaactagcaagtatgtttccttgtactagatgcaaaatctgaaacgttaaattaccacatctcatgccaacagaataagtggtttgatagtgtcgatctagcttaagcgacacagaacctgtcatgctcatattcacattccactaacaagctggaaatcccatgaaaaatacaaagctggaaacccctaaataaataagctggaaagataatctaaataaacattactgtagcacatcgacacaaatgtatttgctgtgcccttgccaaacacacttaagaaactgatgaagtcaagctcatgtttcatttctgggggtgccagcctcttccgttgtggttgaatttggcccttcgatcgctgctctgaccgcttctgattgttcaggaccgtttattatataatttgctggtccaaacataagtagcacagtttagtttgcattgaagctgaaggttttagtgcaaaataagatgcatatcatactaatgtatatggagtgctgacataacacaggacaaaagcaaataggatgttgcacgggctactaaagcttgcaatattaaggtgatgaacttaatgtctatagtttaaaatggtaaaggactgagtgcagatgattgagaccttgaatgagacaaacacaagacataagagataagctatgaaatcgtgacgctgatgacaagtccacagaaatgctcaaaactaagctaaataaattgaggtcccaattcatctcgctattttatcatctgctcccagttgttaccacagttcctagttttttgttgaagcagaggtttgtcagtctagagaatcgatttcaaattctgtacctgttgaagcacccctggcggccatgtgctctatgaaatggatctcatcttcatggctgctcacgaacttgttctggtttgattagtggcaatatgatttgcatcagaaatacattcacgaaaaaatgcctaaagaaatgcatactagaagcagatacttactagttccttcgatagaatatttaggattctatcgatttttgcttgatgtttcaggaaaaacggccgcatataccttctatatacatgctttgctccctaagtaaacaataacaccattatcagcatgtacagaaaatcaaattttctagttcaccattcatcgatgcagatgtatcaagtgccaaacataggtcacaccagtcaacaaccttacaaccatccagaggaacaatagaacaaatctagccacaaacatagaaataatgtttagctagaccaaaagaataaaatgtttcctaagcgattgacagaagacaatgccaattgaacaatgatatcaagaaactataatcacaggttttcatctagatgatcacagcaagtgcttgaaatggaaaaaaaattgggcaaagcgatgcacagggaacatatgcaatgaacatactgattgagctatcatatagccaagactcaaaatgctccgggatggattgtcctaccagatatatggaacttgtcaatcacacgtgtcatgtctagataccactgaccaaataaccatctgacctgaccctgttagagactatattctccccttgattttgccattttgggttcatgttcatataaaacgtttgtcatgtggttttcagataatgaataccataataatattcttcagttcaggtcttatttcttgatagcaagaacatagtaatgctttctctttggtcaattatgtagaaatatgaaaatatgaggaaacattttaagatcagagagaaaggggaagggggggaggggggcttacactgtttgaaggaaactggagccagacaagaatagcaaacttcacgtgataatagaaaggaacactgcagaatatcaccagagtataaatgttcgaaaagtttacaaggacatcaaactttacaagattagaaacatcaagttaataaaggcaatgtaaatttaaacccatgcccggcgaaactttcaaccaaatattcctagtaatgcaatttctttcagttaatgctacattccgcacatatactgtccccatgcactgtcaactattcgtagggtcctctttcacacatcctctccactggaatgttttgatttattccatggtttatataaacataaccagaaaggcagttagaagctgatcaataaagatcagcaactcgccaggttatacaggaaaattccctggtagattaaatgttgtgtcttaatgcaccatgttcgcttttcttaacttgaacatggacaagctgattgaccacgaccaccaagtagtgagaatggtgatgaacagcaaggattacttctttggtttcggaagtactcggcattgtcttggccgatttatatagtttttggtcagaaaaaagaaatgatctactagagttcaatagctgtaggcagcagtatattgtgtgctaggaataacatctccagaatgctacgagtagcactaaattcccataccttgaaagaatctgatcagcaaagatttccgcaatgctaaaagatccatatgctgcaaaacattttgaacaagagcatctaaaggtcaaagcagtaagtttgatatacatctgtatcttttctatttcttagagatgttcatttagatgaaagctgattacacaaataattaaccaactgcctttgtaactataaaccataagatcatacaggtatgtcctccaaggatgcaagtggccagccgctaacccacaatattaaatggccttttggatgggatagtaggctggcccacttgcatccctaaactcctcagcaaagtaaccatgttaaggtgataggactagtaaatgtgcagagtattagctttgacacttcaaataactttctgagcatgcagacaccatataaataactttcgaaaaatgcaacaacctccgtcatcatttttcttttactttagcagtaatattatagcaattggtcacatagagtacctatcaatatactgaaaaggtgcttcaaagttaatagtgaaaatttcataggattttgttttattacagacctgcccaatacaagagccaccgctctttttctttttgatccttcttttcaatagctctgaaagtggagtacacaggcagaccaaccccaattgcacaactgcaaaagcatgaagtgagcataataaattatggacgaatttcttttccacaacagtaatagtagttcattattttgaggaaagtattgacagacaaaaaatatagtttttaggtttattgcagttgcagccattatacggataggtgactctaaatcaccactgtgtcgcctaatagccaatatgaatattgcagtttagattctgcttatctcacatcaatgatgtttatagatgtgagcataaacttgcggtaacgctttccccataggtaaaaatctacgtcattgcaatgtgctaatagcctaatatacgtaaccgttgacaacacaacaatgacagaagtgaatagctatacaatgaactaattgacatactcttatgatggtcctaaagagaataaactttcgatgtattattagaaaaaaaatcaatcaacataatggacaagcaacgcagataagagtaaaaatgcaatgaatacctggctgtacggatgacaacagtagagcttagtggtgccagtaagagccgtaaacccacctgtcataacaaatgcaatttcaatacaaagtttcaataaatctctgtaagacaagtatgggggtcatggaacttccaggaatccatcagaaaacacattatgagataatatgcgtaatataaatgtaatctctacctcatacaaacagattgattagccgaactgccccaaataaaaaagaaagaaatttgaagtgccatatttagaggcgttgcaaagtgcaaaaaattacaaaaggccataaaaaatgggctatcaggaaaacgttaatgtactgataaaaagggtatctatctgtttctgttggcagactggatatatagatttgatcaagagtgatgctcattgcaaaacgaaaataagttaactcaaagttaatttttccctaaaagcaagcccaaataaatttgaacgcgctgaaaaacgataaggttgagtcgtgtctgccaaattcccgtgagatgaatcctcacgtcaacgggtggtttggtggatgaactagaaagcgttcagcacaaatcggaacccacgagaaattacaactcaatcagctccacccccaataccatcccaaggcaatgggagcaaaatcgcatggctccggaacacaaaatccaccgaacgaagaaacccccatgctaacccacaatctaccgtgctcttcccgtacaatgaagaagaaagcgtaatccgaggcgcgccctcccccaatccaccccgatcgtccccccgatcctcaaaccgaacgcgccgccgacagcaacgtctcaagcgatctagggtttccgtacgagccagccaaagggatcgtacctcgccggagatggcgggggccagaagcgccatcggcgagttccgcacgccgcgcgggggtggaggaggaggagcaagggatcccgccgcggaggcggaggcgcggctgcggtttgcggcgtggagggcaaggaatccgcggcgagttcgcgtctccgcgggtaggtctcccctgagtccaattggtggggggatggtggtggtggtggtggtggaggaggaggcgccggcgaaagcggggggagaaaccagaaagcggttagatggaatcgggtgctttgggggcccttttccggtttagtcccaatcttactctagatttttaatttagagtccatgtcttctttcgatttcagaaatatattaaatttcttcagataattcaggattctagaaatttcgattatcaataaaaattcaatcaagaaaaagtaactttttcttacttaaaaatatattctacttcctctgtcccaaaatgtagctatttctagcacagtaccttgtcttgaaatgaagctatttttccacctacctcctcctctcaaccaattacaaatattctccttcacctaccttttcttttcatccaattacacaacttctccaatcattctcacatactttcttaatacccgtgccaacataaaaaatgctatattttgggacggaggaagtaagtaatttatgtatagaaagattatgtaaaaattgtaccgcttataaaaacaaaaaatgtgttcgtgccataaggagaaaagaaccgggccctaaagaatggcaaattatcaatcgagttttagataagggggcatttaactatttgctactcttaagatgttatgataacagatttgccactcgctgtctgtaacatgtgggttctcatgtgtctatgatatatgggtccaatggcaaacctgttatcatcgcttgtaagagtagcaatagttatttattccttagataagtggcacatcctaattaaagtgctcgtttgaagggtggtaatagggcataaagagttatattaaattatcccacattcctacttatcaaaccgtagcggcccgtttggttggattgagtttttaggagggattgggagtttagagggataaagctattaactgttttgtttggttgtgagacatggaaatttcggtgggatggggatgagaaattgaggaaggaactacctcattttcaatacatgggtagtggtggtaattgggagggaattcctcctttactctgcctagaaaggaactccctccttttcaatacctggcagggggtggtaattaggagggaattcctcctttactctgcttaaacaaatctcaaccatccgttttcattaatgacctaatcttcaactaaactctatatcaatttccaccacctctaccaaacaacatattgggattaaaaaccaaattcccatcttaatctcaccatcaattaccttgtgtaaattcccaatccccttctctgaagttgccaaacaagccgcagatgagccctccattttcttctcagtttaacagcaaattgatatggcgattgatacagtgaaatcaatctcagtgagtcgtgaaacagacaaacagtttaatggtggagaaaagagtctcgagtctgctgaagacaaacttcatctttgcttgagacggtcagcttgcaatttggctgtcacaggcaaatgcagcttttagtaagcgtgattccagccttcaaatttgaaacgaacgggtaaacatgattttcaccagtagtttttgggaacaggttcaaagcagagggaatgcagatctacacatttcgagaaacagaacgacagaaaactaaaatacaggaagaattcaacatatccgagatatctaatcttattgctgttcaaattttgttgcaacagcaaaaggtgatgtttatagcaattacaggaggcttagaaaatataaataaattaaatacagtctatataactgtaagcagctatgacaaaataaactactaccctacttgctcttcttcccttcagtcttctgatactgatatggtgggcagttggctacctgaacagattcagatcagaatggataaatgccgtgtgagatatgaaagggacattcgggtacatcccagcaagagcgcatcgcatgcactcgagcactgtgaagatctgtatgaaagcaatagccatccagaaatactgcataggcgtcccctgatacacgatgctgggcatccaggtgcacattgttgccactgcttgggagccagtgtccaggaggatagccaagatgacatggaaccttagaaagtgcggcgaccacttccgtctcacgacaaagaagtacactgtcataaaaatcaccagcaaaagccatcctggaaacagtgtcattgtatcgatgaaggtgtacaccaacgaaaacccctgcaagtatgtgtgtagctggtagatgacatcggcatatgaccacatgttgtggagtggaagcaagtagggcacacatgctacagtcctccaccaccatctgggtttcgaagtcaactcagggtagctgaatgacgctaaagaggatgctcgacagccaacttcaagtcttcgatgctgactgtgtcgtgctgccagtgatggaatgcccttgatagaatcatcccttccgaacgatgcaagcatgtcattctgaacaaaaccagtgccaactgcaagatatatcagatatatcagatatgcgtcagaattcaaagctctgaattacaaacttactgagaatcaaagacaagtacaacctacacaaaaactgtctcactgccgatatatgttctggctaacatctaactagatagcagcagcaatacaagctttcttcaatgtatcatgagttcacgatgatatttatttgacccaattttttttcgataagctgtagacccatttcaactaccacctttattaaaacctaataaaatcaacattttacacaatgtggtgcgtatttacttcatatattggcttgtacttgtactgtctacaatatacagttcatattggtccttaaaatgtgaccagtgaatccgaaaaccagaagttccagaagggtatacaagtgcacaatatcagactatcaactggaaaatagcaacgcaatatattaaatataatcaaatataattgacccgaatccacaagatgttgtcagaaatcacaaataggataatatggcatgaatatgccaacatggcaacaactacaaaagaaatggtagttcagtgctaccagccctctggacaaacgcattgtgtttactcgtaagtgctgaagagaaaggaaagaatgtagggcaaagagtgagcatgtcatcaaaattccctagtgcttcatattttaaaagaagttagcaaaaactatgtgccttatattatgaaattgaaaaggtaaactactacttataatcagtcataagtcatcataagtactatgtgctgcgtgtacacttcgagcagcagaaaagaactgcttacggtgttagaatttgacagaagccccccagaacataaacaaaggttacagccactcacttaatgtacaaacagaattacaaaatttgtgaagctcatgataatatggttgttataattcatcgcaacatgcaagtgagagaaattaaggaaagcattatgggtaataaagggcatataaatgatacatcacaacaaatttaaatgagagaagcaacttcgtctaatccatacctcgcaaagctcccatggaaaaactcttcctttcggcatgaagtcgcgcacgttttacactccatgatcccgccggagtacccaggcacgatgttctcgcgaaagagacattatgcttagccgcaggaaaggcaagcagctgagcgtgtccagcagataagccttgacagagaaccattctgcataaatacagcccttgccgaatcaccgaattacctggacagacatgtgagcgaatcggatcactggatcgcagagagcgaaacatttgggttagatttgcgcccagagaataaaaaaacaagaacaacatcaaaacaatccaatcaagttggaatccatcacccaaccactaaaaccaatccaagtccggatggatccccacactaagcctgatcagtatcgaggaggattgcgagagaaggataccttcacaccgagccgaggtggcgcttcggcgagaggagacccgacccgcccacccgcgtgttcgccggagagaggaatcgatgggcgcttccgccgagacggggaggcaaagaggcgattgcagatagggttctcttttccccgatttgcagatcagcccctacagttgcgggaattcgcatagagaggatattcttttttttttctctcgtgtaacctgtcaaaagcaaaccaagggtccaattctagaatcgcaaaacctgtagctttaacatgcttcaaccaaaatctgatagtagaacatgctccatctacagaataacacggtaaaacacgaggctaaaaaacagcaaaatggaaaacgcagtaattagggacatgatttctctaatctcttattcactgacattctcttatccctaagcctcttggctaactcagcttgcctactttgaggctaggcatacacactagataaaggaaaaaacaatgagattagtctgttttagagagttttagattataagaaacaactagtgaaaatttagccggtgagaatatggttttttttagcctctggcttctaatttatttctttgattcgacaattacaacttcttaaaatctggattaaaaaactgaattatttaagagaattttgaattcaaggagaagctacatctgcccaaaaactctcacaaacatgccattaacatcatgaaaaatctactccaaaatcctctatacaatttccatttgatatcagaaatctattaacttattaaaagaatagaaaaaggagcctccacgttcactctcacggcttagaaattctcatattaatcgaagaaaaagaaaaacagagtccatatagaaatacaatttagaaatagttcaaattcgaaattaaaaaaataagaatattggaagaggagactagagtccatatagaaatataaattataaataaccaaaattctgaattaaaaaaataatattataagaagagtatagagtccatatagaaatacaattaagaaataacaaaaattcagaattaaaaataaggaatattagaagtagattatagagtccatatagaaatacaattaagaaataacataaatccagaattaaaaataaaaaatattagaagtagagtatagagtccatataggaatttaaaactaactaaaactcggaataaacataataaaattaaaagaatagtttacaaataactaaaaattgatattaaaataattaataactaatactatataaaatacaatatgaatattatacattagtagtttcgtaaagttagtataaaatttaaaattatattgtcattttaatatatttgaataatacattgagaaaacatatatgctattatatgagagaaaatataatgatgctagccgcgcaatctacgcgggccaccatgctagtttcaaaatagaaaataatatgtaatcttatgcttcaaagtgctctatagaatattcttctctaataggttggaatcctataaaactcctatctttctcatacaaaccgaaacgggcataattttttacttgctccgatctaaaatgttgttgcaaattagcctccaaaaaacatgttatacatttcggtaagggaccacctatacatttatcgacaaattttctactaaaaatttgacagatgtaattatagtacaatcgtagtgtaattacactgtaaattgtatgtaattacactgtaactacagtgtaacttgtatgtaagtttcatgtaattttgaatcgttagatctattacaagatttgttctggtgaggaagaaaaaaatcatagcacacacatatgtgaaaggatttgttcccacgacctctattttactgaaataacatgttaccgagagattcttgaaagttacatataatttacattatagttacagtgtaattatatacaagttacagtgtaattacactacgattgtactgtaattacatctgacaaatattagggggagaaatttgatgacaaatatctagcaaaatcgtttcggtaaattcggcttcttcttttccacctttgatgatctcccagttaattgggtctcttttatggacctggaaaaagtacttgtctacttgtacgctataaaaagattggacctctacagccccacccaaacgggcccctgacgggctccatttagacatggcatgggcctgaaagactccagaacaactcaggtgccccttggggaccaacagtcacgatcaactgtagatttaagagcttgtagctccatctctgagctagagtttaattagacggttttagatttatctcaaaataaagtggagctaattaaagtgttctcacaaaacaaactaaataggtaaagctgagtttaggctgctcaataatttcactctagacctaactcttaaaagttaaatttaaaggttggaaccctactattgatggtgagagagagtatctctctgtttgcatgccttctttctataaagtcatataagtttttaacacgatctccaaagaaaaaattggcaattattttttataataatttagaataactataaaactagcatcatatgtaaatatttaaatatgaatatttatatcacatgcatgactctgcatatgtctttttatgatatttattagtcaaatttacaaatgtcgaccttttttttaattacgtacatgccttatatttatttttatatgtgggagagtagtacttattacaacggtaaataattgaactcactaaagttttattaaaagtgtaagaccgacacacaattatatacaccacgggtaagacttgtctaacgcacgttagaaggatatggtgcactgacatgtgagcccataatggtgggtcctacctgttagggacccacatcgctcttattttacataaaatgagctacatcctatacaccataatcatgcccaaaatatatccacgccacacgggtatatcctagtatgtgtgtgaacaagattggttggctagcatcgtgtggttcatgtgtaactgttgacatcaaaatttaaaacctgacatcctgttgttatcgggtggagttatccatctacaactccaccaccatacatcatctttttcggttttcattgtaatagtatgtttatcaggttttatttgtttcgcagtaatggttaaattgtatttcaaataccatgtattatattccaaataaggcgtttttaatccggtgaccgggggcggtgggagacagccatttgtggtagggtgtcatcgattcggcggtgttagctaatcgagagcgtagtcatcctcatgaaattggcttgcaaggtgagccatcactaatcttaacaggaaacaggggtacttgcagctttgaattggctgatgacacgctcctgcaatgcattgctggccttgtccttgtgtattaatcactagagccacatctccagattttttttaggagaaaagtgtcactgggccaaccttgcattcagacgtagtaccagccagtcattaaacgtaaatcatggccaaaaaccaaatgatttgctggaatacggcgtcttgatgaagagagactgcaacttcttatccaggcgacgcgataggaaaaacggatccgcctttatcggaggtctaaatgctgaggatgagaggacatgttcaatttctgaaccatccgattgaaatcctatggctgtgatcaagtgatacaaaaggaatgaaacactgcaaaattcgcagaggcagtacatccgaaaaagggtagccgaagtacccccaagatactgtttgtgttgcagtgaaccgatgcttgtcttctgggactatgcttcaaaaatcgtcaaccaaatatcgctccctagcagtttcgtcctcggaaactgacaaaaatgagtgaaattcagatagatttttatcaaaaaaataaatttagtttgattcttattttttaaaaaagaacttgggcgatttaccaagtggtttctggccacaaccagctcaaggcagctaataaccgcgataaccaagcggtaaccgtccattttccaaacctgtttgggacacaaaacgctgtagcgtctgcagctcgtgcggcgtttaacaccaaacaagttgagagaattcagggggcaaaaggtgggagtcaagccgggttagcttcaactgcaacagaggcttgtccgatgctacctgacctaatctgcatccgatgccggcaagacgaagaaactccggcctaggggtggtcgcagacacctgtgccaactaaacagaaagcaacgcgtaccggccagatccaaccaattctaggcacatttaagtgctgctttgctttgtttttgtttcgttttggccccagtgatgttgcaattagattcttgaccagttcagaaagtccaactttaggtgttcaaacatgtaatacagtcttaattaattgcccgtctaactagtgctgcagtgtacctgtcccatctttttttttatggcagcaaggccccagaccttattttctgtggagacaggaaacattagtttgggtatgtatgtattgctcggttgctcctcatcagatgggcaatagtacactccaacattagaattctttcatattttctgaatggtcacagggggagcacctccatctgaataatgttcattaaaaatcttcatgttaaactgtcatttacacacaacaaaaaagaattgtaggaaagtaatgttctacagatttcggataacaaaataagctatacacaccagagaaggaagagaagtagttagccaacagattttggaccatccattgcgtgtgttgtaagttcagtctctgactttcagtttcagagtataaaccaagcattcttaggaaaaaggagtaataaaacagaacaaggttaggaatgcacaaaaaccacctacttccttttcctttctcttgtacagtacatttcgccaaatgtttggccacccgtggggcatggatcaatataatctaaatacaaacaaacaaacaaaccttccaacaatcacctaatgcttcatacggggcaccaaaatgaaaaatagagcagtggaaatctcgagaaatgagaacggaagaaaatagtcgtcaacaaagaaccaggaaagctacacaaggttttcatctggggaattcacaacttgcctattccgtcatctatctattgggtagttgttaactgcaatgatccatctttctgaagttttaggctgaggctagtgaaccgttctcttgaatattgtcttgaggctttcctccaatctgttccggccttcatcattgccgcaaactcatcatagcttatcttgccatcctgaaagtacagaacaatgctattaatactttcagagtcatgtgtgctatgaatcattatgtcaaaacattttgtgcacaccaccaaattaattaaactatttgaagaagaaaaaactagcagtctatcaatttcttaaaactagtcaatgaagagccacaaaccttatcagtgtctacatcacggatgatggcattgataacctcttcatgatttgctcccaggtcatcagccaatgattcacggagctcatcgatttcaatatatccactctggttccgatcaaagtatgcaaatgccttgtgcagatgctcatcgttgccaatctttctcaggtgaacagatagagcaacaaactccccgtagtctaaagatccatttccatcgacatccgcctggcataaccatggataaatagtaaatatacgaaacccagtagtcattcacaacaatagtttgggaaaaatgcattcgagagcaaataatcttttctagttcaacaagatataaagatagtttcccatttttttcccaaaatttggaggggtgtttggggagagaggaagaagggtggcttagggtaactcacagcatccattagtatttggacatctgcatcagccatttggtgcccaagtttatgcaggccaagcttcagctcatcaaaattaatcatattatctttgttgagatccatcttctcaaacatgtcctttataccagcaacctcttctactgaaagatgctcagctatgacctgtagtaaaacaaaatgtgagaatccagagcaaacaagactactattgaaaagccatagttaggtttgagggtcaggtcaggctgaggagtataccctaagtgcatgcttcttgaacttgttcatcacagagaattgttgaagtctggccttaacagtttcgcctaaatttacatttggagccttcttaatgttctgtaaccaaggatgatctggaagaaatacaagataaggttgtcagccaaaaacaaccaagttaaatgatataagggataacatcttcagaaaatcattaagctttatcatttctttactcatccttttgcaaggtctgtgatatcttggattagaagttaacaagttatagatctttgtaactcagaaccaccacattttcaagcttgaaaatttttggtattgttaaagaacaaaagaaataccaatggttggaaagtttctgtatcagtcaagaacagaaggaaaaaaatacaatatattaaaccagtgtgcaaattgattattaccaagcacttgttgagcatttagccgccgcctagggtctggattgagcattcccttgacaagatcctttgcattatctgagacccttggccatgggtctctcttgaagtcaatgacagaacggataattgcctgagcaacaccctgttcagtttctgcattataacatggaaacaaaagaaggatcaggaatagcattcaacattacaacattgccaggtctacaacagacacagacaaaagtaaagattgacagtttctaatgtcgcagactgcattagtgcagaaatgtgatcagaagaggtcaacttctatacactaaatacgtagtatttaatttagtttatacatttggttatcagaattgaagaattcatgtacaaaactaacctgcccaaaatggagggactccacaaagaagaatgtaaaggatcactcctgcactccaaacatcaacctcagggccataatttctctttagcacctcaggagccatgtaataagggcttccgacaatctcagtgaaccgttcacctgcacataatcaataatcacttaattagcccatcggaaaaatatatacacgcacgtatacaatgtgaatagacaacctaaggtaagcccttctagaggcactgtgaagtcatcatttgacaactgagaactgactgacaaattaaaacagcacgcttgagatataggaaataaggacattgcgactgttagactgtacctggggtgaaaaaaacagacaggccaaaatcaattgccttcagagctgcagtttccttcttgtttgcaaacaagaaattctctggtttgaggtcccggtgcatcactccatgcttatggcacatctgatgttttacagacagacaaaaatacacgttattcatcacactatggaagaaaaaagaagttgcaacaatctagttaccaattcaaagaggcaggcatggataactaactaaaaccgaaactgatcagagtctaattaatcagacaaatagacaacagaatcatctggcatgtagcaaaagaaaacgattcccacattattggagaaacaaaagcagataaaaacatgaacttttcagttgttgtcatctagtaacaattctaccataaatctccaccagtgaactcgatttcttttcattatactgtgagactacctcatcgataacgacgacaagaaatcaaacaggatcatttcagaaaatacagtagaaagcaacgaaggaatagagaaatcaccgaagctaccaatctcacctgcacgacctcgacgatggtgcgggtgaccagcgcggcggcgcgctcggtgtagtggccccgggcgacgatccggtcgaagagctccccgccctcgcagagctccatgacgaggtggacggcattgtcgtcctcgtaggtgtcccggagcgtgacgatgttggggtgcttggggaggtggcgcatgatgtccacctcccggcgcacgtcctcgatgtccacggcggtgcggagcttcttcttggagatggacttgcacgcgtaggcgtcccccgtctcccgctccgtgcagaggtaggtgaccccgaactcgccgcgcccgagctccccgcccagctcgtaccgcgcggcgatgtcccgccccgtcggctcgcgcagcaccaccagcctgtgccccgacggcgccgacgaccggttgtactcgatcgagaacgggttcggcttcttccccttcttctgctgctgctgctgctgcttcggctccttctgcttctgcttctgctcctgctgctgtttcttcctcccgcggccgctgccctccggcgtcacgcagcagttgcccatctcgcttcagccaagatccgcgcgacgcaagaaccccccgcgaatcaaagatctgcggcgagtgggaggccaagaaatggcggcgtgacgcgttgggggagggaggagaaggaggcgagaggggggaggaggaggaggagggggttaaattgggaggtggggtggattcggtggggagacggggtcagccgtggcggcggctggggggcgtgtgggaatccgccagtggtaaagccaacgacgaggccgcggaggaggggaggaggaaggtaggagaagacgggggtgctggtcaaagatctccctctctcactcggctctctcggctctcctttttgcatcctttgccctcttctcttctccctagtttttttctttttctttactttttttttccttttcctctcatttttttaagggacatttaacttattgcaacttttaagctgtagcaattaattatttgtcactcgttttatatgacatgtgaaccgtcgtgtctctatgacatttgggtccagtgataaataatttaacaccacttgtaagtggcaaatatttaattaattctttttttaagctcttccttttcctctcgtgtttattttcccctctgttccccttgcttgtgctatggtgtgtgtaccaatggttttatgttaaagtagttgtttagggcattggtaatgtgtgtgttgattattgttttttattaataaagattattaaaatgtatgtaagaaaagcttttaagaaattattaatgacatttttgcgtaccaaagctttgggatgagtctatattataccttttataactgtcggatttatctaaaaacaccactcaactataaaaatggacactttatgtcactctactatgaaattagacaatttacacttacgccactcaagtattaagatatgagaaaataccctctaagagtaatacaattcggttttggaggtgattttttaaaaacattttgacatccaaataattttttttcttatttgtatcgcacccaattagtaagatatgtaaaaaaatcaatataaataaaaacatgtattttgtttttctcttatcatgaaaccaccatcaaaatcaagttgtattgtccttgggagaggtattttgccctttttattagttaggagtgtacaatatccggttgcatagtttttaaacaaacccgataactgagtgatgtaatataggcttatccctacattttaatatattttcatgcattaattggttaagattttgatgtttacctaaaaagtcttaaattgataactgtttaagaagggactatgttgattgtgttgcttctctcgttttcctctttatctcgtctgatgatcttgttttctggtttccccccatccccccccccccccccccccacatctgatatttttgtttttttgtggtcctggtgtggcgttgtttatgaggaaaatgactttgaacaaagttttcatgaagtgattgaataggactaaaagataaggagagggttaggtgggtgattaaagtgacattaagcagcatttgtccaggtttgctgcctaatcataagggggcaacttgacgctttgatgggtacgggaaggtagtttaatcagattgtggaaaaatctagctgatggttaatgctaatcggtttagctattggtactaagatggtgtaatttcaacgataaatcaagaaaaagttggtcgtactcttgttgtaacaccaggatattctttttcacttcctgatagaattgtgaatttatttttcgaaatagaccctcgttgtaaattgtaaccacttgtgttctgacaactcctgttacagaaaacaaatctagcgtcacagttttactgatatggtggttagtcgtgaattatccgaatatacatttccttctgctttgcaacatcagtgtatcagtattcagtcaaggttttgaggggcgactaattctcgcctaatttgggattggttctttctttttggctactgcatgcctgctgtatcaactcctgcttgtcaaatacatctatatgtcaacttccaaaaagaaagcatccttgtgttcagctaaaatttcttctgaaacatttgcagattcaacagaaagtcaatcgaagccaattcaacacaaagtccatgggcaatgttacacacgagggaattgacagctgaaatgtgaaagtgcgtaattcctcagttgttcaaccgcctcctttttttttgcgcaactgcatgcgttgcgtacgttttcacaagctgaatttgttctttagcttgtcgagaagaacgtccactcaaaagttttagcttcaactgtggaactagtattagtatttgttctttaactgtagagtagttgctatcctgaacattttgtagagtttaaaaattttggtcaaatctttgtactacttccgccggttccacagtacttaatgtgtcagggttatggatatcacatacctaatagtagtcgactaaatctcggcaggacccaacacataccatgtcttatacggaaacaacctccggatataggaggagttccacataagaaaagatgaatagagtttctacatggaaacgataaggactactcggattgtatccatattggtctctctgttctatttggacaaggggacacctatgggtataaatacaagaccccctaggaggagagaggacacggaacaatagatcaagacacaagatcaacatacaagccaacatgcgccaagataagacgccggatatcgacttcagagataagcatagctagtcccctacgatgtctacgaatactgttaggagagacatcgcgttgtctctgatctcgccgggcacgaactcgatgaggaagactaccctattttcgactacgggatggtttcatggccgccatatcgacaacagttagataggctaccccaaatattgcactggtgtgattatggtgaataagagcaacgaccggcttcggccaacatgatgtagggctattacctgacaattcaagggtccgaacctgtataaaaatcctcatctctgtctcttttacctaagtctcgcatatatcctggtaccaacgatccccatactatgcaaataccggaatcgtgacattaaacgtcgacataatgttttggataaaattaagatcaaaattttataactttaaacttcacacatatttaactttaagacactataacatataaagtactataataaaagtaaaaatatataccatccctccataaaaaaattcaaacatagctataaatttgaacacacatgtgtttctttctatctagaattaggtttctttaaaacagagagagtatacctattatatatatatatatatatatatatatatatcataatagaaaaatatagttcaagatatattttaaagaccgtgttattgtttaaaacgttaagaattatatagctagagaggatatgtactgtacgacggaattctggtggtgttcttttctcctgaagatgaagataaagattaagttttttacgtaaaacaaggtggtattaatgtatgatttattgaggtttaattattacaaacttaaaaaacatattaatatgatattttagaggaactttcatatagaaagttttcgcacgaaacataccgtttagcagtttgaaaagcatgccatgaaaatcttaatcttcatccaactcttatcggagagaagaacttgggcatgtttagatcccttggtaaaattttatatcatgtcacatcgaatatttggacacatgtatggagtattaaatataaacgaaaaaaataactaattacacagattgcgtgtaaattatgagacgaatcttttgagcctaattgcgtcatgatttgacaatgtagtgctatagtaaacatttactaatgacagattaattaggctaaataaattcatctcgcggtttacatatggattctgtaatttgttttgttattagactacgttcaatattttaaatgtgtgtccgtatatctgatgtgacacgccaaaattttatacccgtggatctaaacaaagcataagtttgaacccattttcctatttgaagcagacgtggccactcgttcatctttttcatgttccacgcggtgggttctgtggctgttgcccgtgttccttaactgtcacaggctcacagctcacatcgtcatggtttttcatccactactcgtagagatccacttctcatgaattcatggccgggggtcgctgtctgcacgaaccgggcatttatgtttccgtgttgtctcgccttgcatccggtggatgctaaaagcgccccagccgaagagcgtgccaagagaacagcaagggaaagggacacggtcaggtgttcacaccctctgcggtggtgttatttatttatttatttattttgttaagatacatattttacctttattttgttagcaatttttttcaatcggtttaacagtatgtttttttccagataattttctatataaaaactgttttaaatatcaaacaaatctatttttcaagtttacaataattataactaatcatatgttaattgttttttcattttacgtgatcttactacaacatcattgtttcacctattcttatacttatttgtatcgcttattgtaaataaaaaataatctatagcatgttcttaacggtaaaaggcaaatgttataaaatactatttataagtgtgttaatcttcgtcttcatctgaccaagttcaaatgggacctgtgtctcgcggtttcgtggtactagttaagatcctacacggagcattcggtgcatatatagtgacttggtagtcatatcatgtgggtgagatttctccgtggaattacgtgatctaccacaggactttaagtgagtagttgtgtgtgtggggtatgagattgcgttgcaccgtccatgagctcaaggctgcaccataggtcaagagtttgaattctgttcctacctgaatgtgaaatagaaggataaaaagagcaggtttgtacattttctcaaagaaattgtcaggttttcgatcacttggaaaataccataaaattaatggctaggattactcgagattcgtggatacaataactttatcccctcatattcttccccgcaagctcgtccgctcgttctcatttcatttgacgccttacagattgaagcgcttgccgtcgtctcccctgcccgactgcaacgcccctccccggtctcaccgactaaccgaaaagcgtgaaagttattagtaaggcccaacgcaccagtcggcctcctccctttcctcctctctccttctcgtcctccctaagttgggtggcgacactattccccacccctgccttgcctcacctcctttgagctggatacatcgtcaaccccacccaccgctatccttcatccatgtgacttcagtgacaccccccgtccactgccgtcacccaaagccatccctctaaaccccagggaatcccctcccacctctgcccccaccccagcgctaaactctaacctcatagccatctcattattgtcatcgaagaagagcacatcatcgccgggaagtcaccatcacaagtgggtcgtattttttctccccaccctaccccagcacacaaatcaactcttgaagacaactccctatcggtcagggagcatgtgaggtctcaccttataactagcaaatcgctttgtcaaattacatcttacattttacattttatatagaggaaaggcacatacctgactgtttttatatagaggaaaggcacatacatgactgtgtttcctaaattctgatcatttttatatcaactatagatagacaattttactccaattaatttgtcttgtccaatgaacatggacacttgttcaggttcttatccaggttcattgttttagtgttttaggacatgtcacattctatccagtttttttttaaccgaggagtaatttaaacgtaacttgtgcagtgaagcaagcggtcagtgctgcaatcggctgagcagcaggtctcttccctgatagcacgaatttcaaagcatatcggatggcaaaaaaaataaaaaaaatctagccctatttacagtaggtacaatagcagactataagccatctataaataaatttcgaggagataaaagaaaagagtgaagagcagcgagcgagctacaaatttgtagccagctgtagcacggactccaagatgcaatgtgtatatgacaggtgagagtagatatctattaacttattaaaggaatagaaaaatgagcctctacgttcgctctcacggcctagaaattatcatattaatcggaaaaaaagaaaaatagagtccatatagaaatacaatttagaaatagttgaaattcggaattaaaaaataaagaatattggaagaggtgactacagtccatatagaaatacaatttagaaataactgaaattcggaattaaaaaaaaagaatattagaagaagagtatagagtccatatagaaatacaattaagaaataatagaaattcggaattaaaaataatgaatattagaagtagagtatagagtacatataggaatataaaactaactaaaattcataataaacataataaaattaaaagtagagtttagagtccgtataaaaatgcaatttacaaataaataaaattcaaaataaaaaaacatgggaagaagagtttaaaatcaatataggaatagtaactagaatttgaaatcaaaaattaaagaatattgaaagataagtttagagttaacttagaaatacaattaaaaataataaaaatttagaattaaaaataagtaatattggaagaagagcctagagtctatatagaaatacaattcacagataacaaaaattcggaattaaaaaaaagaaatattgaaagaaaagtctagagtccatataggaatataatttagaaataaataaaattttatattaaaaataattaataactaacacgtatataaaatacaatataaacattacacattaatagtttcgtaaagttagtacaaaattttaaattatgttataattttaatatattttaataataaattcagaaaacatatatgctattatatgagataaaatataattatattagctgcgcaatctacgcggccactatgctagttaatagtgtagtatatgtttataggtaactatcatataaattggccattaatttgtctatagataatttgaagctagtagcgagctatactattaaacttgcacttaggttgtgtttagatccaaggttgaaaatttttactgtgtcacatcggatatacggacatacattgtctaataacaaaataaattacagaattcatcaataaaccgcgagacgaatttattaagcctaattaatctatcattagcaaatatttactgcaacaccacattgtcaaattatagagcaattaggcttaaaagattcgtctcgcaaattagtcacaatttgtgtaattagttatttttagccaatatttaatatttaatgcagatgttctgtgacagggtggaaaattttagggtggatctaaaacagggttttattctcgacggtacaataccaaatccgtctattatattcgcgcgaatatgctcggccagtccacctgtcacgcgaggcatgagaagggcgaccgagccgggtggagctgagcgagtggtggtgctgctgcagccgccgccgccgccgcctgcaggcgtgctgaaaacaagtccatgccatggtggacgagaacactgtggacgtggtcagccatggatggtggcgatttggacagcctcgcgaccacgacatatactagtagtactcacatatatacgacgactagccaaaggtgattgctttaatcaaacaccggcgatgttcgcgttcctctggaagttggtgcagtttctctcctcctcctcctcttcttttttaatttttcgtccctaaagaacagaagaagtctcatgtctaaagtgatactcttcgagtcttgacggccagaattgtcagactgtgtgatccagaagcaagctaaagaaagggagtatacggtccagaaacacgttaataaagggaaaggaaaagggttgtctattcttgcttcagtctgactgtgcttgccgtgtccgtcgcattgccgtcgtggtcaaacaaacgccccaatggaagctgtaaacctcattcagtcaacaaataatgtgagatcagaactggctcacctgattcgggagatatgagttgatctcaggaaacagggaaataactattaagaaagtgttgcaatgccagaatactgttagtcacttcctagctaataggggtcggactgtgtctcgatctgagttttggccagacaacacttgtaacctcataacacaccttgtgtgtgaggattctttgattgattaatgaaatttccctttttccccggaaaaaaaaaacaaacgccccaatggaaacatctcccgttgctaacgcgtgaatagacatgtgttcccaactctcaagttttccaggtaggacctgctctctatggttcggggccatatatcgccttttgatcgataaccacgaaatctgtgaatttcaggcagattaattatttatccaaaataaaataaaataaaatttagtatgattttttatgaatttagtgaaattattaaatggctttcgatgtgtaagcactatgacagtgtttctctccacttgtctgccactccgtctaaaaaaacataaccttagtgagttttttttttttcgaatggagtactttcattacttggtcatcgagcgggcaaaaatgcaaactactccaaattccaaaatgggagtggcagccgatacaaagacaagcggtggacttgtgggcctgtggcttgtgggtgatcagcccggatggcttgcttttctgttagtgggctgggaggtgaaggcgataagcttaggtgggctggcttgctgctacgctcgacagaaagcgggctgggcaagatggggaggcaggccgtggctaacgcttgatctctttttgtggcctcttgcctcatgggtggcttttagtgtgagaaatgaacaaggctacgaagcagtactttgttgccctctttagccgatccttccatcgatttcaactgtcaatagtgtcattcgctacagatctcgacgccaaaccaaaaaaaaataaagtttcgagccaatgttggaacctctggaaggtagacttttcgaaatggaggacgatcagatgcgtaatggaaggggaaaacagagtataagatcgcaccactgagcagtgagcatgagggttcggctttccgtgacaggtactattggtgcacgcgttggaggggacgagagttgcaaaatgccggatgaaagagcttcacgacttcacgtgtggtttggtttttatttactcgacgggtccctacacgatgctactgctacacatgaacgtgatgcgcgtgtcatccgcctcgtacagtcgtacctccaatgtaccgccaggcggtgcgcgcgccggcaaaatcctttcggtcacaggatcacggccggtaacactcgtacacggtcacacggatacgtacatctcggaacaatttgatgcgttcgggtcatctgaaattaataagtgcagtgcttcatcctcgttgtaacttgtaacccataattgtgcttcttactagtgttttttgttcccttcctggagcaacaatgcccatcagagagaggggagactgcagttcacagccgtgcgccagacattcccagtgtcccagcaccgtgtaccctctttctcgttaacgatcgattgagcaaaattaatgggactcggtgttgggctggagactggaagacaggcacttccaagtatgtaaacgtaacacttatcaaagcatcctgctttaagctagcctctaacccggcctcattaagttagcccaatttcctggcccatgtacgcagataggctagatctattatattattaagacagctcgaaaagaagacatcacgtttaccgtggaggctagaaattctcacgttaatcgaagaaaatataaattatttacaccgttggattgtaagaggcatagatttcaatgtctgagatttaacacaaacttagcatgttaactgaattagaatcaatctctaactaggatctttacatgcaaacggactcaaaatagttttgtccgattttctaaacttaagttaggttctagaatagttaggctataatgtatagtagcaacggaaatccacagcagcaggtcgagccgcgcggctgcacgatgagcaagaattggacgatgcacgtcaacaaacagaaggaacgatggcatgtgcacagcagctagccaggtgcacaccttaagcgatacaattaaaaagttttcctttgaaaatataggttccaaaataaacttaaaaataaaatttggaataaaaatataataccaataataaatatgtaaatattctttgccaaatatgtacatttatctatatatatattattaagatagctttagaaaaatcatcagagacataaaaaaaacgtagaaatctttattattaagacaactcgaaaagaatgtgccatatttattctaaaagatataaattatcacattaatcgaagaataaattccaagccattagactgtggtagaaccaaattagaacggtgaagattgataacagaaatatatgtaatataattatatctttagaactaaacaatggtatatagaagagtacagtgacagcatttgatgagacttctaaatattataaaaatgaaacgaaacaagataataaactctaaaaagtacaaggtccaatttttaaaggttcgggacttttaaaaagtaaaaagaacaatgaaaataatgttccaatttaaaatctcaatgaaataaagagaggagggagcatgcgagccatagaatagtacaatggcaaagccgataattgtttggtgggacttttagaaagtaaaaaaatgaactcaaacaataattatgtttgatttttagaatcccaatgacaataaagagaggaggcagcagacgggttatagaagagtatagtggtagtgtttgatgagacttctaaaaatataaaaatgaaactcaacgaaaataaactctaaaaattaccaggtcctatttttaaagattcggaacttctaaaaagtaaaaaaaatgataataatgttcgattttaaaatctcaacgacaataaagaggggaggcagcggacgggccgtagaagagtacagtggcaaagccgctaacggtttggcgggagttctataaagtaaaaaataaacccaaacaataattatgttcgattttaaaaatcccaataacaataaagaaatgaggcaacggatgggcaatataggagtagagtggcagtgtttgatgggatttctaaaaattataaaaacgaaaccctaagagacaataaactctaaaaattataagatcaaaattttaaagtttccaaggagaatgaataggaatagtgatagatcgagcaagcaaataaaaaatagggtaacttttaaaaactataaaattaaacacgaggatgatatggtttgatttttaaaagttttaaaataatgagataactatttattcaataaaatttaagtaaaatcatattaaaaatagataattttatatggatgctagccgcgcaattgcgcgggccacccagctagttcttattatcccagacaggcagcatcatgcagaaagtggggtatcctaccactttacagtagatccacagtacacggtatactgagttgagttcaaaaaggaggtgtacccagttagcgctcgcaagtacgagtacaagaacgaaaggcaaattatatcaaacacttatcatttcgatgatacattagggcgatccataacgtacattcacaatacacacacttgcatcatcatcatcatcgtactccatacacggtacacgtacgcacacgtacacacggctccctcgtttcgtacaatctgaaggagagtcgaccacgcacgcgtgcaggcactctaccttggttacaatttgtactaacgtaaacccgcccagtaccctgcacggctgcacccgtcgtaccgtgtactacacggccacgtccccgtacgcgaaaaaacaccaaacacgtataccgttacgcaccccgggctccaccttacgtggcagcatcagctcgccggcggtgatggatggatggatgctcacgattggtggcacccgccgagcggggcgccgccggcgcactggttgtgctcgtacggcttgcagccgtggcggatgacgccgtgcagcctcgggagcgggccgcagaggcggttgtagctgaggtccagcgtctgcagcgtggagagcgcggcgagggagcgtggcacggtgcccctgatgcggttgtggctgaggtccaggtaggtgagctccggcgggaagacgagcttgctgaggtcgaagtcgaggtcgttccacgagaggtccaccttgccgatgggccggccggcggcgaagaggaaggaggcgtcgccggtgaggcggttgtgcgagaggtcgacggtgttgatctcgtcctgcgcgtcgtcgcgcgggatcgggccggtgagctggttgtaggagaggatcagcgacctgaactgcccctgcacgagccccgccgggatgcaacccgtcagcttgttgctgcggaggtcaagcgaccggaggttcgggaggtcggagaaggagttcgggatggggccggtcaggctgttgtgggagaggtcgacggagtcgaggctgcggatccgcgcgagcgagtccgggatgacgccggagacgttggtgtgggagatggtgaggaactggaggttggagagcgcggtgaggcacgccgggatggggccggagaggcccgggaggcggaacagcgacagcgacatgagcgccgtcagccccgccacggcggacgggatctggccgcggacgtcgttggcgccgtcgatgaagacgttgttcacgcgcccggcctcgtcgcaccggacgtggtcccactcgcagcagtccgccgacgccagggaccacgtcgacagcgtcgccgggtttcccagcgactgcttcactctcatcagcgcctgcttgtcgctcggcgggcatcgcaccgccctcgccggcgccgccgcgacggccaccgccagcaagacggcgagcatgaaagaggcggtggacgccattgtatctacctgaactaggctcgtgtggctggagctggcttgagtgtgtgtgagtgagtgcgggagtgatgagctctcgagggtggtataaaaagagccgcgcgtggaggcgtcaggatcagtgtgcatgcatgatgggataaacgatacattttcctcccattttttttctctctccctctcatatcctttttttgaccacccatcgaaccgggacatgcttgggctcggggcctcggacaccgagacggccagcggtgcggtggtactacgagcggacacgagaaggattcgcggtgaatgatgagtgaaaacgaatcaatccctgacaccgcaacatgccaaacgcacacacacgcacaggcacagagataggtggtgccgtggtggtgataaccgggaagcatcgccgtgggttcggccacggccggcgcgtgattggtgcgtgcatgattagcaatggcatgtgggatgggaacgaactggggctttcgcccgctccgtgctccggccagcgcccacattgctgggtgcagaagcagaaagcagaagccgctcgctccgcccgcccggccggccgggcggcacggcacgcactcgtattaactcgcggacatgtgcgctcggatctcccggagcctcaagacgggggcgtcgcgtagctaagctagcacctgttctggatacgcttgtctcggttatgatcggcaaagggccgcaaatggacgggaagacagctcgttttccgtgtaagtcaacatgataggagtactagcaatgaggaggttatttaaatccacatgaaacaattatacgcagtttgcaaattgcagccccctctgattgaattcgcatataatgagtatcccgcactaattatttcggatgagaaaaggtcgaagtgcatgttctactgttcgatttcgtagagatatgcattgcattatcgtgtcgcagggattagatcgatcacatatagcacaggcccacgagagacaatcaaggagacgtcgtcacgtcgctcgcactgtcgcaggcggtggtgcatgcatgaatgcaaactgagtagctgaccaggtccatcactccaccagcccgtgaaaaaacgtactagtagcaggaggacggacacagcagcagcgagagccaccgtcgccgcgccacgtactcgcacaagccgcggcccaccacaccgccacccatgcacgcgacgtctctgtccgatcccctgaactgaaacgctgtcacgctggagcgcgcacaagccaaaggtgctccctgtccgactcggcgcgcgcttgcccgtatcacgtcttcagcgagcgagacgagaggaggaggcacgcagcggcggccatgtgggggctaaataatgcggcatggacgtggtccgacagggttcaggccggcacgagagcgcatgtggaggcttgggcggcgaggggaaaagaaaggattctttcggctttctgggctggctgcccgggccgcttgcagctttgcgttaaacctcccccttgtagaaaatgcagtagagatttcggaggtttggaatctcattatgatgctttagaaccaagaaatgactcccctatcatgtttcacatatttatgtagatctagtttatataggatttaacaaagataattcaatcttgcgttgcaatttgcagagctgccttgacgcttgacgcttttgctctgtgctctgcggttcggcctggccgtccagctacgcacccacatgcatcgaccgaactggagatagatgtaccccgcctgggcgctgctctgtccagtctctgcctctgctcgcaccgggcacaccagtttcaccagcgagcgtgcggtacgccagcaccaccagaccagatagcaccgtcgtctctgcgatttctttacgcgaaaagcagggcgggttggttggatcgcgaaaccgatcagccgaggcgacgccgcgacggagagattgtgccagcgtcaagttgcatgccgacgtaacacacttgattttctttagtactgagatttgtgcgaggtactagtagtagtcgtagctttggctctccatgcgattcttggctgccaaagcggtggctgatgcctccgtggtttgttttggtgcgtcgtggtgttcatcgcaggatctctcacgtgttgactgaaaattgttgtattaggtgtagtctccaggttgcagctttttaacgacggggaattataatcagcctatatgggtggtgtatccttttgaattttagtacgtacgagcacatcacacgacaaatactctattactgctacagtcaccagcgcaaacatttcttaacagagatattattgtactatcggccagctagcacttgtatacttttcattttggatcggttccgccctgaacggcattcatctctctctttttctcagtgtatactacagaccgagtgaaaaatagttgcaccgtgcgcgtgggacagctcgcagtaattcttcttcaaaactagtactgctgttcattcatcagatgacaaaatgacaaccagcaactagctggcggcctggcgctgcagcacttggtggcacacccatcacgtgcctgtaacgagaagaaaaaaaaacttactactaccacagtactattctctctaaaaagaatccaattggtggctaggattgagttttcttagacgaagaggttagctggctgctactccttccgtcctataatataaaggattttgatattttacttgtactgtttgactattcatcttattaaaaaaaatttagaattattatttattttttgtgtgacttactttattatctaaagtactataagcataactttttgttttttatatttacataaattttttaaataagataagtaattaaacagtacatgtaaaatattaaaatctcttgtattagaggacagagggagtagtagttatagtactccacgctccacaggcaacaacagtgaatactctccctcacgcatggataagttcaatcgctaacgttcgtagccctctgccccctcccgtccctagctgccctacccggccagaataaccagatgacagccaagccgtggagggcgatccgtcctttgcccagttgcccccgtgcgatcattacctccccagatccgagctgctcccaccctcccaccgtgtcacgatcgaagaactgcatgcaccatgcatccgcgaccgcgacggcgcggcggcaccgcaaccggccgcggcccatgcatatcccccacgcgcggttttgacgagccgcacgcaagccacgcgcaccggcaggttgccggctaccgacgagcgctccctcgcggtcgcgggcgggcggggcgcggtgtgccggtgtcgcggcggaggcatgggcacttgtcgcggatgggatgcgcatgcgcggatctggggagacgcacatgccgcggcggggagaggagagacgtgacgcgcggtgcgggtttcttggggggcggaaatgaattgggggaggacgtggacgctgcccaagatctgcgtagcacgcctgaagtgccgttcccatcggcgaaacgcgaaatgatcgttcgtttcttctcatcgccgcgtcagcgcttcgatgagaaatacttctacaatactggcatgctgctgctacgactaacctaggctcgattcggcaaggctatgtaggagatgatattttgtggtggtatgaacgagccactcgctcgggtcacggcacatgaggtgtatggttgttggactgcagctctgcacgcatcgaggagagaaaaaaaaggctgagagcatgttcttcgctcagataaactaatctctttatgtacgagactcgctcttaaaaaagggatacgatccacatgcgaacagaataagcaacggggaattaatgatctagcataaaaagaccaagtaaagacgggaaatacatgggtggggtttgacgtcgggtcaaagatcgatcaacctgtccgtgtaccacatgtgctaaatcagggttccttgtttatcaccctgacgaaacaggacacaaaccaaaatgcactataactacgactcagaaatcagaatcctgctcaggggaaaacgaaagcgaatgataaagctggacgacgtgtcgacgtttacgggaacttcaaaagagagagagatagagaacgctaactttacagatctgaacgagataatccaaagcggcgagaaaaagaaagcgaaaaaaaaaacagaagagccaaataaacagacaagctgaaaaggctaaaccagtacagtactccattagcgacacagtagaagatcgtagagctctggaccgctaccacaccagagcagctctgtgctgcttctcttctcccctctcacacggccattgtcgacagcgcattcaagctctgcgtttatgacacccaggatgtttactgcatacagtggcacttcagaattcctatccttcagagggaaagtagagtgcatttacagccgaccttatcatcatctcctgatatatgcatctgtacatctgctgtatttgatgtgtggtccagggttgccaatgttcaattttcttacatgtgccgtgtttgatcaccaagatgcccaagtctctgaccaaaatgtattttgataaaaaaagaggagaaattttcaccctttctgctaaaagctaggcagaaactggatacacctgcaagtcccatacagccataaccttccaggagatagcgtcaaaagaccatacaggcatgtgcaaaacgtcctactattattgaattcccagagccaacaaaatgattcatttagaacgtatgggtgctaaatacaaaaagaagatatggttgaatacacatgaatcatgatctattttactagcatatcatatcacttcttgctataacaaatttatatgcctagtctagaagctacttgaattgctggtctgctggattaaccataggcaccctctcaattcttacaggctgatcgacgccgtccacggaaggtttgatgtaaagattgaacacaacgttggtgaatatcgtgaggataacaagtgcaagtgttgagaatgttacatacgttggagaaaattcaggaagttcatcttttgatccccgcccagttatcatatctcggtccatgtaagggtctgtttcaagcaaatcacagttagatcggagtccatctcactgtgatgttaacattgttaagaacaactgatcaataaaccatgatgctgatgcaacgtggtagctctcctaaagacaactggatgggttttcagagcaatagagactcaagatgcaaacattattactgtgtttcaaagctctgtctgccacttttggatggcttcatccccactgaactgttgctgttgtccttaggttcttcataaatgacaatatggcatgttgtgctactgcatacagaagcaatgaagcatttgtccaagtcatgggtgaggcccctataaacgttgcatacttgcataatgtcagaggtttcattaattgagtagtttcagtacagaggactgatccatctccaccaaacactttataaaaaatatttatatttgttgctgagagatctgtcctgccgaccttttaaagctcttgatctgatcattgacaaagttagtatgagtgagcctagtatgttgcataatgcattgaggtctccacgaacagtttcagccgattgaatgatccatctcttctattttaaacatatattccatctccaaatatataggtcattgcaggataactatggacaacatcttaaaactttgatcaatagtatatgtaaaagtagaacactatacatataattttgactacttaatcaatcataatctcattagattttttgggttaacgagcttgagaaaacgaagatgcttgcacgcacaaactagtgtaagtttaccactaaaagttttcagttgatatcaattactgaccctgatgaacatagtgaattgttgatgaaatggacacagcgcacatgtaaactggaaaagcaatttgccatgagcccatgagaggagggacgaggtaggcaaaagcccaacgggacgtacccggtggaagaggcggcgccggcggccgttccctgggctcggaaagcccctccagctgcgagtcgagctccgccagccgccgcagcgcctcctcagcccgcggctcgcgctcctcccccgaccccggccccggccccttctccgacgacgagaaggcgaccacgtcggagcaccgcctcctcccgcttccgcccactgcacgtgtgttatcggcgaggaatctcaagctcgctccgccgacggcgatcgccgggaacgggacgaagcggagatgcatcctcgccgccgcgcacagccgcgatgtggataacgtactgaaggatttcttttcgattttagcgagataataactgggctggatctaagcccaataaggcccattattatctcacgatgggcttagcccaaaatgggcccagttttagcggtcggcgtgggggcccataagatgggatctcgtgttccccaccggccacggccatcagattcgtcgtgtgtagcgaagcactcgacggaatccggaagcgaagcgagcggagaacgccgacgagcacaccaccgccgccgccgccggctcacggtctacccacgcgcgtggaagcggggcgatggaggcgtcgggatccgagccggggcggccatggacggtgtccgccacctgggctccggctggcggcgcggccgtggaggacgccgtctcgttcgagacgtccgccgacgacgcggaggccgtcccctccgccgtcttccttgaacgcccttcccctgatggcgacggcgacgctcctccctgcgaggtcactggtgagtcgtcgtttttgacttggggggtagcttagctctctgggcttgtcagaattttgcgagtttgccgcgggatcgcggtgtttgcgttggtccgatcggatgcaggtgcactcactgttgtgaattttagttttgcagcatctagtctagcttatggtcggataaaccctagtaggctggtagaaccaaccgaacctagtaggctggtagaatcaaccgaagtggttatcgctgttcgagttctagtgcgtgaatcattcatagttatcgttaaaatgttctaatgcgtagagtccatggattggaggtatctgttttagagatcctttcgtaacttgaggaatcgtttcgactttcgactaataccttaagataaaaattatgacaggttagtatgtcatataacggattcatttgctactgtctactggttattgtttgcgtgatactcttaaacttaagcttcttatgcttccatgaccagagcattcttaattgataactgatagtttgcgttactatttaggaaaatatctggctaagtttttactactttagatttgatttttccatcagtggtaagcggtaagtgtagatacctagtcttgtagtgaagctgttgcactgtgaacagtccaagcatcatcgatcatactgaagtctcaatgatgtatttgttcaattcctttgtactgtcaatttgcagaaattggagctacctgatattaggaattcaaacaatttattgaattggtggcatttctttttggaagatgaggattgggtgatattaccacagaaagctctaagcactgtatacttgcagaaattgtagagttgctaatattaggaaagtatctgtactatagtttcgtcatcctcatcaaactactactagtatttcttttatgaaagtaaaaggaactggcagtattccattgaaagttgaaacctttacatggaattctgtataaactacaaagcccatcgtgccgaatttagagtcgattttcttttcattgattcattgtataaatttcaagtcagtgtctcacatctcatagcatatacagcacagtacctagcatgatgaaaatctaagctatttttccatttcagtatgcatatatctgattcacagctgttcatcagttcatttcaggggaaagtatgagattcacagggtgtatgtgcgaagcacagctcggatttatgaaatatactatacaactgaccccaaggatagctctaaggattatctatgcactgtgcgttgtggacctgcagttaaagagccactcccctctgctgaagaaagtatgccccaatggagtagtgatgcctcaactagtgaaaagcatgagcatgaaaccaaaagcgtaagcagtagtattgatgaagatagctgggttgatgtcaaaatcccagagttacatgtggaaaagaacagatctaaatctcaagaacctaatgcaattggagtcaaacaggaaaccactctggtaaagccttatttcttggtttgtatcatgaaagattgttaaatactcaaccataaacttctgctgggagtgctcctattgtgatattagcttctaaaatttttctgtaactttgtttcgctatgtggaatgcaggcacactatgaagcaactgctgagataactgatgcaagcccatgtgtatctctaactgttcgcctcctttcacttcagtcaaaaacatcagtgcacatcgaggagatttacatatttgctgatcctgttgagccaaccaatgatgaatcagaaacacgtcctggaaacatgggaggtagttctttgttggctatgcttgtccctagcctcatgcaaatgtccaaatcaaggaaccagaaaacggacaataaatatttttctgatgcctcaaggactcagctttcccaaggttgtgcaatggcagtgaataatagtccatgtgaaaatgtagtgcgagatgcagagccgtgtagcacagatgatttaaatttcaagtcagcagggatggaaagcaaactaaatgctatagatggcgatacaataacttatgaaaaaggcaaccattatgagctaaaggattccaagtctattctattgcctatacaaacaacagaaaatacacaagctcctttgacaaagaaccagagtgtgtcaaatacagatcagcctgttactcctctcatggatgaaaatccaaatccttacagtcgcattgagggaaagctggatactcttctctctaagatggagaagatggaactatactgctccaggtttgacgatggtatgatgaggcctatctgtagcatcgagtcaaggcttcagcgattggaacaacagtttgatgtgttctctatggagattaagactttacaagcttcttctgcaagaatgacagccccagatggtttatctgatatgattaatccacaggataaaacagataatgatggtaaggctgaaaattctgcttccacaaccaacaggcagccaggtctggttgtcagagcaccagagttttctttagaagaatccttcagttgcgataagtccaatgaaaatgcagttaccttacgtggaccgagcatggtgccaaggcttcttgttaaggctcctgattttgtttctgaatctgagtttgcttgtgagaagcttcatgatgggtctttctcaccagttgattttgctctgtcttctgagaaagaacctaaaacttccccaggtttagttgtcaaggttccagaatttccaaatgattcagatgatgaattggaggaagagaaagaaacagaagttggtgatcatgatgatggtcatacaaaatctgatgctgctttgagtgaaagcactgttgacagcttcaaaagcaaatctcatgtatctgtcgatggtgctctagcatcagccttggaggcacttcttggttcaaccaagaaaacaccatcttcgcaatctgctgcttgccctgccagtaattcaactgctgaaaatactactgattcttctacctgcccattttcttctgaacaagttgatgagacatccactaatgatggctcggctggccaattatctggtacattcgttgatgcaaataaggtcaataccttcatatcttgtgaggaagcagatgcagttccacaaacttatatctctaaggcaaacttgaaggctgaggtaaacgatctgaataatgttctcgatttgaacatgatggcatttgctgaaagcacagaacccttgtgtgttccacagcttcacacagttgaggaatctaaagatgttggaagccaagcaaatctaaagaataatggctctagttcatacatgatgcaatccattgcaaacactgagcacatcatcgctccttctcagcttcctactgtcttggaatctattaatgatggacaacagttgaatggcaacagatctaccttgtccttggcagagtttcttgtggcaagaaatgctaactttagtaagaatgtgatttctgaagcattatctagtaatggtggtgctgaaatgcataccttcaagagaacatcgatggaatctgctaagaatataaaggatatcaatcaacttctgctgcagaaagctctagaggttaatgaggatgacagtgctaagttttctgtttctggtgggatgaactcttgttgtcttagagcctttactgattccaagaaaagatgcattgagagcagcggcttggaggcaagcctcaatgatagctttacaaaatcagaggtagagcactccttgtcagatttgtgtagtatggaatcatttagtgcagaacctgctagagaagctgtcggctcaggtggtgtcacagctggaaattgtgttgatgatccttttacaggtagttctactgtaaacccaactgcaggcgaagagctgcaaaaggtgtgtgacttgctttacgagtacaatgatgatgttttaggcatggctttcgtggcaaagaaaacaagtaagagcagcccttctctcgaagtcctacttgctgaatcatctgattcggaagcggaaatttctgatgcgaaggacactgacaatgatgctggcttaagttcagctaggttgtttagtacattctcgtcttcagatgatgaagctcctcgcactgatgaacctataattgatgtagttgatctgccaacaccattggatgcatatgcttcttccaagaacgagctggttgatgatgagtctttgcttgatatggatgatccgccaattcctccagagtcgtatgcttctgtcctaagcgacatgcatcatgcatgtctaaatgatcaatcaaaaccttcagggacattcgctggagagggcaatggagagtatcctgacagccttatataggttcaatcaacattgtcccacttgttagaaataagtcgaacatactcaaaaagcctcagctgcactactttttttgttggttttactgtacatatatcaacgtttgcttccacgcccatgcggttttctgtacatataagacttactgtgagtaaacaatttaccttttggtattacctgtgtacacttatcacctgtcctttcacagtttcactgctggccattcaaccttaagcagtcagcaagtaagcatcacaagaaaaggctgaaaagcgcccagatttccactctatacagttaccatcttgtgacttcgtcttttcacgtggttgacgaatatcctgaactaccagagaccgactcatcattccaaaccaggtatgacttattatgaggtaaattatgttcaccaccgtagagttggattgcccgatttactgcaactgtttcattcataccttctctgatccactgtaactgctaggaaatttctttctttctttctctaatcatgcaaccaggtatgtctaatgttcaccgtagagttggattgcacgatttactcgattgtttcataccttctctgatccttgtgatccactgtaactgttaggatctttctttctttttttcccctctaatcatgcattcatgcagccacttatttctagcaggtcagtttctggaacacgccatgttacgtgatgaaacacaagaacagggctacataatgtacacatgtgagcttgcttggcgccccagcggtctgcaccacatggactaatccttaattcctcatgccatgggccaggtgaaatcgtcgtcccacacggtacagctacagcattaacactgcagccggccagccttcgccatggcgtccaagttcaaggaaagcatggattcgtatcaatttgcggctcaactgaaaaggcgcggacgtacagaaatttcaggtatggtcggatccaaacttattaggattggtcgctttcttattggatgatactgtgcgagattttcccacaagaatctgtgcgtatacggactttggaatagagtcaatgcaccgcgatcacaccatcacttgtctaggagcactttcactgtgtgaccatatccaatctaaacagaaatatagccacaagaaaatgtaggggggtgctgtttgtcggaaaacacccttatcaaaaacattggtattatcaaactttggtacgataacaaattgaacaatgaaacagctccaactatcatagcgctaccaaaatttgataatttttggaaccttacactaaatctggtaagacctcaaaccaaacatcaccatccctatcgttaccttaccaagtaaagcaaaacttgttaagattattttggcatttctgccctttcgtccgtcgctcttctcatgcggcatattcgactcttaattactcggcccagacccaacgctggccttacaaatctctcgtttatcaaccatcatcaataaccttatcaaatttggataattatagaactttgcattctacatcaaaatctgataaggcctcgaaccagatgtcaccatcacatctttaacatattaaaatttggtaaggtttatttttattacaaaccaaacatgcgcataaatctcatcactctcttcactgtgcccaatttaaacggaatattttagtaagaagaaacatcttaatcttaccgcacaatggaatctgaatacggcttcagtttaactaagttatctgaatacggcttcagtttaactaagttaaaaaaaaactcgaatactccatattaaaaactgctataaaaatccagagatcagttttttttttaaaaaagcagagatgcagatgatgggataatccaactgtcgactggattgcaaatggcactttcagatatactggtaccataatagtactgtttaataactgcagttcctctcgaagtctcacctttgttagtgtgagagcgagctgatgtgacatttgacaaacaactcaatcctcaattcaggcactttgtcctcgatgtgttatttacagctacgcagtaaactcgtcaggacaatatgaaagatcaacacacgttctaatgctcaaactcaattattcaaagtgaaaccgccaaaccggtgggtcacatgccggaatcaaggcggtagggttcagtactctatgctcaagtcctcttcctaaatggtgcattcatgtccttttgtcaaaatattgttaagcacttatgaagccataaaagaagcaggacaaggtgccggactgcagagaaacttcactcgtactcctacatagaatgaagtgaaggaagccactgaaatggtggtcaagcaattacacaaaacaggtagctccatatcttgttcatattgacatacacaatccttgatgatgacaaaaaacaaattacaggcagctcttgtccccctcaccataagctataaggggcagagcaccatccaacttatgctatttacttgttctgtctgtccctcccaactttgcaatacccttatcaagcacaagaaagtaaagagaacaagaaaaaaagaaaaaaaagagaggatatgatgacagtacatcatacatgtggatacaacactaaaacgagagttccacacagcaaccacatcacagcactgatccctgcgtgtgaagcgaagcggtgaacgatcagccgccggcgccggcgacgacgacgacggcgacggcggcgagcaaagcagagaggaggaggaggaggggaagagggtggcgcggtcgctcagaagaaggagcgcttggatggcgccctccccacggccctcatgaagttggcgagctccagcacgcgcgccaccttggtgcccctcttcgcctccgccgacgcccgcttctcctccgccttccgccgcgccttcgccacctcgttctgcgccttctccatcgccttggccctcttctcctccagcttcctctgcaacacacccccaattccatcagaatccagagctcgattggtagaaatcaatggcgattagatgatggatttcgttttggtttcttgttttacctcgtacttcttgagccaggcgttggccttctcgacctggtcgccctcccagccattgatgacgacctcctcgcgcttgaagcggttgttgaccttggcgacctcggcgatctgccacgcggcgatcttggactccacctcctccttcttcacctgccccaccgacacctcgtcgccgtggccgccgcccgccgacgacacgtcgccgggggcggggagcgcgaggtgggcgcggcgaggggacgggatggggttgctgtccgggacgatggcgagcgggttcgtctcctcgagctcatcctccccgatcctccccagcgcgtcgtccaccccggcgcggctggagtcgccgccgttcgcggctgcggcggcggcggcgttggcgttggctgctgcggcgaccatggccgagaactccctgctcatagtagggaagagctcacttggggcggtgtcgctccccacggagcggatcgacgtgtgcctgctccccgccgcggactcccacgactccctcctccgccggtggtacgacgacgacggctggctcggcgtcggcgtcggcggcgggctcagcgcgtggatgtccctgaactccggctcctcgagctcctcctccaccaccacctcctcctccctctcctcacccccgctgcttctgacgacgatctcccggccggtgctgatgacaatctcccggtcgtcggcgccgcggctgctgctgctgctaccactagccgccgtttgttcactcaacatgtgtcgccgccgtgggtgaggtcgtcgtcgccgtcgccgccgccgccgccgctagtgctcagccactagcacacacgcgtaaccatcggcgtcttgctcttcttcctcctcttcgcttctccgagctgagctgtggtggtgagtggtgagtaggatcggatgcctagcttggttaaataggcgggagaagagggggaggtgggcccgggcgtgtcagtgtcgctgagccagtgcccgccattggaggggcagtttgggtatttccgtttcgatccccatttcgtgtgccttttgggcggcttcgtctcgctttctgattttggaggggtctgtgtgtgtgtgtttatttttggggggtaaggtttagaggttagagtgtgcaaagtgcgctgactcacacaatcatatagttttaacattaacaagcgccgtatgattattttttccctttgattagtagtacaggtttggattggatacgtcacccattttttagggcaaagagcgtgaaggttctagccttctctcttcctacatgtttagttacgtacttccactgtacgatcatgcgtcgccgtaaaatattttaaaatggatcgataaatattactcactccgtcccaataaaaatcaggaaatcaatctatgttgatttttattaggacgctaagttactttttatcgagacggagggattagttgttttttaatggactagattgatgttctaaatagattaattaatataatactccatttaggggcgggacatacgatagattatctaattttgtgatgataatcgactatacaaacgaatgaattaattgtgaaaaaatagataagttgttctaaaatattattctaaacagtttatatatagaaagtttttaaaataccatgtttctaaacttgtaaaacgtgtctacgataatctataatttattgaggaaaagaaccagcctcaaaccaattgctacatgctatagtggtttgggtcaggcggtgatgaggacatcctccactattatccgctggcagagacgctaaagtcgggcggcgaccgtgtgagcctctgaataatcccaccttgcttagctaatcccaccttacttagcttagaaggaggaagccaccttaaaaaggagagccacccttcccctaccggactagtcttttagggagattgggcctttccctgagtgggtgtgctaaagaactgttggggtccggacaaccttaagttattgggcctcggccgaccccacctgggccggattgttatcaggcggccgcaatgaccttacacaaaatatatggttaaatgaatataacatcattggcttcgacataaatggtactccgtttcaggtcataagatgtctccgtttcaggttataagatgttttgactttagttaaaattaaattgctctaagtttggctaagtttataaaaaataatattttttacaaagataaatttattataaaaatatatttaattattaatttaataaaactaatttggtaatataaatattactatatttacctataagggcccctttgaatcgcagggtagaaaaaacggaggaatagaaaaaacgcaggattctgataggaattgaagtgtaaaacagaggattgcaaaacacaggaaaaacacaggaatggtcgtttgattggagcgcaggaaaaacgcaggaatcggatgagaaagatagactcaaaggaaattttccaagaggttggagctcttgctaaattttcttcaaaatccacatgcaatgtgccattccataggaatttcataggatttggaaagtttcaatcctttgaatcaaagggccaaatagaaaaatttcctataggatttgaatcctatgaaattcctacataaatcctttaattcaaaggggccctaaacctagttaaacttaaagctgtttaactttgattaaaattaaaacatcttataacctgaaagccacggagtactactcatatgatgtcagcgactcagcgtatcaaatatacacatatatacccacccctaccgaacgaactacaagtcggtataaccggcgaaccttcgagtgattctgccgccgcatgcaaacgaagggcctgtttagatgggattaaaacttttaagtccctatcacatcggatgtttgaatattaattataaatattaaacgtatactattaataaaacccatccataatcttggactaattcgcgagacgaatctattgagcctaactaatctatgattagcctatatgatgctacagtaaacattctctaattatggattaattaggcttaaaaaatttgtctcgtgaattagctttcatttatataattagttttgtaagtagtctatatttaatactctaaattagtgtataaagacagggactaaagttaaatctctggatccaaacaccaccgaagtctcgtgcactcctgtcccgagagagttcagtcaaacgcattcccagcggataaaataaatgaagatttggtgattaggccgtgtcaacttcaccccccccccccacccccaccaaaaaaaaagaagatttacgattcaaatgtcatcaccgaattgtttactggttacttcgcgagcagggaggcggtgagttacctacgtagtacgtgtgtgctggtttagagcaacgttgacagcgacgttttattaattcttacacacacgtaagaggtactactaccacgtctcataataattcttacactgtttgaccactcgttttatttaagaaaatttagaattattatttattatttattgacttactttattatccaaagtattttaagcataattttttatttttttatatttgcataaatgtttttgaataagataagtgatcaaacagtgcaaacaaaaactcaaaatttctcatattactccaatttaacagaaggagtagtaattatcatcgtttgcatggaggcgatgggtaatcaaaagacgtggtcggccgcggttaaccccgtctcgctgtcacggagttaaagcgggtgtgtgttagcgaaagggggttaggattattttgaggccgttgcgaattagcggcggagccgtgtggggcccagcccgcttgcattatcctactactctattatacaccgggttaggcgcagacaaggtgggcccgggggtgtctccgcgggtgggccccacgggtggagatcgacggcggagatgcgtttggtgtggtgcctgtcagagatcagaacgaacaaacccgtcaggtgaggcgttggccgttggcccgactagatagatagggggtgtgccactatgg

SEQ ID NO: 9366 - DNA, 35368 bp, Oryza sativa
  unsure (1)..(35368): unsure at all n locations
ggggggggggggagattgcgagaaaggagggcgcactcggtggtggtggactggtagtagtagctttcggtggcgagcgtctccataaagcggcggcggcggcaaagatagggtcgtcgtaggaggggtgctgtggcgacaagaatctgcaggtatcggattataatcttctttcttttctttctttctttctctcttttgttctcggtcttcttctgcatcttctcgcttcctggcttcccttttctctgttgcaatctgttttttggaggtaaaataaacatgttcttgggttatatctggcgtgttcgacggatttcttttggagactgtgctgttgcgagtgattaaaaggggattttttttcttgatgtggtggatttcttgccgaattttggcacctctttccgttgcgagattcttccagcgttggcattgcttgccattagccaactttgttttttttttccttcttctttatctgtcctgttcctctctgacgccaggctgcacctgcaatcctcagatattcatcattcggctgggcgctcagagatcaaagcaaagttggcgattactttcttgatcattcctcggaagtgctcgtcaggtgatgcccgcattggaagatccttcatggatgttcgcatggtgaagagcaagtccctgcccatgattgcttctgccgccgtcttcttgctgctgctctccgccgcgctgccgctctcgcagtcttacacttatgagcaagatggtatgtactgtccttttggtggttttgactgttgcaaagattcagaattcatagctgtacatgatcatgaattgatgacatcattagggacccagattatttatggtttgatgacggagctgtcttgtactatcacattttactccaaaaatgtgttctgtggcaccttatttttgtgctttgtttgtgtttatcagtgtttgcaataaatggcttgtacactgcacttgggtcaccttcagtgcctggatggattacaaacggtggcgacccctgcaatgaaggctggcagggtgttgaatgcgtggtctcaaatattacctccatgtatgatctgctattacactttcgttttgttaatgttgtttgtttgattacctgtttatctggttatctgaacaatgtgatatttctggtagaactctcaatgctgcaaatttgggcggacaactgggtaacacactggggaatttcacatcgctaatcaccttgtaagctgatcattcgtgaagtttaagattattggtgatttcctctcgaattgacactgttattgacttggttcttaatgcttcttggtttacccaatgtagagatcttagcaacaataatatcggtggaaccataccagataatctgccaatcacattgcagcgtttgtatgcccatttgatcattttgttactcttccaaaccatctatgtggttattttaatcttttactatggttttgcttgtcaattacagtttcctttctggtaaccagctaagtggtagcattccaagtacattgtcgacacttacgcttttgacaggcttgtaagtatattgttgcctacacattcacaagacttcataaagttagtgctttcagtgataattcttgcatttgcaggtccctcaataacaatcatttatctggagagataccagatgcattttcaactctaactggacttgcaaatttgtaagagcaagtttaagtttgctctaagtgttattctatactagcatttgttgacaatgtgaagtttcttaccaaagtgatcaaccttcttgaatagagatttttcttccaacaacttgactggtcctttgccaccttcaatgggaaacttgacagcattgactagcctgtgagtattgaagtttattgcactgtctttcaagttgacttttcactagtgtcaagtacttaatgttatactatgatcacaggcatattcagaacaatcaaataattgggttgcttaatgtgctgcaagatctccctctccaagatttgtatgtacacaaaactacagttttttttacttaattcttttctccaagaagttcaggaaacctgctatttcagtaaagataatttctctctcttttttcacgccttgttttctgtggtgactaattcaacaggaacatagaaaacaatcttttctccggtcctgtgcctgtgaaactagagaacataccaaattttaagtaaggaacttccccttgattgagttgtttctgtcgatcgttgctctaactttaatgtttaaaaatcaattccattgctcgtatactcttttaatattaagaatcaactagtttttcatgtgcatatttgtgtttagcgaaagaagaaaagttcattcaaactaatgtaccacacaggaaggatgggaacccattcaataccagcatagccccatcagcattgcctcctgctgcaccgacaccattaccatcagtatcacctccagcagggcatgtccccacaaaagaaccttcaaattcttctattgcaccagcagggaatgccccatcaagaaaaaacaatgtttctgcaatgaaatttgttggatacattcttgttggggtggtatccgcggtggttctcgtgctaatggtgatgttttgtctatccaagtacaaagaaagaaaatcaagagatgatgtgtatacaaaaaaccagttaggaaggtctcctcaaaagcttggagaacctaaaatcaaggaagtttcagacatcaaggaaccaccagttaaactcaagaataatgctggaaaaggttgtcattgttctcttggcaaacaaatgacttccagtttttttactttattttttgcccattgactaaactgatctcttgggcggtgacagcttcaaatgtgatttctcatacaagggaggagcagaaattgaatgtgtcaacagcaggtgaacaattttatgcctaaaaaagtgcacatgccctttttttattcgtcactattctgcaagttttagtatggtaaagcttaatagaaacattggcatggcagctgctttcttcctctcttgattttgacattccaatatttctttgcagcagcttcagatgcagtttatgattcaagggaagagcggaagccaggttcatcaatgtcaggtaaatgactcgaaactaaattacatgcagaagtgctattttactgctctgcgagtttgagtatgtcaaagttaacatgagaacttacatggcagctgctcctagggtggttacaatggaacaaaaagagcatgtgattgatatggaaaaaaaagataattttgtggatgaacaactgcatcctccacagtctgctgtactgcgtactgaaaaggtcactgtacatcccagcgtgcgtactagaaagggaagagtaccttcagctgggaaattggatttaactactaccgtcaagtcattctctattgcgtcccttcagcaatataccaatagtttcaacgaagaaaatttgataagagatagcaggtttggtaaggtatatctggcagagcttccggatggagaggtacaaaactgttgggcagattttctagtagttactttagcaagaatttgttgattataccatcgtcacttctgaactgtgatatttgctttgcatcagctactggaagttttgaagattgatgctgctaactcaagaataccagcggatgcctttctagagctagttgtgaacatctccgaactgacgcatcctaacatactcgggcttgttggatattgtgctgagtttgatcagagattacttgtatatgagcactgtagcaagatgactctacatgatgaacttcattatgttgatgactcaaacaagggattatcatggaatgctcgcctccaagtcgctgtgggggcagcaaaagcattacagtaagcaaattataacttttctatttttttcttcccaattttgtgaagtgattctattgatttgtgaaaatgctatgtgtatttttttttttgtagatatcttcatgatggttgtcaacctccaattgtacaccaaaattttgaaccgtctattgttcttctcaacagcactttagttgtgcatatttctgaatgtggtcttgcagcactgtcatcaagatcagtatcccaggtacaataatgttaatgaaaatattttggcatcagactctttggtgatgctctggatgttcagtatttcggatgccctcatgcactgctatttaagtatttatagcatagctgtgcatttgtaattataatgaaggctagtgtaaatgaaagaattgtatttaggaatgggtattgctgattgctatgcattttcatcacattgcatcaattgagatgacagagtcttttgtttgtttgtttgcgaggagagatgaaagagtttgttatagaaaagtgatcttgttatatttcgcagggatgcttagctgacagcagctaacaaatttaggcttcagataatatttctttctagatctattctcaatctcattttttaattgccatccttgtattccagtatagacgccccccgtgtcaattgacattgctaacttgtgaagctgttcttcttttaatctgcttaggaattgctagtgtttccgaaacacatactgtcatgtttagcagtagttatatactttggaatttggatcgcaacagaataaggttgctagtttatttttgactttttgagtgaatgttactatttctttattgataaatagtgtactcttttttatgtcagttgtctggccgtatgcgcaccttgttccattatgaagcccccgaagtgcatgaatctggattattaagtgatcgaagtgatgtttacagctttggagttgtcatgttggaacttcttacagggcgtaaaccttatgacaggtaacattccaaaaggacaatatcccagacccacttccacttagctaagtatccttgttttgcttgaagatggtttctaatttttctcatggaaacggaactgcagttcacgtccacgtgctgagcaacacctggtgcggtgggccacttcccagctttacgatatcgatgctatatcaaagatggtagatccctctattcgaggccaatgttctgaaaaggcgttgtcgcgttttgttgacattatcagcagttgtattcaggtaagatatttgatattaccatcaacaccaagatggatcggtgtggctgacctgattcctcttatgcagcatgagccagagtttaggccctcaatgtctgaagttgtccaagatttaactcgcatggtgagtgatgcaacaaaggcttccatgtaggcgcttccaaaaggagaaaaatcccagaatcctcaattagctcattgctgaaaattcaagagttatctagtcatattacctgcttgcaagttgatcgctcaagcattcgaccaggcgtaggcagatcaaggaaagttcaagcagcgaacttgtgaagtggcgatgtgcagattgctgcatcccccccccccccccccctctttctccaagccattttatccctgataggttccccatccttagacaataatgctcctctgtgatctctctataatcctttagactgtactctgctatcaacacctcgaagtgcctggtttcagatcacatgacgtgatctccgtagttttttagacgatatgtaaatatactcagaagtcagaagtgaagaaacttttgtacgtcagtatgtcgagtttatgatgacggttaggcgcagatacatcagctctaggaaatctgaatattttcctgagcattcacaagtttgtgtactacatatgcattctagtcatacactatatatgcaacttctagcagatcatcataaaccctatgtaagcattctggtcatacacttcgtgatctcttctagcatgagaaaggtttgctttgcattgcacatcttatctgctctgttagcaccggggaatacaccagggttcataaaactgatgaaatacaatcggattttgtgaaaaaccgacgtttcaacgtggctccgcagtggttctcctctgaaatttcaatgggtttcatccatgcgaaaaccgccgtaccgccaatgtccaacatggaagatggtatcggaattgtgaaccctggttagcacttaagtagattcttgtttgtctccaggaaaagaaacgagtttagttccaaacttcttcttcaaactttcaacttttctatcacattaaaatttttttacacacataaacttttaacttttccatttcatagttacaattttaaccaaacttccaattttgacgtaaactaaacacacccctagtaagtttctagcatagcattgttaacttgattactctgtccgtttcatattgtaccgtttcatattgtaaaatgttttagtttttgtccgaactgattttttttttagtttaatcaaatttatgttaaacaatatagcagtattttcaaccaaaaataagtataataaaaaaatattcaatatattcaatggttgatttctaatgaaattaagttggtgttgtagatgaccctatacatttaaaatatttaatgaaatgttaaaaagttagttaggtggtgtttagatccagggacttaattttagtctctgtatttagacactaatttggagtattaaatatagactacttacaaaactaattacataaatgaaagctaatttgcaagacaaattttttaagcctaattaatccataattagagaatgtttactgtagcatcacatagtctaatcatagattaattaggctcaatagattcgtctcgcgaattagtccaagactatggatgggttttattaatagtctacgtttagacactcattctaatccaatgcccatagtacatttgcagtagcacacgagtattctgcgaggagtacgttttatcctctgcaggagtaaaaacgtgcgaagcgtgcaaaagcaaaagcactgcagtgctgcgtgggcccgcaccacctcacgttccccccctctccgagattagtaattttcattgctatcgagagagccagccagtagatagaatccgtccaaatccgaaaaccacgcgacccaacccaaaagattaacaaaaaaaaaaaaagacaaaaaaacagccggcgaaagtgaaacaagaaaccgccttcggacagagagaaaccaccgcgacgacgacctcctcccacacgcctatcgtcatcctcgcgatcgccgcattcatccatccactccccccgcacgccgaaggaataacctagaccagagacgaccaaggagagcgtctccgatggtggtggtggtggtgggaggcggaggaggaggaggaggaggaggaggggtgaagaaggaggagggggaggaggaggcgaggggaagaggaggaggaggcggcgtggtgggagggtgggggacgtgggaggagctggtgctgggcagcgccgtcatccgccatgggggcgttgcgtggggcgccgtcgccgccgaggtccggtcccgctcgccgtgcgccttctcgcctgaggtccgtgcttcccccctccccgtctccaaccctaacctggtggtagtgctcatgagtcgtgcccaatggctgtattgtcggtagttgtaggatactatgcattagggcatggatttagccatttaggggtgcttaatttaagtattatcatcgttggatgatttggtacatttccatcaaatggtcttaggttgtgattttagcgatgctgagaatatgtggtcgtgttgcttggacgggaatgagctttacattccaaacaaaatgaagcaaatgttaaggaacacatgctgtaattttgactcgcaacgagggaatggaatgaaaatgtaaccttacagccattggccttacagtaaagcacccattgcataccttgttcttgcttcgataccaaagtttgacagtttgtgcaatgccaagggtgattcgtcttacacttgcgtcaaactaatttgatggaatgctgttgttagctcatgcctttcttacaatagtttgggtatgtgagagcattgagcccattgtctgaaacattttggagcttagtacaatcagttttacagatcaaattgtttctagtttccaaaaaggagcaatgcattttatccgcctgcatgtctgatgcctgctggaagttatggtagacatttgcttacttgatattagagttccatactaattatgagcttacccattcttgttcgcaggaatgtgaagctaaattttcagagatacaagcacgctactctgcatgcgagtaagtgttgcatcattctttctatgttgtactagcttgtccacatgaattcagtcttataacgtcttgcagtaagtatgtgacgataaattagtaaattgctaaccttgaactttaacctgtgttgagtctcctgtcttggcctattgtatttttcatgcgggaactggatgaactctgaaactgattacacaagatgcataatttgtgtctcatggcacataaaagctaaatagacacgatttataccttatattatttgccttctttaagttggcctatgatttctaggatctacaattagaattacagcaggtgatttttttcctactctctgatatagttttccaattaggacaagtttggtggtaaaatggtgttttgctgtctagcagtgaactggcttagattttagaaattgttgtatgagggcaagggcactggtggatctggggtagagccgtagaggtagggataatactttatgatcaattgatcattgttgagttagctttgggatcatcagcatgagattcaaagaaagaaacagcaagtctctcaagttgggcacagttcgaacagtgcgtattttacaaaaagaaaaaatcttgctatagagaagtattttttaaaaaacaaaataaatccatttttcaagattttaataattaatagtcaatcaatcatgtgctaatgactcgccacgtttcaaatgccaccgataagctcagcctaactcctgatttgaacgtagcctaaagcagtagttgaaatttgaacagtcgattcaactcttaaacatcttttaataagatgtgctgagtttaagttactctcctcatattcagcttttacctagagccaatatacccaagacatttcaactggctgtggtctagtatgcatagtgttttgttctgcagtaaaacaactcacctgttggccattgatagaacatatcatattcattcaacttgcttctttgcagtgcttggtttgaggagctccgtaagcggagagttgctgaattaagaaatgatctgaagaagtctgaaaattttattgggttagtgtttatgttgttacatttcagtatatgtctaattcttgatcttctttttagcatttcaaatttaatttcacaataatttagtttgaatataaggcctatgattattgatttcagaaaaatggtcattccatctggttttcatcttttgtacacttacataatgtgaaatctggtttcctttttcctgttccagatccctgcagtccatgatcaaaagcctcagcaatagcaagcatgatgatggcaactctgaatgtcacactagtcatactgagtcatgttcaaataatgaaaatacagctgataacaattcatcaagcaaagcattgtccaaagatagatcatctgctgctagttttacagaggaagcaagcaacagtcagaaatctgaaaaggtgcaacactgcgatactgattcaattcaagtgaacaatacttcagcagaggctttggtaaaaccccttgttgaaaaaaaggtttgtgctgaagatggtttgctttggggctctagaaagaaaagggccgtgagggataggaggacttttctgatggctgataatagttgcagagctggcgagaatacatctacatcacacatacagacagatggttcctctgaaggctatgcaaagaagggcttgaaaactccaaatctagaatctggtgtgtctgtcgttgagaaagcaaaaccaaacttggcagagattttgaaaactatatctactcaaagtgactgttatatgttgcaacgccgacttgatgtccaggtatgatggatagatcttgtaaattcagtcaagtcttgtacttatggaaaattgattagagttgcacgctgtttgttctgatagggtatcaagcaaatgaaacctttgtggatactaagagtttttagaacccattttagcgacttcaaaataaagtatacatgtttatataactgtttgtgctggaagaaactttcagtgcctttctgcagtttatgcatttcaagatgaaaaaatagcagacactggtatgtttacattctatcttatttgtcacttttgtcacacctgcagcggaagcggactagatacaagaagatgattcgccggcatatagacttccgtatccttcattcaaagatcaagagtggcgcaacatcttctaccaaggagcttctaagagacattctactgtttgtgaataatgtccttgccttctatccaaaggctacgttagagcacatggctgcaattgaacttcgaaatattgcattcagaacagtgcaagagagcgcaagcatgccctctaagagttgtggagtaacaggagcagcaactgcccctttagtgaagaagaacacccgacccgtgcagcctggaagtcatgggcctcatgatgcaaagagaagcaaagtttctttaaaggggactggaagtactgtcaagcagggtgaggccaagggatcgcgtggtggttcatcagtgacagctaatgtaaaaactatgcagagaaatccaccggccaagaagagaggcgttgggcggcctccaaagaatgggcagaagcgtgctgctgcacagcaagatagccctaacaaaggcaggaagaggacccgacgctgaacttcggctcaaaatgcccaaatatacaaaactgtgtacagacagcgtatagctagaccacatagtgtcgtctctttcagtgtttacttgttacctggcaaagactaggtcggaaatcagaatgttgtagcagggagtagtactgtatttcctgttgttgtcttaaaaggacagataggaaagaacatttttataggcagaaactatcaacttagatatatatagtatatctcttgctttgtgcaatgctgatggtttcttgatcaaatgcatgctatgatactaacgcagaaagtttacctgcaaattttgaacttattaggggtatatattcagtacaatgtacagtggcttgtcattgctcaagaatcatgatctgtatagtacctgtcagtctccagtaactgcatgatctgcatctgtatagacgacagtcaatacttactcaaggcgtgtttaggattgatgccattttaaaccatactatattttttaagttgttaaatatgtggatccatttaatttcttgtcaatttttaataaatacataagaaataatgttaaaattttgacaatattgttaaaaatttggtaaggtttattttggctacaatctaaatggctcctcattcctgtttattttaggagggagggaaccggtgctttgattgatgatgttattgggccggtatgtcgttatgatgggccgcggcgggccggcccaaaagcagcgagcccgaggaggagccagccaacaaacaaaccgtgcggaaaacccggtcgccagcggctagcccaaaaaaaaagaaagaaaaggagaaaaaaaagccgccgaggcggctcgcacccgtcgccatcacggcaaatcaccgcgcggcgcgagtcatgggtgcagcgaatgcgaaggcgtgtgtgtgggagagagatggggtccgacgtggagccagccagccgtgggaggtggcggtggaggtggaggtggaggtgatctggggtttcatcattcgtgttccttgtccttttgtaagagaaaaaaaaaatagtacttacttacattgtgaaacggagggagcagtaacttttgctacattttctagtacatactccctccgtcctaaaaaaaactcaatttggaaggggaggggatgtggcaccagtccagattcattgtcctaggaggggtcacgtcccttctaggttgagttttttttggacggagggagtagtttctttttcttctaatttcgtatttacgcgagacacaccactgcacggattgagatcctctgcagtcagatgcacgctgcctttgtcacttacatgtgggcatagagaacatcgggtccacatatcagtgacaaagtcatataatcttgatcctcactgcacatgcggaacgcgcgtacacacactaaatgactactatataccgttacacacgagcttatcaccgttacacatgcaggccatatagacatgccggtgagtgtaccatcaacccatcatggagaatgtatcgtaatatgcgactatacctttaacacgttctaaataatagatttgagacgcataaggatccggtgcagtcgtagtagagactgcaaaggcagttgggaccgttttccatcattagatcgagaggcaatcaacgatccagacatgtgctatatcagttttaagtagtactaactgctactacaatactacagggaaagaatttctgatccaatagtagctctaggacagctatagctactgcaggggatcccaatcctgtttgagatcaacaacaaattcatgacctcttttctatagtgaaataattagttgatgtcttacatcttgctagaaaaatacacggatgaatgtatacatattgtagaaatgatggataaatatgtattgaaataaagtggaaatgatatgggacatgcttatatattaagctctaggatgtattaaatagtaaatgatatgctatatttgtatgtgatttaaaatattttgatagatttgtatgttaagctttaaaagctagcgggattcaaatatataaatatattccattgtgagcgcacttctatctatcatgctctaggtgttgactagatgtagcacggtcatttgataaagtaccatactctacatcttattaaattttagcagaatatgtacacttgtttttgtttttgagaggatacctaggagggtgtaggtacacatgagttatatacaaagacaaagcctacgacaaggctggcctgtacaaacattacttgtaaacggttgcacatcacaccacaattaaacatcatcacccaaaggcagcatacaacatagtcttctttcgggtatgctcctcatggaataaattatcaaacctaagctcttcctctttttttcttaaacgttggaactgtcaaagcaaaagcagttctggtgcaagaacataaaaatgagctttcttgctgtccttgtttccacagcattaaagaataagcacagcacccttaacagccaatgacactaacacacaaacagttcctcttgttttcgaaggttggactaaccatgctacctatttctagcctaaatacctaggagatcttccctacttgcaattcacgggtagataaggttattattgttgtgaattgcagcaatcagactgatttatatccccatcatgtgatccaggcctggctgaggagcagctcccatgcctgcgcctgtcacattaagaagcaattgctggagccagcgccttgttgtaggatcatcctgtggttgtcaaaagttggtgtttcaaacctttcatttagtattaatttatcaagtacaggaataagaaattggtggcagctgatgggttaatatcactcaccctaagacagttattgaacgtgccatccttcagcatgtcagggaggcaagtttgtagtgcagcacatgccctgcatagacgccgcgtagaaaaaaatagcctgttcagaatatttaagtaaaataatttgatagcacacaaatgtcagcacagacctggaattgtctgacagcctaaggtaacatcggataatgtgcttcagcaaccttgtggaaggctgctcagcaagtgaaactaccatgtttgctaaaacactgcctacagcaaagaaacgctcagcagtggcacaaatgtagcgcaatccaacatcatcgaggagaatcttctgaacaatgaaggtggccacctacaaaaatatttgactaaatcagtgaaataataatggttcattaggcctagcttggcaaatgagatttatttctggcctcatttgaactttgagctctcatcaacaaaagaagcttaagttcctcatgagctaccaacttaactatacctgtgtacctgtgtacaaacttaactatacctaccaagtttaaacagttaggtttgggtcataaaaaaatggaattaaaagtggcagcaccatatagttgccaaattgccaacctcctctcaatacatatagcacaatccaccttttaggcttataaaacgaaaggtggcatttgagcttaacaaagggaagcctggttgagaacaagaaaattccaaagatgagcggcagcctgtaataagaagattctaaagatgacaggtggcttacttcacactaacctggacaggctatcattattcatggtagcagaaattttaacctagccaagctacaattcatggtaacaaaaaaaaaaattacacacaaacttcagacagcatcatcacatacttaaagaagaaaaagatgatggtatttagataaacatgagatggttagcgacatacagtttttgacagctcacttcccatttccatggtacgcaaacacagaggaattatttcagtttgcagcagaaaactgataacttcagtatcatcaacctgcgtgtattacatgtgaaagaagctttaattccatttgaaggaaaaaaaatctaaaaccagttcaacacgaaaaaaagaaggtagaaaacatcaaagagtacacatgtttgtttcaaagtaattcaacatattacaaggttacaaattctgttttgtgcatttttcctcagaaccctgccagagggctagtttccaataaccaagctctgtgtctacttatatataaaattggtttgcatccaaacttaattcaaatttctacaaccccacataattcccccccaaaaaaaacatggatacttggtagttacagtgctacaggaaccaggcaaaccactaaacagaagtaaatggctggttaccacgaggatcttggaaatcttttgcttacaatttatgcctgctgttctgcctaatacaagaaggatgcattcttataaggcctcatgcctaactactgaataataataacatggctcttcgccaagatggcagaatagaattactgaaatgtgtcaattgtaatatatatcatgttcgtatcactggttaaacgattaactcatgtaactacatagatgaattaccttaacaagtgcaccgatgacacccaggctggtgagtcgcaggtattcaaaaggtcttgtcttgctggtagtattcaagaatgggtacaggtacaggggaatatgagctgaaaagaacaaaagaaaatgagagagggaaatggaatttttcacagaaacaaaaacaagagctaaaaggttctttagtgtgttattttcttatgaagattaagactttacctcgatttttgttagcacgcttttcaaactaataaaccgtgtgtttcgtgcgaaaactttctatatatatgttgctttaaaatatcaaatatatctatctgtcaagtttgtaataattaaaaattaattaatcatgtgctaatagctatcttgttttacgtgctccaactttatcttcatcttcatgagtttcaaacactagtactacacatttaggaattaggatacgtcaaatatagattacaaaagcatgatcatacacgcatatgagagacagacatgcaaaggaccatgaccattaccagttaagaaaaggatcctggtctcagggtgagatgcaacacactgaaattatttttgaaaagcaaaaaagaaagagttaatcagcaaatctatgtcataaatccaacttgggtaactcaaaaggcaatttctactgtaaaatacatcatgaaatgcaagcaaccagaagacaacttttccagcattaccgccctatttcataagattatgtacctgaagaagtgcaagtgcattgcagactcggttcgatgcacctggtgacaatgttgggggtgaaagtgcagagtagattgacacaatttcctgtatgtgttggcaagtatggatacaccaagtgagtaagattgctgaaatttgagtaagtttggattctaagcaacaagtgctaatttgaacagcatacaatatttgacctcaacagcaaactgatgacttgagagtaggattaaaactataaattatttgtgagtttaatcttcaagcatgcaaattgtaaacatatacgaacaggggaatcatgcagacctgaagaagtgcagcaactgttccaaaagaatgccaaagaagtggggccagatcttgaaatatctctcttttctgaaaagaaaggattgaattttttttgaccaaataaactggcttatcatgttaatgactggaacatgaagtctacaattattttgatcaggaaaattacagaactaattaggtacaaaacaaaaatttctaaattagttactacaaagaacatagggttctaaaattttctttagcaaaacattgctgttgacaatgaagccatctgctctggaatatggtaaatctacaatccaggtctgtgtgtatgagcggtaatctgtataaacactttacagcgtaaaacgccttaaagagttaatggaactctcgaaggctacccataataaactgagtctaattcgctattgtgctacccaataataatggtaatctagcgggaagccgggaagtttcaccgaccacaataattagagatgttaatgttatcttgatcaaaacgtagtgtaatagcccatttcatgatagatgcgcatcaaccatacggtaaccctaacaccaaatcaccattcaccaaccctaaaaaaaccattgacattcacaatgctaaggcgaaaccttcccccacaggcagtgtgaattccacaaattaccaccagtgccccagatagggtaggctatagaaccctagaagaacgcgcgctggacctttgagagctcgaggagggcgttctcgcgaagctcggggtcgcagaggtcgagcaccagctgctccgccgacgccatcttcatatccttggctggctgccccaccccgccgcccacgccaccgccgccgatcggagaaggcgatggcggcgaggccccggcgaaggagggcggaatggaaagcgagggctgcagattcgccattatccccacagcaactgcacaacaccaacgaaaccaccatcaccatttcttcccaaaccacaaaattatccaatcaaaaaacacacaaactcgatcaattccacacatgtagcaaaataagggattcgactgctcacaggctatacagcacggagcgaactaggacgaaatggaagggatcacccgaattccgcgacggatcaccactctccgctcctctccggcggcgccgcggccgccgtgggctcgccgcgacgggaggagaacgacggcgaagtcggaataatgcgaaactgcagccgaggcgaaagccgaggggagagagatcccctctgtcgccccctatggcgccacacggacggccaggatcaaccgatcgccgagatcggacggtccacattgcaccgtccgcgacgaacgggcgtgatgaagcggaggttgcgtacacgggccgaggacccatgtagatccgtgatggcccggagtttgggccttattgggcttgaggttttgtggcccgtaaagggaggggtgtatctgcatatttgacacccgcggcgctgcgctataaagagtggctcactagggtttacctccgcgccgccgcatcctccttcgcaagcctcgcctccactccccgcgccgccgccgccgccgccgactcgccggtcgtcaccctcgccccgcagccatggctgagcaggtaaggcccggcacctcctgttcttccgtcgagcttctccgtcgcttgctataggagtcagttctaggtgggggcacgttgccatgtgatgcgcgtgttgcgatgtgagactcgatttctcagttctcgtgatttgggctggaacgctagcgatggaaagttagtgtgatagtgtcatgaatttgttgaggtcttcttgttagatgtggatttgttgaacggtgggtttgttatatccgcactcgtaattctctcgtgttaaattagcaatagaagttttgggttactggatcgaagttttgctgagatatagttactggatcgaagttttgctgagatgttccaatagattaacgcaaccgtggatgtattcgatgtttgggttcattaccgctgccgtgttcatggtaacgaatgataggtctgtgcttaatattcgtgatgctgcagttgtgtgtttgtcacgttttaacctcttttatggttgatgtggagcttatctgctactgaattagatacagatttgtattcttgtttcccatttgttcaatccaaataagtgatgcaagtggttctagctatgttgtgtagagtgttgatgtttttcatccatttctgttgtgcagactgagaaggctttcctgaagcagccaaaggttttcctcaggtagggttcttctgctctttcaatgctttatgtattctgtgagcagttcacatgtcttaacgatgtttttctgcttcattttagctcaaagaagtctggcaagggtaagaagccaggcaagggtggcaaccgcttctggaagagcattggccttggcttcaagacccccagggaagcaattgaaggtacaataggttatttgcctctttgtttagctgattctgtctaaaagttgtatgctgtacagaagaactttggtgttttcactgtagccactgaatgatttgtagtgcgttaactttaaaattgtcactgaaagaacagttgtttgtcatgcattgacagtatttgttaagttgtttttatacactactattgccggtatgtttgactagcaatttaaattcatctgaatattacagacctgagataaatgctactatttgttttaagtattgaacagttgattaactgcaattctttctagggacatacattgacaagaagtgcccattcactggaactgtttctatcagaggcagaatcattgctggaacatgccacagtgccaagatgaacagaactatcattgttcgcaggaactacctccattttgtcaagaaatatcagaggcaagtaaactaccatggattatatacttatgtttcctttccttttctccgttctaacatagggtgcaaacctcccaccttgcaggtatgagaagaggcattccaacattccggctcacgtctccccatgcttccgtgtcaaggaaggtgaccatgtcatcattggccagtgcaggtaaaacttaactcccataccttagtttttgactccttagaatcatcttaaataacagaggtgctattagttcaaacattgtcagttcacccagctagtactgtgagatttggttgctgaagtacaatttctgcattttcaacaggccgctgtcgaaaactgtgaggttcaacgtcctgaaggtcatcccagctggatccaccggcggcagcggcggcaagaaggccttcaccgcagcatgagcttgtactcgcattattcatgggtagtttatagacagatccttttgcttgaagtcctggcagggctggtgttttgaccctatcgatttggatattgttcccaacaaaacgaagtcttatcatcagaacgtgttttatggaatctactctatgcaaagttttgttaagatgcctgttaatgctcgatatgctgtgatccttgattttcctggctggctatgtgttgacgcttgtttgttgtgtttcttcgaaagagtattggtggatatgctgtgcctgtgcatgactgagattctgaataaggttttcccaaacccaaacctgacctaattcagtttttttgacaaggcttgaatcttataagtttatcaatggacctgacatcttcctatcgcacctaagctttgggaggatgctaatatctggtacaacgtttacatttcacaatcaaacacaactctgaaatgttcgaatatctgaaatgttagcctggtacaccatttacgtttcacaatcaaacacaactctgaaatgttcacctttgtccttcagagaattagagttcagatcaacgaaaaatgttcagtctcgtataactgctacagtcttgcactccaagacgatgcgatcgaccacaaattaacgagaaatcactgccatttttttttagcatagacgatccatcaaatgagtaatgcttgaagtttaattcgcacgaagtgcaggttggggtgatgattgttagtggtaaagctgcaagaacaccgctctgagcttcttcccggccggagtttgggccttcttgggccgatgtttacggcccatatagagaggggtgtatctgcatcgctagggtttgcctccgcgccgccacctccttcttagcaaagcctcgtctccactcccctgccctcccgcctctccggatcccccgcgcgccgccgccgccgcccgcccgccggtcgatacccctccgcggcagccatggctgagcaggtaaggctcctcccagtcttaccctcgagcttctccgtcgcttgcttagggtcagttctatggtgtccttgttatgtgactcggatcttcttgtcggtgttgctcagtggtattgcgtgatttggcctggaattgtagggagggaaaactggtttggtagccttgcacatcagtatgttggtcattattgtcgattatagatttgatttggggttctagcctagtctcatgagtttgttgaggttttcttgttagatgtgggagtagttgggcggtgggtttgcatagtaccattctcaactctcacttgatatgttgtgacttgtgagccatgttcatggtagcaaatgccaggtgcagttttgtggttagtgtggagcttatctgttagagagttagatataggtttgttatcttgtttcccatttgttcatgcaaacgagtgatgcaggtggttctagcagattttgtgtagtattgatgttttacatccattcctgttgtgcagactgagaaggcattcctgaagcagccaaaggttttcctcaggtagggttctgctgctccttcaatcaattatgtactattctgtgagcaattcacacgtcttgacaatgtttttctgcttgattttagctcaaagaagtctggcaagggtaagaagccaggtaagggtggcaaccgtttctggaagagcattggccttggcttcaagactcccagggaagcaattgaaggtacaatagagtcttgcttctttgtttagttgttaccagaattccaattcattacattttagattcttgcttactatcttttgtgtgctgtagagaagaattatggtttgttttactgttaccactgaagtgatttgtagtgcattatgaacattaaaaattgtttctgaaagaatcgttgcctgtcatcagttaacagtatttcttaaattcttttgatacactgttgctggtatgtttgactagtaatttaaatgcagctgaataatgctatttcttttatgctaattctttcaagtactgagcagttgattaattacaattccttgcagggacatacattgataagaagtgcccattcactggaactgtttctatcagaggcagaatcattgccggaacatgccatagtgctaagatgaacaggactatcattgttcgcaggaactacctccactttgtgaagaaatatcagaggcaagtaaacaattatggattctacttatgtttcttttcctttttctgacttgggttgcaggtatgagaagaggcattccaacattccggctcacgtctccccatgcttccgtgtcaaggaaggtgaccatgtcatcattggccagtgcaggtaaaacttaactcccataccttagtttttgactccttagaatcatcttaaataacagaggtgctattagttcaaacattatcagttcacccagctagtactatgagatttggttgctgaagtacaatttctgcattttcaacaggccgctgtcgaaaactgtgaggttcaacgtcctgaaggtcatcccagctggatccaccggcggcagcggcggcaagaaggccttcaccgcagcatgagcttgtactcgcattattcatgggtagtttatagacagatccttttgcttgaagtcctggcagggctggtgttttgaccctatcgatttggatattgttcccaacaaaacgaagtcttatcatcagaacgtgttttatggaatctactctatgcaaagttttgttaagatgcctgttaatgctcgatatgctgtgatccttgattttcctggctggctatgtgttgacgcttgtttgttgtgtttcttcgaaagagtattggtggatatgctgtgcctgtgcatgactgagattctgaataaggttttcccaaacccaaacctgacctaattcagtttttttgacaaggcttgaatcttataagtttatcaatggacctgacatcttcgccgcgaggcgaggggggtgtgggcggtggaatccggtggaatctgggcgaggcgccacccgtgccccctcctctgacccccgccgcgcgctgcctcgttgcgttgctccattccgcccgcgcccccgtgctcgtgccagtgtggtgtgcggtgtgccacccgcccccctttcccaatccctccggtctcccctggaaaaacattttttctcttcccaaccactaacacagcaccggcggccattaacgcgctccgccgcctccgccgatcctcggctccggctcctcctgcagacgcgtccgccgcagcggccacggcggtaagttcctcagttgtccccttctccgcacgaatcctagatcgttctgctgcgtggggttcggaggtatctgctatccgatcgcgtgctcgtgagatttgcctccgcttttgattgggagtaatcccagcgagcccccggcgacggcggcgagcgctcgcgaagctgcgagtggaggatcgaactgtcgaacgtcatttcgtcatcaagcatagcacgcttttttttcccctagtctagtcgccgatgcattatcattcccacccatgcttcatcgcgcatcttgtgcttgtgccatcctcaggctccagtaaagagcaactgcaaatcgtatcgcatcgcgaatcacgcatgacgcgtacattagatttttcagttttcccgtttatgtccgcttcctcgaatttccacccccccccccccccttttttttaccagcaatccacgggaaagcagatgctaaagctggagtatactacttttcttgttttcttccctccttttggttcgtgaggtatgcatccaaatttatgtacgcctcatgcctatgcatttctctgtgagggaccactagggatcatgcgggtcatgtttttaccccaaaagagaaaatctgacttttttttctctgcatacaggatgctatgaatttatcagacctttcttcttgatgtcatgagacagtccgcctttattccacatatttagaattttagatagtagtgccttgtggataaggtgagttcgcttgtgctgttttatttgttcatttctggtgaagtatatgcttgccgaactctctaagctggctcaatgcaaagtaatgaatgatgatactacccacttgattccacagaatggtagcgggagagatagctgttctaagatgagactgcggttgcatctgctgattctttgcttgatcattttatttctggtttataacatggcgagttaccaacataaacagacaaaggtaacactcatctacgaaatgtctccctgtagtttgcttgacagatatgactgaccttattatgggttgttgcagttggaagcaaaatcccgtccatttgatacaattacggtatgtaaaccaatcagctccactagaaggaaaagaactttgtgctatgttaatctggaagcatattttcatttgttgctgggacgctgattttgtcttctatgtaaatatttaggtgtctgacaaagtgtcttctaaggtgtctaaaagatctgccaatagggttggttttttaccccatggtatagtggaaccttactctgacatggagttgaagccattatggctcacaagaagtgcgcaatcaaaggtaatttgaaaaccaagcctattcttgtatacagtgtgttgctcagtacaatatatttgttggttctatttcagttttcatacataaagcaggctttagttgctccacctttctgagtacgaggcctgaatatctagttatctgacgctctgcgaattttggctccacaggattctagccagaaggatcggtgcttgcttgccatccctgctggtatagatcagaaaagaagtgtggatgctattatgaagaaggtacttaatttgctacctcaggaagtgatagtttcctcatgatggtaactcttgaatgttcagtttcttccagagaattttacagttatgttgttccactacgatggtaatgttgatgggtggaacgatctaccttggagcaaaagtgtgatacatatagctgcttctaaccagacaaaatggtatggcatctttctgcccttcctctgtgagaagagcctgactttgagtgctcttgctgttgaatatactttgcttcaccttgcgatttctactgatctggtgtcgtcttaattcaagataagataatgaggcatctattttttaggtggtttgcaaaaagattcctccatccttctgttgtctccatgtacgagtatatatttctttgggatgaagatctggaagtagataactttcacccaaggaggtatggtatttcataaatacttgatgttgattttgagcctcacattgcctagctgttgtataaatgatgttgaggttagacatactgaagtgctgaatcattcctagtacaatgtactgaatcccgtaatcctggttcaagaaactttgtataaaattatcagtgcatcttttaaatgtaagaatcaactactgactgactggtatgtgttaggctgcaaaagttaatcttggcaataatgtgatcttatgctaattttcttctcgagtattttagtttatgctatgcaacaattgtgctaacgcatgaatttcatgcaggtacttgaatatagttaaatcagaagggctagagatatctcaaccaggtcttgatcctaaattgtctgaaattcatcatcggataactgttcgtaaaaaggggtggagtttccacaggtaactttttcatgtgctgcaactttttttattattgatttgttgactaaatcaaacaacatatgcactttgatagaaaagttaatcggggaaacaaagattgtgcaaaagagggaccgccttgttctgggtatgtcttctttcttgagttatttctcattatatgacagctacttcgctgggtaactgtttgcattggttactgtttggtctagtgcagttcaatagtattgtcttactgcacagtaaacacagtaactacatttctgttacctagcatttagcaacaaacctagatcatatttctgcttggtgtaacgattatatcatctatagatgggttgagggcatggcaccagttttctcgagatctgcttggcgatgtgcttggcatcttatccaggtaatggttgtatctttcaatagcaatgagattctgaccatgtctcatatttgaatgtataattgaacctggctataaaactgtccttctgagtgcttaattcggccaggggtattacaagatggaatagacctcagagacccattcaatgttaaaattttgagccagtgacccatcctatgaacatcaagccatattgggcaaagtgatcaggactgttttttagtatacaaaaaggaccgttcagggcctgaatggcatccttttatccccttttggcagaatagttctgctcaaacatgtaaatatcaaatcttggatgataggggaaggagggagggagggaggaaaaagttgccaaaaaaaaaactgcggaaagagctgttataggcttatagcaacttgttttattggatccgtttattctaaaaaaagttaagtctccgtttttccacattactcacaaaatgctttgaatcatatttatttatgtggttctagttctcttagctttacatagtccccggattgctaatgctgcagttgtgaggaaaagggaccaatccattataagttcatagtttattgtagataaaatgacttgttgccataaggaattaatatatgatcaacctggtttttttttttggcaaaaaacacccccgtcaatttacctggttaccacaatctgaaacttacattttgtctttaacctaaatgacttttgtggactatattgcagccactaatatatatatgtttcattttttgcagaatgatcttatccacggatggggcattgattacaaatttgggtactgtgctcaggtttgatgttgcttttaaatagatgtggaattctttatagttaaactaggtgaaaccccgtgtgttactgcacgagtttagtatgataataagtagaaataatgtgtaagatagctagaccacataagcttatataagttaatgtgatttatgataatttaaatggtaatgatgatccaaatgtaaaagtaaggtgatatggctttatgagaggaaaaaggagggatataatttggaccatagaataatcatataagagctagaaacaattaaggtgatatggcttatgagcgaagagagaaataacattagctaagtgagggtgaggatgaactgtgtagatatataggatattgtaaaaaatgatggagatatatattgaaatattatgtgaattatgtgggatgatgatttaaatgtttgcattttagagctctagaatttaacaaattatatagataatataacatgcttgcatgaggtttaagatgtaataattgttagtggatgataatgtggcatctttgcatgttgagctttaggatgtaactttataaaaaggtaggatttctttggctacacgtgggcattggcaatgcagggttgtagttcatgtctcgaaatttcttttgtgaagttttattagaggaatagtcatatattttccttaattcttcatttccttaagtgatgtttcactgtaataatacttttaccttaaccttaccaccaaccatacttcctttttcatcatttttagggtgacagaacaaagaacattggagtagttgatagtgaatacatagttcatcgaggggtacagacattgggaggtccttcagtaaaggtttgtacagatctattatttttgtactgcacgacaatctctatcagaccatatattaatgcctttgggcacatataagaagataacacatcaactttttcgatgcactcattcactttcttgagttttaattgactgatattcctatccatatagctatagcttttatttttaaaaaaagaatttggggagttgaagtccttgttattgatattttactagctaagtcatagtgacatgaatacacagccacacaggactaataactgaaatgctgcatgtgatgattgactaatagttaccattgggtggaaagtgtactaagtgtgacaatagaaacatacttgtatataatttagggatgatgccattcttaattcttatatacactacattgcaccttaataactgtttcatatattaatttaatcagcgatcccatggcaaaacaatgatccacttcaccagaaaatngcagaagcgcaacaacagatgagagtatgctgtctttgccagatccttagaatacacattgtagttatatttctttatgcaacctctcaataatgcatatgacgttacttgtaaacaggtgaaggcaggccttgatatgcggacaaagtaagctaagaaactataatctggggaatgcttccatatggcattatttgaaatatgacccaagctaaaacagtagaaccaagagttgaaccgaaacaagctaaataatcactgatatttcacttgtaaactgaaaatttctctgggttaaaactacaagtcaaacattatttggcagtttaccataatttgattttttttttcaagaatacacaagttttacccatcaatgcagcattctattctcttgcattaagatgaccatggtttgtttggtcttgtaggtcaggagatattcacgatcggagcttcgggatttccagaagcgttgggagcgggccaccagggaagacagagcatgggtcgatccgtttgctcgcccacgaagaaaaaggaagagaactgatagacaataggttagcgagtgtttcgatcatgatttgtatttttttttcttttgcaacaccagttttggagcgtagagttttcggtcgccacattatgtgtagaaaatttatgaattctttacaggtggtatctacagtttttttaaggtaacacatgacgaaactcccgaaaagtttgagcaggaaaagtttggttgtatggacatgtttggttcatttccacatattaacacactatcttttgtcaaatcttgcttgaaattgtagctaacaaagtttggcaaagaaataggtctaggtctatgactggtgcggcaaaccacagttatggcagtgactcgcttaaggaattatagcgtgcctatgtaacaaagttttatcaaccaaccaaaaccaaacatgcccttcgtgtggtactgtggctggttccagacatggggattttgctagcgtggtctattacgtccaggttctgacaaaaatcggttgaattccgcgaaatttcgaggttttgttgaggctcgaaagcagaagccgtctgagatttctatgagtttcatccaaattcaaatttaaattgataaaaaagaaaaaatcaaataaaatcttataaatagtgtgatattcatagaatctattgggatataaattttcgaaaaaattgttgtattccatgtatttactgaaatttatagtaggaaaggaaaaaataatgaaataaaaaaggaaaagaatttcagtttacctccttttctagatacggattgaaatttcagtgatttcgctcagaatttcgccaaagccctcggttttcatgagcttatcggtaaactcagggaatttgtattcaaattttggtttataaaatttgtttggaatctatcggatttcgcgaaaaccgttatttcgccacagagttcaaaacggaagaccatttcgaaatcgtaaaccctgttacatcctctccaaagctgaaactgaatctgataggaccttcagctgctcaactccttccctgtcccacgacgctacacggctgctattcggatccgctgtcgttgggcctaatataagcggagacaagacgaaaaacgtgcgatgctgttagcatgtcagattagtagaattagttgctcgcttgtcgatcatgcagggtcatgtagtacaattgttgtgttggtttttcttctctctacagctacgcttgtcttgctgctttgaacttcccatgattccatttcaaaggaaaacagaaaatctttctataatcattttttttcttttttattgtgcactcgtggctttttaggtactatttttttttgtgaataaatatgtttcaacatgcttgaatgtatgcattgatagaaaaagaacggcagtgaaatggacagatttttaccaagcttgaatagtggtgcttgaatgtatgttccaacatttcctttctacatatgccatagcttttgctattgtgagttagctacatgagatatcaaggtcatctaccttccaactcactttgacttggtgtctttttgttgctaacttgtggatccataggtcatcaggtccacatgtcataacaaaagtcatgtgactttaaagatatatgatctttatctatctcgatcaatatgtgtttcgaggagcaactagcagactgggagagtagaagcctcaaatggcaactactgcaaatctgcaatgtaatattaaaaaaggtcagtggagtaggagtttgagggataggggggagaggtggagggaataatagatgtagctttatggataatctcgattataacaaaaagataaaacaaccagtcgacaatgaaggagttagagggtgaggggggtgagggggatgagcatctttgaaaggcaacaaagaatcaaatttcatggataatcctgactaaaagttagaagttagttaatactaatacatgaaacttagatattacaacaaacgatatataggtatcagaggaattcaaggatgactatccttgaaaggtgacaataaataataagagcaagaagttaactaatacgcgaatgaatatgctagctttgttgaccatcacacgataaaaaaaacaatttatagaaaaacatggtgaaaacaaaaaaaaacacatgagtatacttatattgacatggttcacatgaacaaaactatgacataatatgcatgaaaacgtttcgccgaacgcaataagaaacactttatatgcacggtgccgatctaaaacattattgttttttttttctatcatgtcacgcattgcaaaagttatagaaaaatattacttcaaccgtttcacaatgtaagtcattctagcatttctccgtttcacaatgtaagtcattctagcattttccatattcatattgatgttaatgaatatagacatatacatctatctagattcattattatcaatataacgtgaaaagtgttagaatgagttacattgtgaaatgaaggaagtacgaggtggaatactatacgagagcccgcttgtcttctggcaggcccactggcccactcaccttccacacggattctgtaacaaaatttcgcaggtatccaccgcggggcagtcaactggcagcaaaacagtagcagaggagaagcgaagcgatccaccgttccaccgatcaaggcaggtatcaaatccggcgtggaaaagccaatttcgcaaaatggtcctcgcgatctgctgccgagcctgagcctgaagcgagacaaacagatccacccccctcgtcctcctcctccaacccccacaaagctcagatctcgcgccccatgagcgctccctctcctcggatctaaaaccattcccaccccctctctctcctctgccacccaccggaggagatctgcggccatggcgggcgccgcgggagggttcgtcacgcgggccttcgaggccatgctcaaggagtgcacagccaaccgcggcaagttcgccgcgctgcagcaatccatccagtcctacctcggtgcgtgcccgtgcccgtgccccatcctcctcctcctcttcctcttcgctgccgggcattgggtggggggatctccctgccgcgacgccgtggcgctcggtttggtgggggggtgagttgactgtgagctgtgcgtgtcgcagatgccatcaagggggcggcggcggcgggacaggaggagggcggcgacgcggcggcggcgcccatcacgcaggtgctggcgtcggcggggcgcgtgctggaggggactcaggccgagctggtgctgcagccgctccgcctcgccttcgagaccaagcacgtcaagctcgtcgagcccgcgctcgactgcctccatgtaactcatcttctccttgctagtacttgtttacccggcccgatgctcatgtagcagaaagtgtgttacattatcgcttagcgccgatcattgttgagatgcgtggggagatctctcaccttagcaccaaagctcctgtgaacggcattggtccatcgcgtgaggcaaccactttgtaccgtctaggattatagttcgttcataccggactggatcagtcctcatttcacatttaaagatgtgttgcacaatttctcgagttttttatatactccgtaattgtttaggttggaggtggggggctgcttaatttttctagtagtctatgggtcttgcagacgcatcatcgaagtatgcaatacagtaatgagctttctttgaagaggctgtgttaaagacttcaactgtatatagagtgcgatttagaaagtaaattaatgcatcagaattaatagttagcatctgaataacaattgagacagcactgcaagatccacatcaactaacttcactaaaatgctacatatagttcaaaatcaaaaaacgcaaacatggtggacacacatgcctacttaagtttaacactttttcatgggattttttttggttaatgtgccaattcattttgctagtagcgtttaatgaaaatcagagtttgactcatcatgctgctatacatatagatatacaggtatgccgtttattagttatcgtctttgtatgacgtgtaagattcatttccctgttcgtttggtcaggcagtgcttctcatcctggctgagttgcagaccatatgaattccctaattgccactacttttcattacatcaaattttggacctagaatcatgcccgtaatatatgtttaccacctttacgttgccaacaaggttttaccttttcttttacatgctacaattattgaaaaatgtcttttcttttttttttttgcgggaattgaaatgtattttctgattgacctgttccattttcaattaccagaaacttattgcttatgaccatctagaaggcgaccctggtttagagggtggtaaaaattcccctctatttactgacatcctgaacatggtctgcggttgtgttgataacacctcctctgacaggtacacatcactttaagatgatattatgttggatcacacttttgcacatgcactgaactgggtgacatctgtgttgcagcactgttctccaagtcttgaaagtgcttctcaatgctgttgcttcaaatagatttagaggtgacctacttaccttgctaagcttattttccatgttgctcaaactttccatttattaggaagtttaggagctaacacgatattgtatatggcatctttgaatcatgctggcatgctaggcaaatgctaatcttattatccattatgggttggtccctgtgggcagaccttctcctgaagttttacccactaaatagtgcctacgggaattagatgaacatatcaaacactttgtgtacatagcactgcaacagggattatctaattttcgatgctattttgtttcttacattttctttggtgaattcatgaagaaattgcagttgtcttttacaaaaatcctgtaagtgaacacagtggaagatattaatctagctatcgcctttacaaggcttgtgatgggactttcatgtatctcccttttccgtatccatatagaagaataacgggagacaccatacataattttgagctgtttgtttgagtgcagtacatggagaacctttgcttggagtgattagagtatgctataatattgctctcaacaggtacatgttatatagccacctcatgatctgctgtattttgacttggaaacctgtctgatactttacaatatttccatagcaagagccctgtgaaccaggctacctcaaaggccatgttaacccagatgatcagcatcgtattcaggcggatggaatctgagcaggcaaaaaattttccccataacttctattggcattatgcaaagggagatgatttactgaaggaacgaggtgtgtgccttgccttttttgtcaggtttctgtaccacctgccagctctgcaatgaaagaagaaccatcatctagcacagaggaatcagagaatggtgaagtatccactggtaaccaagctgatgaaaaaattactcttggagatgcgctatccttgaatcgagctacagaagcatctccagcatctgttgaagagcttcagagtcttgcaggaggagctgatattaaggtagtgaaattgctttgcttattgtttaatgttactatcaggacatttcacactaatttatatgtattctattagttctatctgatccaaaaaaatcattttgcaggggttggaggctgttcttgacaaggctgttgaacttgaggatggaaagaaagtatcagggttcgttaagctttaacctgtctttagtgctgtatctgtgatgctacttacctgtccttcataggttgtagttacggattacatatgacccctaaccctcctccttttccagtggaatagacctggacactgtgaacataatacagcgtgatgcactattgctcttccggactctctgcaaggtttgtattcttattgaatagcttacaatgtacataatgttactttgaccggagttgaatatcatttacatccttgtagatgagcatgaaggaagagagtgatgaggttgctacaaagacaaggctgctatcactcgaactgttacaggttcaatcacatctttgttcttcggatgttgctaatcctgtttgtttcgatggtctgtgctaactctttagccttcagggattgctagaaggagtcagtgattcatttaccaaaaatttccacttcatcgattcagttaaagcctatctttcctatgctattctgcgagcggctgtgtcttcatctgcggttgtttttcaggtaatttcttaatcgttttttcaattttttatgcatactaccttgtcattatagacttgtagttataataagggttatttgtctgttattatcatattgaccgtcttttacttctttgcagtacgcttgtgggatatttgcagttctattgcttcgttttcgagagagtctgaaggtaaaataatatttaattaagttcacattatggacatactgtttgcact

SEQ ID NO: 9367 - DNA, 83063 bp, Oryza sativa
  unsure (1)..(83063): unsure at all n locations
cgagtacttttaccaaatctgaagactgtggagggctgaaaaatatagtcaggtgcatcgaatagatgcacctaataggtgtagcccccgactatgtggttaattgaaccaaccaaacatatagtcaaggaataaataatctaaccaaccgagtggttttgataattgtaatcaaccaagtgacttgatatcaatgtatagcatatgcggtgtgaatccccgaataatatgatccaagtgatataccgactgcttggcaaaatatgatgcgtacaacctaaagttgacaacatctttgaaagttcacatagcaaaacaactataaagaagcttgaatgctgtgaataaagaaattttcaaagtattgggcatacgccatgcgcacactgctttaacagatgtgcttaagtccataaaagacacattgtttcaccacacctggaaatatatggcacatgtggtataacatccgagtaagtaaactcataaaggatttaccaaccgcctgaaaaatgaccataatatataatcagcctaagccataatattggtcaataaaaatgcacacttacgtggcaaaaagcaatgatattgtatccaatcaattgcttgataaacccaaacagcaccttgactatataaaaaagtcagcggggcagctatataaagctttactgtttgacaccttttaagatgcattgtaccaactcctaaaaagtcgagtaactgcggtataaaaggattttaaggtattgggcacttgatcacgcgcactttggcctaagcgaaaagtgcctaagtccctaaaagaacgtgacaggccacacctgaaaatatgggctgcagacatattaggcctaggccaaaaaatatgccttcgacaccctttaaaggatgacgcatgtaacatgctcccgagtaataaatcttccgggtaatatagaccaagtgtagctcatatgaatagcttctgatctgaatgattatcccttatgggatactccaaaataaatataataattgaatcccgactggcgcaagtattcggttgatagcccttacggggaataataattggtccagtctttgagcatagaaaatagactcatgactatgaatccatgtggaatgtatccggaacaagtccaaattggagatataatcctcacgcttgagttgatgagcccctgagcatatagcttgtccttctgtcatagtcaaaattgtctattggcaatagctgacgcagtcggcatggagatgaaatgaccaacatgaagacgaaattgctcatcagaagtaacggaagatgtcagtggtagtaaaaacagtgacaccaatcaaaggtaatgaagttgcataaccatggaggcgaagaaaccagtcggcaacagtcaggtcagctagcagtgaagatgtaggcgcccaacaacaacgaaagaacagtcggtggtgacaaaagcaaaccgacgatgaagacgtagacgcgcatcaacggtgatggcgaaatccaccaatcatgaagatgaagaaaataatcggcggcgacaaacgcatccgacggtaatgatgattagcggcaacagagatagccgactatgatgacgaagtttcccatcaacggcagcagagtaggctatgttgaagaggcttgacaagatgttgatgaagatgacgatgtcggtgatccagtcaatagcgatgtagcagccgatgataacgatgagatcctctatcggcagttgcgtagtaggccaaccgtgaagacaaataattggaggagagttgatgttgttgcccaactcgtctaaaccgaaatatttgaagttgttgaagtagaatgtctgctccaaatcaaagatgaagataatgactcctggagttgactcgttggttgatgaattgatttcttcagcttgacataaaatttgtcaaattttgagccttgtatttgtgtagcccccgactctttgattagttgggaaacaactgaacatagagtcgagaactgtagcatcttgtcgtcgaatagttattgcttgattgaagatatgtgttgaagatgtccaagtagaaatcatgaatgttggagagccacttgttgtagtaaaataacacggcatcgcatgccgagatgtcgagattcacaacaacgtcatggttggtgatgtagtaaaacttgcgaagtagcaacaatagagtttgccggtgccgaagataataaagatgaagtcgctccaccatgatgacaaagttgtattgccgtaatgaagtgaacacaaatcggcggcaacagaagcaaaccggtagtgaagacgcgcagttgtgaagataaaagcaccagtcggaggcggcataatcagtcggcgacggaagatgatgatgtccatcagtagtggtagctgtataaaccagacgtagaggtaagggcactagtcagcagcagacgagacgaccggcgatgaagatggtaaggccaatcaacactggcagaatcatgcagccatggaagtgaagaaaccagtcggcagccatggcaaacgtaggcagcttgtgttgaagatactgatgcctattagtagtgacagcgatgtagccagccgtgaagaagatagcatcagttggcgttataacaggccagccgtgcaggcggtgacaccagtcagcggcggatgcggcggccggtcggtgaagacgtagacgcccaacaacggcagcataataggccagccgtgcaggcggaaacaccagtcgacggcggtcgaggcggccggtcggtgaagacgtagacgcccaacaatgacggcataataagtcagccgtgcaggcggaaacaccagtcggcggcggcgaaggcaagccggtcggtgaagacgtagacgcccaacaacggcggcataataggccagccgtgcaggcggaagcaccagtcggcggcggacgaggcggccggtcggtgaagacgtagacgcccaacaacggcggcataaaggccagccgtgcaggcggaaacaccagtcggcagcggcgaaggcaagccggtcggtgaagacgtagacgcccaacaacggtggcataataggccagccgtgcaggcgaaaacaccagtcggcggcggcgaaggcaagccggtcggtgaagacgtagacgcccaacaacggcggcataataggccagccgtgcaggcggaaacaccagtcggcggcggtcgaggcgagccggtggtgatgttctgactgatccattcctggagcgtaagagataagcttaaagccatgaatcccttttatgcatatctggatctggatcctgcagaacaaacatataggatgagtagtatctgatataaatataatactcgagaaaaaatcaagtattttaaaatatttataaatgtgtatttctcctcttgtcaattttgatttccccgagcagatgattcattacgtttaaacgctctgtccgactagtcatagcccccaagcaccgggagtcggcctaggcacttcccagacatgcatatgagtgacatgagttcgccattaatggaacaaagtttcacgaatcagaatttactactcgggtacttttgcaattattaagagcagaaaataaatttatctcatctctatgcttttgatttattctgaataatacttagcaccttgcgttactcggtccatccaacgagcccccgggtgctaggaatcggcccaaaggcaaccatccattggcaaaccaaacggaaagcataggaagatagaactccataactcgataggtacttttgtactcagattatgtcgcaagcaatcaagataaatattatgaaaattgtttaaaaaatacgatataacatctatagcccccgactcactagtcaacggcgaaccagttgatgtagtgaggcaaaggaaaagacaaaatatcatataaagaataaaataaatgatgacttagctttgtaatattccctcggtgacagcaaaagtagccgatgtgggaacgaagcagtccatcgatggtgacaaaaacaccagtcggcgccagtggaaccaagccagtggtgtagatgatgaagcccattaacggcggcgaagtctgccaaccgtataggcaaaaacaccagtcggcggcggcgaaggccagccggtcggcgaagacgtggacgcccatgaacggtggtgtgaccaaccaaccgtataggcgaggacaccagtcggcggcgacggaggcaggccggcggtgaagtcgtagacgcccaacagcagcggcataataggctagccgtgtaggcagaaacaccagtcggcggcggcgaaggccagccggtcggcgaagacgtggacgcccatgaacggtggtgtgaccaaccaaccgtataggcgaggacaccagtcggcggcgacggaggcaggccggcggtgaagtcgtagacgcccaacagcggcggcataataggccaaccgtgtaggcggaggcaccagtcggcggcgacggaggcaggccggcggtgaagtcgtagacgcccaacagcggcggcataataggccagccgtgtaggcggaggcaccagtcggcggcgacggaggcaggccggcggtgaagtcatagacgcccaacagcggcggcataataggccagccgtgtaggcggaggcaccaatcggcggcgacggaggcaggccggcggtgaagacgtggacgcccatgaacggtggtgtgaccaaccaaccgtataggcggaggcaccactcggcggcgacggaggcaggccggcggtgaagacgtggacgcccaacagcggcggcataataggccaaccgtgtaggcggaggcaccactcggcggcgacggaggtaggccggcggtgaagtcgtagacgcccaacagcggcggcataataggccagccgtgcaggcggaaacaccagtcggcggcggcgaaggctagccggtcgatgaagacgttgacgcccatgaacggtggtgtgaccgaccaaccatataggcgaggacaccagtcagcggcgacggaggcagccggttggtgaagacaatgtcgccaccagcaatggtggcagagtacaccagccatgtacgcaaagaagccagccagcggcgacgacagcagccgacatacatgcataaacaataacagatcaaacaataattagtaatctgtgaattaatctaatttgcgaaagaatttaaaacgataaacctggcttgtaatccaagatttttaatgcatgtatgtcatcagcggtgtatggcttgcttgattgaatcagagactccagcaaaaaggtcgctgcgtgcatgtatctgtctaggtagatcatgcacctgcatgtatggcttggacagaagtggcttgatcgatgcccttgtgcgacaattgctccaatcagctgggttggagtccatatcgattccgaaattgaatctcgccaacaaattttgatgtcgacgaggaaagacgccgatgcttcagagctttgcatgcatgttttctgctgatgcttgatctgttgcttgacagcacatggcgacagatttgatctcattgcataaaatagaattgacaggaacaactacttatggaggctcataatagctgttggcttcaaatcttttgctgatcaagaacaaaactcggtgactgacgtccggtcttgccgatcaaagaaaagactcggcggcgacggtgattggatccatcgccgagattaatcttcccggctagattggatctgagttggagaagaaaagcttagggaattcgtcggcggcgaggaagttgcagctcccgaagtgaagacgaagccggcgactcgtaaagttgattccatcgcgcttcttgatagataactcgacgcaacccctacctggcgcgccaactgtcgaaacatgaattcggcaataataaaagggggtagcgcacgagacctaaaagtggatggatgcggagacaaaggatttagacaggttcaggccctctcaatgagaggtaataccctactcctgtttggggatttgaatccgccgagtgtgtattgatctgacgatcaggttgtctcatgccccctagagggcctcctgcccaccttatatagggtggagggcaggattacaagatagaaaccttaaccaacatggtatcggtttcctaaatctactttacaatcttatcaaaccaggactttaggccgttccataatatacagggaaacgtaatacccaagtcatgatctgttacatattccatagatataagctatcccctaagactagtcggataaccatgtcgtgtgggtatggggtacccataatctccacacaaatgtttcacatttttaaatccatacattctttagaccatggaattaagaccaatgctttgaatttcactggagaattcttgccctagttataagattagattttgttcgatgcataactatggtcaccctctaggtgctttaattttagaataaccgtgcaaagactgttgaatggcctgtattagatttggaatagtccacgcatgccctgaatggttgacactattccaacatttccgtttgcacttggcagtcaaagaatgggctatataccctatactaacagtcgcatgcatcatatggaagttatcttcagaaaaacactcctgtttaatttgtagtgcatataagtaacatgcatgcataagcttgtatttcaaattaatttgatagttttttattgcaacctgatttaagtttagtgtggatttttacatgtacggattcacctaaatgtattttaatttttatgaatgcctttgcacattagcttttttatatctatactagcttgtagatatttgccaaattacaatactttgttttaagttggaataactttttttctctttcacctggcaaagcatgagtgagtgctgctacacatcgatactttctatatagtcttctatatagtcggtacccactaacaattattaaaagttaaaactcaacatgcaagtatgccacatcatcacccactagcaattactattctagcccatttaaaatcctatacaagcatgcaacatcttcactcactagaaagtactattctagcctattttaaatctcatgtaagtataacacatcatcaacaagcatgtgtcaaatcatcttactcacattattttttcaacatttcaactttcatcatttcgacaatatttaatatatacttatccataaatctcgcagcaaagcgcggggtatcacctagataatatgttggttgacaaggcaatggcatatcatgtagataagaaaaaagtgagaaggtacccacctaaatatctttatgttgtcacttccaaaacggtaattccacatgagtgatgacggntcgagatgaaaaaaaggataggttaacactaatcggaaaggcgatgacgcatagataaggaaaaactcagtcactaaatattttttgtttttttactatgaaattacaatntcacataagtgacagtgatctgaaaaataggtacaaattaaaacactcagctactttatttcttaatgctttcactctgaaattctaacttccacatgagtgacgatgatcgaagattaaaaaaaaagtagaaacaataatctcttggtcgaaaaggcaacggtacatggctaaaaatatcagccacctagtttcttaatgtttccactttgaaactgcaacctccatacgaacgacggtgataactttgataagatagtatgttttttataatatttttttagtttattgaagtagaagtggctaaagtttactaaatataaatggcattccgagactagcaatggaaaatggaagcacgtaattaatgaagccgtcacggtttgcgactgtatatggccgcctgaaactgagagcaaagtggcaccagttgtcgatcacgcgcggggcggccttgacgctatattggcaaaggttggtgtcgcatactggcacaggcacagcaatgcatgaccctacgcgaagcgacaggaggtcacgcacggcgctgtccctgcggccttgtcgcggtccacgcgacgtgcaccgatcgatctccaactcaccgtggaacgcgacgtcttccccttcctcccgacctagcttgttgctgctgacagagcgacaacgatataacgttgaaacaagcacagaattcgtcgctacgaacaaatcaatatcaattctcgggccaagaccaacaaaaactgtaaaaaggaaaaaaaaacggattggagaataacattcctcggctcctcgatcgctgattcctcgtaccgtcgtacgaatatatacgaccgagtcgcggtcgagaatcccggatcagattccacttaaccaaatcccgttcgacgccctatccgccgcgtcatctcttccgcatgcatgtccgtgcgtttcaccgccaaggcagggctgaggcagctaccggggtgaacggtcggaatcggtaaaccatatttatcattcaaactaccctgtatcgatattaatacgatagaaaaaaatttaaaaaataaaatttaaaaatagcagaaaatggtacggttataaacaataccccttatgcagaaacggcgctcagtcgataggaatttctgtgaccgttttcacccgctacatccactgctcgagctgttctcctgtttggcgcgtgcgcgctagcgagagcagagtattagtcgaataccacgaactgctacgtaccgcgcgtttatctcgtgctagatacagagcattgacgccttctgccggtctgcccccccggccccgtgcacgcgtgcgccgccccggtcagcgtccatctctgagactctgacgacgacgacgccgccggcgacggcaccggcgccaccgatccatccatccatccgtgcatcctactgtatacttacctgtctctcgctgccctgcactgcatacgtccgcgcctagctcgatccccgcaggatttctctgtaggtgacagacgccggtttgtctggacaccccctcgcggcgcgccggtgcgtgcgtcggtgcgtgcgtgcgggccgtctgcttgacgttttgaccattattcctctctgtcgatcgtgtggtcagtgcgcatgatctaagattaactgaggaaggactcatcttgtgcgttgacagcgttgtccgaagcccccggacagaacgggtctaagtttgcactgttattttgggaagttgtaaagcagcttctgcatgcgccacaactcaagcttgtcagagttagtgacggtggctgctttgatcttgtactgctccgtacttgaggctcaagaggccggcgaagtaccgtttcctgtttgcatatggaaatagcagttgcagtaggaaagggtaaaatttaactgtgcttctaaaaggactttttgcatgtcacagtttttctgtcttccatgatctagtctacgaatgttcagaacttcctccgtttcacaatgtaagttattctagcatttcccacattcatattgatgatagatagatctatctagatttattaacatcaatataaatatgggaaatgctagaatgatttacattgtgaaacggatggagtaatatcttattgctgatcggctgcaggcgcgcttgtgtgaaatgtaactccgtctggtacgagaaaaaacgtgacagcaaaacaacttgactgacaaaggcaacataagacgcggtcctgacaaatgtagtggcatgatgaagttcagaagaatttacttgcaactaaagcctgcattgtcacgtccaccgaagtgcaagattttcttttttactgtgatgtatgcgacgagaacacacgccattgaaatttgtatgaacccattcacctgttccagtttaattccaagcatgctcgctctgacaattacaatctgatgtggctcagacaaagctcccgttcctccggcagtccagccacttgtacacggttattggctatctacacacaataatcaaactgagcagagcaaatcgaagaaagatataggaaacaggaaacaggaaactgttgcattaattaatatctgatataattaatccatacttcctccgttccaaaataagtgcagtttttcactatttatatttaatgtttgatcattcgttttatttaaaaaattgttatgattagtatttttattgctattagatgataaacatgaatattactttatatgtgattattttttaatttctttataaattgtttaaataaaacggacggtcaaatgttggacataaatatctacagctgcacttattttgggacagaggtagtacttgcttttattctacttctagttcccacttgtatactacgattccctgctcaatgggtaagtgtcgaatcctgaatttttctgaaatatcaaattatccgaattttctctgtaggttcagtccatctgttgtttctatttcccacggagcaacagaaatcgcaaagactggctgccgctgtctgaccctctgactaatccaatccagagagtgctagtactatctccttcaacattaattcgagtttaggatctgttcataggtcagacacggcgaacatttctattagccatggacaaaaaaaagaagcacgcagccatgttcaaggggaaattttgactaatctctcgacacaccatcaaattggccatcttattcttaattcgtgaggtccgtctcgatcaagaattgacaggatcaaaggtcaaccaaattaagggaagcatgcagcagttgctgaatcgctccaaacgcagccaagtcattaatgtgtgtacagcattctgcgttttttttttcatgatcagccaattattattcgttgcccgtgtaatagttgcaacgggcatcatcggcagtcaatttcaggtcacaaatctatgaattaatggggggtagctttgaatttccgattacgacggttcttgcatctagaactggtcttatccagcaatcagggactcatgacagtaatgttgcaataataattagtatcctacttagttaatttatttggaagaccaattaagcagaaatggacggaagaaattcaaaccttcaactcggcgacggcgagcaatttaggaataccaggaaagttttcatcagtttaattattttatatgcagatggatgaacttactctgaaacctgattttctgaaagggaaacagacaaaacagaagattaagaacgtacatatgtccagaaagcacacacattaaactactttgtgcatttgtcggtgtcgcttcgcaccgattagaccggagttcatcaatccgcaattatccgtgctcttactcctcctgcttatctagaaccaaaatccagaagcagcatttgtccgaaattcaaacccactcattacagtgtgtgaacctttagcatttggggtcatagttctattaaaccgtaccgtgtctcccgggtatatcgcagagatagaacattctattggtaatttggtatgcaaccagtcacagtaaaaaacaacggaagaaatgataataatcaaaggttacacgctgaattttcatgctaatcaacgtccaaaaggttgtgctttttctcagggaaaaaagttaccagtatacttttactcttcgactcgcggcccatggcctaaactgcttcgcgttgtccaaagcgagacagtgtcctaaacgggccaacacaaaaggaggcctagtaagccggtgcaaattgggccagaaaagacggtggaagaggttaccatacgctgggccgtgtgtagcccaggaaatgggtggacgttggcgcgcgaggggcgggcgggcgggtggcgaggtgatcgatcgacacgcggtgggggagcggcggccggcatacgtgtccagcggcgacgggcccgtggcggccgcgttcggtacaacggagccgtatttctcggggccaatgccttcggcgcctctccccacaccgcgcgccgcgcgcaccccccttgcctgccttgccactgccagcccgcacctcatccatcgcctcctcctcgatccctctcgctcgctagcttagcatcctgcatgcatgcagcgcagcggccgaaaccgcccaaaattcccagcgcagatcgctcgcctgccttgcctgcccgtccgcctaaccgacaccgcaacaaaccacagccacacagcttctctctgttgctcgctttactgtgcgtgctgtatatacacccggtggatgagggatctagctaactagcttagctagacagcgtgtgttggtggtggtggtggtgtgtgtgtgtgtgaggagggtgatcgatcgatcgagcgatggagagcccggactcgtcgtccggctcggcgccaccgcgagtactacggcggcaacagcagcagccgggctcggcgccggagctgccgccggggttccggttccacccgacggacgaggagctggtggtgcactacctcaagaagaaggccgcctccgttccgctccccgtcaccatcatcgccgaggtcgatctctacaagttcgatccctgggatctccccggtacgtaatttaatcacttacacccataccaatcataaattaagaatttattattacagcttatatatactattatcatgcatgtatattatctaaaaaaaatcagcccaaatctccatatgcatgtgagcatgctagcttggatgtgtagtgctcgatcgatcgatcgatcgatcgatctggtgtcgtttacttgtttgtgcgatttatgcgtgcatgcatcggtttgtatcagagaaggcgaacttcggggagcaggagtggtatttcttcagcccgagggaccgcaagtacccgaacggggcgcggccgaaccgggcggcgacgtcggggtactggaaggccaccggcaccgacaagcccatcatgtcgtcggggagcacccgcgagaaggtcggcgtgaagaaggcgctcgtgttctaccggggcaagccacccaagggcgtcaagactaactggatcatgcacgagtaccgtctcacggacacgtctagctccgccgccgccgtcgctacgaccaggcggccgccgccgcccatcaccggcggtagcaagggcgccgtctctctcagggtacgtacgtatatacgtttgtgcgtgacagtctcgcttggagtcttggactgattgatctgatcaagttgattagtgtctcagctggatgactgggtgctgtgccgcatatacaagaagacgaacaaggccggtgcggggcagaggagcatggagtgcgaggactccgtggaggacgcggtggccgcgtacgcgccgtcgtcgcagcagcatgccacggctgctgctggcatggccggttcggacggcgccggaggagttgctgcagcgcacggcggcgactacagttcactgctccatcacgacagccacgaggacaccttcctcgtaaacggcctgctcaccgcggaggacgccgccggcctctcgaccggcgccagctctctcagccagctcgccgcggcggcgagggcggcggcgacaccgtgcgacgccaccaagcagcttcttgctccgtctccaaccccattcaactggttcgaggcattccttccacgggccaaggagtttcctagtgggctaagcaggagtagcagagacatcggcgacatgtcgctgtcatcgacggtggacaggagcctgtctgaggctggcgccgtggccattgacaccggcgacgccgccaatggcgcaaacactatgcctgcatttatcaatcctctcggcgtgcagggtgcaacctaccaacaacaccaagccatcatgggtgcctcgttgccatcggagtcagcagcagcagcagccgcctgcaatttccagcatccgttccaactctccagggtgaattgggattcctgaataaaaggtgccggcattatgcatacacatatatgcacatgcatacatgcatggcttttcaagtagtagcacaacattactagtaattaatcacactaatgtgtgtggcagtcgcattcagtgagcactgatcgagtagttgcatgaacacaacactaatgcatgcactacatatatatggccgcattgctcctagggcacgtacctgtacgaactaggtaagtgacctaaccagctagatcatgttcagaataaggagaagaagccgcatgcaaacacgtagatcatatggctttgccttcacatgcgtttgcatcatatatatcgcattcagaaagtagtgctgcagctaacacatagatatggtgttagcttcatgcgtttgtaccatatatagcggatgcagaaagtagctagttgcactgttcatcattatcccatgagatatgaactttatatacctttggggttgcccttctaaagtcatgcatctagagcccccctggtaatagcatgcattgatgtttcatgcgcacatatatataattgatatatatccttgtatatacgtaggagtaattcgctgatagaacggcacttacatagtacgctgtactgtacatgtaaacaaaaacttacatattataagaaaaaacgatattatagacacgctgcatagctagattaaccatctgggagaaataaagcatctatccacgatcactcaaaaacaaatgcatgatgcatgtgctagcaacagtatgtattatatatggattgaatcattgaagtgcatatatatatacgtagacgagtttttgtcaggctaaagctagactagttaccaagcccttgtcgatgccatgtgaccatgtcttcccccagcaacatggctgtaacaacagcactaatcctcccaacgatctccgtccaactcgtcgcgagaccttcccttttccgagcgtctaacagcgccacccccgtcgtccgcgcgacaaaccgcctcccagtttcgccgggacagccgtcgcggtcgcttactcgcctcgcgagcgatcgaaagctaaaggtgcatgtaagcgagcgcgtacacgtacgggcgatcggtcggtcgagacgtcggcacgcgcgcatgcatgcggctctcggcgcctttcggccttgtcgtctggctggttccccggttttggatggttgcggtgatggcacatgtagaagtagcgatcgatcgacgacgtggacgggacggggccgggcaaggctagcgagctaatcacatctcggctttggagcacgcacgataataaccccctgctggttcctagctataattcctaatcgatcttatctccagctgcagcgaattgaccgcctttaatcgcggggatagatggtaccgtcgtttttacgcggctcgagcgcgggtggctggctttggctcgtcgtcttgtgtacgcgcgtgacgccgggtgctacgcgtcgccccgcggttcgctggatcgcggagcggttttaacctccagcacgcggtttttgattggccgcgcgctacgtgttgcggcgtggtttgtgcgggggtaaatttgcatgtgcacctctgcgcagacggcgcgcgagattggccggtcaaggatgagtatgtgtatgtgtgataactgtggtaaagctttttattcacctaagacttaattaactcgacgttaaatcatttattgcatacaaactaaataattacaacaaaaaataaaaataaaaaatatattaatgtgtaaaaacatgtaaatctaaatccgactttaccaactgtaacaaaaaataataaattttatacgtgaatatttgttttatattataagttgtttgattttttctaagtgaaatttctttaagtttgatcacatatagaaaatatattaatattttcaatacaaaacaaacatattatcaaaatatatttaatgttatatttaataaaactaatttgttgttatcaatgtttttaattttttctataaatttgatcaaatctaaagaactttgactaataaaaaaatcaaacgactcatgatatgaaacggaaggagactcataatatgaaacggaaggagtataatttaatttgttgttttccttgtaaaagtcaaatttgaacatacatattttttatatttttaaactaatatattacatatcaatttatcttatcaattttctttattttttatagttatttagtctccccgttaagatgtctctatatatccgccgacaatgtgttttgctagcggcgtgtaccgagctcgatacatatggcagcagggactatggcggcgtacacaaagcagttgcccggcaaataaagggaattgatgccaattgtttttttttttaatcacaggatgctctaatctatccatcttttcgctccattttttaatagataacacgccgttaacttttagacacatgtttgatctttcgttttattaacttttttatgcaaatgcataagatataaattgtgtttaaaatacttttagtgataaaacaactcacagcaaaataaatgatagtaattagtaagtgtaggtgtagtatgtgggtgagggcacgagcgtctaatattgtactcaacagcctaagatagtttaacaaggaagatgtttttttttctcatttggtgcccccctcattcggttacattatggagtcattctatggttacattgtggtgccccctctctatttaagagatttgctaggttacaaagtccgattctaactctaaccctaaccatctattacaactccaaatccatccgtaactaaataggactaatatattcgacacatattataacaataaatttaatactgaattacacattctatttaaatttaaatttattattttatctttctaattgtataagttgaatttgaacctgcgtgtttatgaattgatatattaattatgttttagattataagtcattttgactttagttaaagttaaattactttgacaaattttgtagacaaatatattaatatatacaacaccaaattagtttcattaaatctatgattgaatatgtttttatagtatatttgtcttgtgttgaatatattactattctttcctacaaatttgattaaacttgaaacaatttaactttgatcaaagtcaaaacgattatagtctgaaagagagagtaccatatattgatatatcttttttttttcaaaatttcacagtaacattttggatgacatggacatgctataaaacgagaaaagtgtgtagtgcaaatcataaatatagtaaaagcctaaaaactatcatcattaagagtaaacaaatttattccaagtaaaacttttactcatgttgaatttggtagtaaaattttcatcctcggtgatgtgaataaaatattaggtgtccttttaatccaataatacttttcacgttttcactagatatatattgtgctacatattttcacataaaacgagaagacatgactaatatgtgcacattaattttccaacggagaggccttaagggcaggtttggttggtgactaaatttgccgcaccttataattaggcatgtcacagttttagtatgcggtgtttggttcatgccataaatctactttgcctaaccattagccttagttacgtggttcacatgtcatacattttattttgttgtctaacttggctataagcttagtttgttattttgtttgccataaaagtgggttttgctcatgccgtggctctttctgcgctccgtgcacctggcggtggcgaacggatcagcggaggcccaatgcaaaaactagctctgcacaagctcggacggccttgtctccttcctaataattctctgattcaggaatcactgaatcaggatacgatacttctccaagaaaaaaaagaatcagctacgataccgcgtgcactgacgtgaaccggacgatcgaggcgcgcgatcaccaaatcgtctttgacgctattaaacccgcggatcccagctaatcttatccccatctctcgcagtcgcagggcgctataaatcttatctccatcgaccgcgtgaaatgtagctaccggccaatcaacgtcgataaaagaagcgacaaaacaatttttactttgtacctctggtcgaaagcccgttctttttacatggatatcatacggtggatggtcaaagaatctaagccttttttccctgacaaaaattgtgactgatagataggaactgatccacctaaggttgcacctctccatccatgcactgcaactgatatgactggttggcattatctgtcttttgtttctgcttcacctgattcattgatgaggtttatgctccatatctaaaagctaatctcgagccaatggtatgtaaacatcaggggataaaattacactgttcgtaatcaggacaccagggcgggacaagaagggttacttcactgaagaatttgtcccgtatatggcacaatatcggaacgataactaattactctgtttgccttcgttttcagttttcaaatcgactgataaccttcctgcagaatcagggcattttagggcacatgacaagagatggcagattagagaggttgcaccgccggtctgccgaaaccgcaaaagcgagagcaaatcaactaatctctttttagcgcagctaatcagccaatgaagcacgcactagtatgctaatcgatcgattagtagcccactttgtcaagtgcaagtactgtttttcctgtaaaaagtactgttcgcaaagacttgacatgttttgtttggacattggagcaactgtatgggtctgaactctgaagaggattaattgttcagcacaattggtattttaagcttgaacatattttaaatctgcagttattctaataagtaaattacagctacggtgcacgaacttaggtgcaatagaaacaggtgtaacaacctatataaattgttcgcttcagacaacaatttgcttgcgtagtcacatgcaaaccaaagtcaaaatgatctatatacgcaatcaaaacatgcagccaaaatttactaccggatattctgatgttgtggttttagctttagacatgacaaaagttgatgcctagaaaagacactgtcaaaatatttatctccagttaaataggactataggttagaaatgcccctagctagccccaatgatcagactctcttcctcgatctcctttttctccctcttgcaagcgcacagcttggaagagggcaaacaacgcctcggtaccatactaggcaattcggctgtgatggtgtggtatcaatagttcctttattttatcggtgatatctattggtttgtttattcatatgcttatctgaatagattatgagcaaataaaaaatatttctaagtaaattttttatatatgcgtccttagcgataaaaaataaatgctataaaataaactacgatgaaaaactaaactttaaaattaaattcttaaatttaaattttgagttataagcataagcataaaagaaacaatgagccatacagtttgtacgttttgatgaaataatcatacgtgttatatataaaatttgggttctcacaatgataatgatttctgcatggcctctctctagctgccttcagtcattaaaaaataacaaagtttgctatacgggacacccgtaaaacatgtaattagttagggaccatctcactcacagtataattttatggattctctctctaattcctcaaaaataataaaattatcattttttacgatgcccctataacataaacaggttcttactgtatcgctcagctaatttcatgccttttgatatccttaagcaaatttttccttaaaaaagcggatcgcaacagtatttgagaagcttagttttttttaaaaaaaaaaactgagaagcttacttcacacggccataggaatacgctttgcatacacgagatgacgagaagactatttgtcacgttactcacgtactccttctgtaaaaataaaataaaaaaaaatcaacctaggagcgtagtctagattcgttcatctaggaggggtcagattcgttgttctaggaggatcacattacatccctttttaggttaagtttttttttttggacgaaaggagtatgacgtaagcttgccagtatctatgtaatttttttagagtacatctatgtatatatgtgtttttgaaatatcatatagtggtgttcttttcttttaatgatgaagattaagttttttacgcaaaacgatatagtattaacgtatgattgattgagttttaattattacaaacttaaaaaatagatcaatatgatattttaaagcaacttttatatagaaagttttcgcacgaaacacaccgtttagcagtttgaaaaacgtgccacgaaaatcttaatcttcatccaacttttgttggagaaaataacaggagtgctatgctagctgctcaaaggtccagctaacgtagcaagatcatatgactatgagactgttaagaagtaattttcaaaaagagagagagagagagagagactgttaagatgtgttgatacttgatgggcttttgaagtcggtccatacaaacaaggaataagtctattttgccaccctcaacacatgctcttggttaaatctcatccctcaaccgcaaaaccgggtataacccgtcctctaacttctaaaaccgctacaaatcagactcttaggatggttttggaggcggtttcgtcctacgtggtagttgacttgctgaatcatcaagcgggacccacttgtcagcggtctccacctcatctctcctcctctttctctttcatctttctcttctctcaccttctatcgacacagaggcatcgcgcagcaacaacgcattggggaggagctcgtcggctggccgcgttgcgccgcacgcgggggagcagcctggctcgagcacgcaaaggaggcgggagggcgtcggggcatcgtctgagaggggggaagaggggggtcgtggaggatgaggcagccaactacgcatggggaggtggtcatcagccggccgtgcgcaaggaagagctcgtccaccggccgcccgcagggaggatctcgtcggcctaccaagcgcggggaggggcacttcagcatggtggccacacagggaaattcgtcgatcttccacgtcggcccggctcgagcgcgcagaggaggtgggtgggcgccggggcattgtccaagagggggaaggagatggtcgtggaggacgaggcagaggccgcacaggcaaacccctccacgtcgacagcagcgacggtcggcgaggaggggaggcgtgaccctcgtgctccatcccgccgccgcctccgtcaacgccggtcggcgttatgcacctgagaggagagaaaagttatagagagaggagaaagggtaactaacgtgtgggccctgaacgtgcagagatgtagcctagagggggggtgaataggctttcctgaaattttctcaacaaacgcagcggttaaattgacagggcccgaaacctcctggtgatgaacaccggaacttcctggcagtgatgagcagcccgaaacttccggagttcttgagccagaaactttcgggcaacagacaaaaacgaaatatgagaagtataacaggtcctaactagtgaaaatcaggcacagggttgcacaagatgaaaatcacaagataccagcagattcaaacactgatcaagcacaagagagacataggcgatttttttttccaaagttcagatcacacggatcctactctccgttgaggtgctccaaagagccaggtctcgattaaccccttgcctcacttatgcaaagatcctagaagaggtccacagccttcaacacaacacttctaggtcgttttctagaattgagtgaccaccaagatccaactcacaattccttctagaaaaggccacaagtgcaagttgctctacctaggacaacctctgaaaactcagcacaagaaacttcactcacttacctcgtttccttgcggaggtgagaaaaacctttacaaactttctcgggacatccacaagatctttggaagctcatgggcgacgcctaaccgtctaggagaagatctccaagagtaataagcccaagtgacagcccacaaggtatccaaagtgctcaatcaaacctaatcttcaagccatctccaaaacactcctacactctcgtctaatctctcaatctcacaagataggctctagatttgagtggaggaagcaaaggaagcttgggagtggctagaaaaccctagaacatgaatgaacagaagtggaatggccaaaaggtgacctggggacgaaattcatatatataacggctaggtgatatcatctagccgttactcacaagtttgaactagaaacctgccaggaggttccggacaaaagtgccaggaacttccgggcagcacttaggaaattttttgcaaataaacggtgcccggaagttccggccagaacctccgggtagccctctctgtctcggggagaaaatcatttttcaaaaatgattccaaaaaatcttttgactcatggatatgactaagagcactttgtataccctagaaccacacttgaaacccctcttaatagtacggtttttcctaaactcaatttcgaaagtgaaaaacctagtctaaccaccttcgatgatttttgcacttaggaacatttgaattggggggggggtctccttgcattcttagccatcccaactcgctttgggactaaactcctgtgaataaacttgataaacacgttagtcccctttaaccaccttgtcattaatcaccaaaacccactagggggtttaagtgcatgttcaatctccccctttttggtgattgatgacaacatggttaaagcacacaaaaagataatagaatttaaattttgaatgatgagagaagtgtgaagctcctcctaaagatatgcatataatgaaatgagatgaatacaatatgcataaaaacaaaggaaagctcaaaagaaacttcacactaccctcaatcaaataagatgcagaagtgagtgcttgaatgatgagtgatatgcaagaagaaagactagatgacatggcaatcactcaaaaagatgaaaagaacacatcatcacatcaaaatgcaacatccatatggtctaacttactgataaaaaggataataaagcatctaacagtcattacatccaaccataatagaatacgattacatgtccatatagagagagataaaagagaggaaatctgcctggccggaacctccggatcacaggccccagaacttccggccaaatgaccagacaacagtcaaggcagcaaaaaggatttaaatgacccccttcaattcacaatttctccccctttggcatcaaggcaccaaaaaggcgagaaactatgaagagaagaagaggatcactcatctccatcagagggaacaatctcggtatcgccggagagatgagactcatcggactgagcagcggtgtcaccctcatcaacatcaatgggggcatcctcagcagctgcctcggtgtcaccctcatcaccatcatcatcatcatcatcatcatcatcatcatcatcagaatgggaagattcttcattgaagaaggtggatggaccttcaccggcaacgttgcgggctgcctcataagcctcaaatggatcaacatagacctcatcctcagaatcatctgacacttctttcctagcctctcttctatcttccttctgacgcctttcgatcttcttcactttcttggcagtcttagcacacatacagaaaattgcctgaagtgccttcttgatgggagaaaaactcgaggaacttggtgggccactagtagaaggaccagctgaagtagaaggaacagatcgagggaccactggagaagagaaaggtggagcacgagggcgaaaaggattatggtgcccatctttgatgtagaataccccggtgactgtctcaatcatcttcataatgaaaggagcatagatgcaaccccgcttaggctcaagaatggtgttggcgatctcataccaaatcaatttcatcacattgaagggaggctgattgtagcgcatgcgactgagaagatgagcatgcttggatggcaaagcagtagcatctccaacctttggaagcaaagaccaatgaaagatggagtacaacaccttgtagttgggatgcaatccatgagtagatcccatgcaagtcctaggagcatcctttgcatacatgaacttggtcttgatcatggggagagatgcttcactatgaatgttgggcctattgagatcctcatcatctaaccccaacatctcagcaaactatgccatggaaatcttgtgcctaacaccctcagtcaaccacttcacataaggggttcccttccttgtagtaccaaagaatgctgtcgcatagaactgtgcaatgacctcctcattccaatcatactccaaggcaagaatatctccaagattcttgttgtggcacacttgcatcacttggttgaacacttcattgttcttcttcctcatgtaagcccaatcaatccacttcatctcaaccactggattttctctagccataatcactgaattataccaatccaattgagtgaaagtcctgaaacgaggatcctatgactccttaggctgagtctctggatcaatcaaacggtcccttctgcacttggcaagctgatgaaggtagttggacttgggtcttccaatgtggtgcataagagtggtgtcaaatccaagagtcttgtagagccgaacgggattctcatgagatccaacaggaaaatcatgagatgcccttccagccccagaattgcgaccaccacctctcccacgacctcttgtattagaaacatcacttccttgaccactatcaacatcccgaatctgaactggacggttgttggattacctggtaaacctaggacaagtacgagtactgctaccactgccgcatcaaccactttctctttacccaaacgaccacgaggaaaacgaataggaggactcttatcaccggacacatcctgagaggctttctgtcttttctcacgaggcatagtgcttactgcaacaggaatcaacaaattggagtgcagtagttaggcaaaatttgagagaatcaagaatggcaggctggctggacagcgcccggaggttccgggtgcaagaacaccggaacttccggccggcaaaaaagaggaacagaggtttcaaaaatagccagtgcatgtgaacaaatcctatagatcggtgatctacaaggtagcagaaacaagactatccaagtggttttctccctaggttcacagatttagagatcggggcaaaaacatgatgaaccaaaagagaagatcaaaagtgctaccttgagagaggaaactgcgaatcgatcacggaaagaacctcccagccatcaatgtagatgaatccacggagaataatcgaatttgattggagggaaaagaaaatcaccactcggggcactgtagtggcggctagggctggcgtcggggagggagaagaatgaggagagagactagggtttctaactccccctaagaatatatactccccgacacccggaggtttcggacagggaggcccggaacttccggcctgacagataaagggcagtcaggcccaaaaccatggtagagacaaggaatcaaaaggaggaatagatgtatataactagccaacaagcaatcaatacaaaactatggtcgatatacatcacaaggagaagataaaaaccaaattttcgcaataaaaggcacacaaaggaatttcgcaaagattttcaaaaaggtttttggataaaaagagggaatgtttgagctttattcctagtatcaagaccatcttctacacaagaagtgatctcaagacacaaaagctcatttttttttaatttacattttagtgacatatgtttggctataaattagcaaaccacccatcacctaatgttgcgagaatctaagatattgagctcactcctaagctcgcaaaatcttttctcatctaaaggtttggtgaaaatgtcggctaattggctctcggttctcacatgggtaaggcatatgtctcctttggtttcatgatctctcaagaagtggtggcgaatatctatgtgcttggttcttgagtgttgaacgggattgttggctattttgatggtactctcattatcacataggagtgggatcttggtgaagttgtagccaaaatcttttagggtttgtttcatccaaaggagttgggcacaacaagaaccggcggcgacatattcggcttcggcggtggatagggcaatggaattttgcttcttggaggaccaagaaacaagggaccgcccaaggaattgacaagtcccggttgtgctttttctatcaaccttacactcggcataatccgaatcggaatagcccaaaagctcaaagtcacaacccttaggataccacaagccaatattaggagtatgaactaaatatcttagaattctcttgacggcaatcaaatggcactctttaggctccgcttgaaagtgagcacacatgcaaacactaagcatgatatcgggacacacattgagcgatataccttttggagcgatataccttttggtccacacatttaccattgtcgtcgaggtctaggtggccattagtaggcataggagtcttgatgggtttggcatcttccatcccaaacttcttgagaatgtccttcacgtacttggtttgagagatgaaagtgccctcttgtgcttgcttcacttgtagcccgaggaagaaggtcaactcacccatcatagacatctcgaaccttttagtcatgatactactaaattcttcacaaaaagaggcattagtagaaccaaatattatgtcatcgacataaatttggcatatgaataaatcactcttaaatttttttagtgaagagagtagtatccgcctttccaatttcaaaaccatttttcaaaagaaaatctcggagacattcataccaagctctaggggcttgtttgagcccgtagagcgccttgtggagcttgtacacatggtttggcaactttggatcctcgaaccccggtggttgctccacatagaccaactccgagataggtctattgagaaaggcactcttgacatccatttggaataacctgaaatcatggtgagcggcataggctaaaaggattcggattgactcaaggcgagcaacaggtgcgaaggtttcaccaaaatcgagaccctcgacttgggtgaacccttgcgcaactaaccggactttgttccttacaaccactctatgttcatcttgcttgttgcggaagatccacttggtgccgatgatattttggtcaggtctctccaacaacgtccatacttggttgcgagtgaagttattcaactcctcttgcatagccatcacccaatccgtatcaccaagtgcatcttcaaccctggttggttccaaagaagagacaaacgaatagtgttgacaaaagttagcgacacgagaacgagtagttatcccctttcttatgtcaccaagtatgttgtcgacgggatgatctctttggacagtgtgatgtattcttggatggtgcaccgaggggacctgagcctgatcaggatgctctacagtgccctcggcatcaatcccatccacaggcacgccttgactgtcctctgcccggaacttcctggcagatggacccggaacttcctggcttggggaggtccggaggatccgatcatctggtcccggaacttccgggtcaactgactcttgactcgatgtagggctattggatgtcgatgacgaaggttgatccctatcttcttggtcatcctgcgtctcgactggtcgtatgtctccaatagccttagtacctatagcttgacttggatccacatcacctacaacatgtacaacaacttgctctccttgggagccattagattcgtcaaatgtcacatcccttataacttcaacaataccgaaggttttattgaagacacggtaggcatgtgcatttgactcatagccaagtaagaatccctcgtccaccttaggtgagaacttagatgaacgaggcctcttactcaaaataaagcatctactcccaaagacacgaaaataggaaacatttggtttcttaccactcaagagctcatatgaagttttctttagaattttgtggaggtacaggcaattgatggcatggcatgcggtgctcacggcctccgcccaaaagatatccgaagtcttgtacttatcaagcattgctcttgcggcttcaataagagttcggttcttcctctcaacaatgccatttttaggaggatcataaggggcggagaactcgtgcttgattcccacttcatcaaggaattcctccacttgtgtgttcttgaattctcctccattgtcacttcgtaccctcttgatggtgagatcatagaggttttgggcttgcttggcgaagcgcttgaagacatcttgagcctcactcttgtcatagagaaaatacacccaagtgaagcgggaaaaatcatcaacaatgacaaaaccatacttattacctccaatacttatgtaagccacgggcccaaataaatccatatgtaaaagctcaagaggacgtgttgtagttgatgttcttgataggatgtggattcccaacttgtttcccggcttggcaagcactacacacacgatctttctcaaatgtgacattagtgagcccgaggatgtgttccccctttagaagagttgccaaattccgcattccaacatgggctagtctacgatgccatagccaacccatggaggatttagcaatcaaacaagtttccggattcactctatccacatcgaaatcgacaagatagagatcaccctttaacttgcctttgaatgctacggaggagtcatcccttctaaagacggtcacatcctcatcggtaaacaagcaattgtaacccaacttacataattgagaaacagataataaattgtagcttaatgaattgacaagaagaatattagagagagattgattattggagatggcaattttacctagaccaattacctttcctttaccatcatctccaaacacaatattctcacgagttccgttctccttatcaagacttgtaaacatactcctctctccagtcatatgattggtgcaaccactgtccacaacccaacttgaaccaccggaggagtatgcctacaaaagaaatcaagcttgggatttaggaacccaaacctgtctaagtttgggtcccttgatgttagttaccaaagcctttggcacccacacacaagtgcggtactcatcattgtaattcacattaaaataagcaaccactttgccctctgaatttttggaaattacatatgaatcatagtaaagaccatctggctggaacctcctggcattatgcccggaacttccggtcatgtcttgtgcacggccattggcccgaaacttcctggcaaaccggccggaacttcccggtgggaatttttgagagacagagactcccacccagaggtttcgcccggtttgtccggatgttccgggtccctggcagctcacaagaccagtcacctcacttgcttgtggagctttaccttctcgcacaaacatcaagcattctttcccatttaccatcacacgcttaggcacaggacttccacccgaaaacccgagctcgtgtccatccttgttaggatgagcggtgatggtcttgtaaaggacatcttttgaatggtatgtcttcatgcatccatatttcaccaaagtgctcaacctttcattctctttcttaagagcttgcatagcgtcaatattagtagcataagagttcaaatcaatatcgtaacacctagcacaaccattgctagtaaaagggttagaagaattagaaaccacatttggttgagaggtgctattccaaagagtgtcaaattgaacttcaagatctttatgacttttgtctaaattagcaaatttttcttgaagagtttcattgacatccctaaggctagctaaagaaccattagccaaattaagctcattagcaagttgtttatttttagcacattctttagctaagctctcctctaaggcaagatttcttttcttctcaagaataagcaattcttcttgcctttcgagtgattgttctttactatccaaagctctcattaacttagccaaatgttgcatagcgggtttgctaaagctcttaagcacatcatctaattaattatcactttcctcatcactagaatcaacatcaagagaagtttgagagggcttttgagtcatcaccttgcggccttgggccatgaagcaagagtagtggtaggagtcgtcgtcatcatcactcaagttgttgaagagacactccttgcttgaagaggatgacttgaaggcgacggtagcaacaccaccttctccttcaaccttgtcttttgacttgggcttgggcttgacctcgggatcttcttcatctccggagtgccacacttccgccatgtgtgcctccgccacatgagcacgctccggcttcttcttgcctcccttagccttagcttcatttgacttgggacaatcggcaatgaagtggccatattcgccacaattgaagcacgctctctttgattgcctctttcccttgtcatcatccttcctccctttgtcatagccactcttgcgaagaaagtgcttgaatctcttgacaataaaagccatttcttcatcttcactttcttcacaacttgactcttcttcttgttttgccttcaaagcaacttcttgattttttatcatggcggcattattcaccatttgtctcacttcacgagcttcctcttcttgcatctcatgagacacaattcttccaagaatgtcacttggggtgagtctcttgaagtgtttcctttcccgtatcattgataaaaaagagtgggatttcttggaccaaatgcacgcagaagtctcttgaccacaaagtgatttgtcatgtcctcactcccaagtcctttaatcttgttgacaagaatcatcatcctatcatacatttcttgtggtgtctccttgacatccatcacaaatcttccaagccttccttccaataattcaatcttggcctcacgaacggcgggtgatccctcatgagccaattgcaaagtatcccatatctccttagcctcctctagtccatcaaccttgttgaactcctccggactcaaggcggagagaattgcattagaagcttgagcattgcggtggatgaattgttcttgccccgaagtgagctccatgtcatcatggggtatatcaatacctgtacaaacaactttccaaatacttggatgcaaagagattagatgcaacttcaccttgtgcttccaagcgtcataatatgtcccatcaaattgaggagtatgcccggaaggcatggagacgaagtagtgagagggaatagtaagtttgctgtaatcaaaaggtatagtagctcccttgggtggtggagttcccttgctgcttgcttcatcttcatttccattttccccattctttccccctaagtccaacatcgtggatcactcaaagcggtgaagcttgaatcaagagcacctcgctctgataccaattgaacgtgcagagatgtagcctagagggggggatgaataggctttcctgaaattttctcaacaaacgcagcggttaaattgacagggtccggaacctcctggtgatgaacatcggaacttcctggcagtgatgagtagcctggaacttccgaagttcttgagccaggaacttccgggcaatagagaaaaatgaaatatgagaagtataacaggtcctagctagtgaaaatcaggcacagggttgcacaagatgaaaatcacaagataccagcagattcaaacactgatcaagcacaagagagacaaaggcgattttttttccgaagttcggatcacacggatcctactctccgttgaggtgctccaaagagccgggtctcgattaaccccttgcctcacttatgcaaagatcccagaagaggtccacagccttcaactcaacacttctaggtcgttttctagaattgagtgaccaccaagatccaactcataattccttctagaaaagaccacaagtgcaagttgctctacctaggacaacctctgaaaactcagcacaagaaacttcactcacttacctcgtttccttgcggaggtgaggaaaaccttcacaaactttctcgggacatccacaagatctttggaagctcatgggcgacgcctaaccgtctaggagaagatctccaagagtaataagcccaagtgacagcccacaaggtatccaaagtgctcaatcaaacctaatcttcaagccatctccaaaacactcctacactctcgtctaatctctcaatctcacaagataggctctagatttgagtggaggaagcaaaggaagcttgggagtggctagaaaaccctagaacatgaatgaacagaagtggaatggccaaaaggtgacctggggacgaaattcatatatataacggctaggtgacgtcatctagccgttactcacaagtttgaactagaaacctgccaggaggttccgggcaaaagtgccaggaacttccgggcagcacttaggaaattttttgcaaataaacggtgcccaaaagttccggccagaacctccgggtagccctctctgtcccggggagaaaatcatttttcaaaaatgattccaaaaaatcttttgactcatagatatgactaagagcactttgtataccctagaaccacacttgaaacccctcttaatagtacggtttttcctaaactcaatttcgaaagtgaaaaacctagtctaatcaccttcgatgatttttgcacttaggaacatttgaattgggggggtctccttgcattcttagccatcacaactcgctttgggactaaactcctgtgaataaacttgataaacacgttagtcccctttaaccaccttgtcattaatcaccaaaaccccctagggggtttaagtgcatcttcagggccgatatgtatttttattgttttattcactgacaggtgggtcccgtttatgtttgttttatttgagtaccatgtaagcgccacgttgatgccacataggatgaagaccaagtcaactcgccacgtaagtgccaccgtagaacaaaatcgcctccaaaaccgctcgaggagttgatttgcaactgtttcgggagttaggggacgtgttatacatgattttgtggttgaggggtgtgattcaaccgggtcatgagttgagggaggcaaaatggacttattcctaaaaaatacaaggcctgagcccatgcggaattatctatgattgccacttcaagttgggacctactagtatgcaacagccagaaaaagagaaagaagataattagataaacatgacgttgacagatggattcaaatagttttttctttgctgattcagcactgatattgctgatgtgacaccgtgttatgttagcatacgacttgcagagtttgcaatactccaaaaaccagtttagcatcaataggattattagttgcaaggatttaatctggcttttacggccgaaatagacatttgaggtttagttcgggaaactgagctcgcacagtatcatcctccaaataatacagcaaggtacagcgaacggcttggtgcagtgatgctgtcagtcttgcgtgtgctgcgccgtgcgagcatgggctgcctgaggttgcaaacgcgagccaggcagccagcacagcaccatcagccgcgtcactccagctacagaaaaatatcgtactccgtcagaatcttggcccgctgcgttattatttataatctgctaattaagaaacaagtggtactaaccattcaaaccccatcatccattgttgcccccctaatgatcccatccacgcccatcatccaagcgtgcaagccagaaacggtaggcagcagttgggccaatgcattaaacaaaggagccatccgctgtggacgtgatcatgccgtggatcatcctagcaccagcaagcaaacgccttttttttctagattctccttggaatgaaggccggaatccgagccgtccatccctcgatccaacggcgcaaaatcgatggctaccaacaaacagctcacgttagctgcctcccctgggaacccccctgggaatgggatcgatccggcgacccggaaaaggcgccgattctgacgccgaaaggcgggcggccctgcagctgagccgaaacgaggctcggctacgccgtgcgccgcctcgccgccgtcgccgcgagcggaatttctttccggtcgatcgcgtttgggatttggggatctctttacgcgaagtcttgtggtaggctcatcggcggttgattggagctggagtcgccgagcccttttgggtccaatccagatatatatacttgcctttctgaaaaggcacgggccgtgaccaatgcggttgtgtggatgtttctttacctcctggggccgggcagattgatcgatcgatgttctctcacgtccggaccacaggttttgcgatggaaaatggtcactctctcggtgctttacttcgctacttcaagggtttttaattggtagtgatggtggttggtttacgtatgtttcatgtgatggtcttgtacagttgtgcataccttcaacactatctttatatactttgagcacacatcaacgctcactccttatagcaatatgtataatatgtatgtactttctaacggaccatactgatataattaagaattgagtggatgaattgaagataaagtattgattcctatcacgattacttacagcggacgccggacgaactcctacacatggcgaaaaggggatataaagaggatgactacgcttttaagtacatagtgcctgttttgatcccctgataaaattttacattctgtcacatcgaatgtttggacacatgtatggagtattaaatataaaaaaaataactaattacacagtttgtgtgtaaattgcgagacgaatcttttaagcctaattgcgctatgatttgacaatgcagtgctacattaaactaccttgtgggaacattttcgcactgcatggtaagaagtcgcgaacagtgggaaagcaacaggatggaagggattgagagccctcggacacccctacaagtcgagaacgacaaatatgaagaaggaaactttaaatttttaatataaaaggtgatctgttggagctgatttttaaccatttatccaaaaatcttgtacatgtattatcttattgggaaaaaaaggtaatacagtttagcataagaagaagaaattaggaatgattatagtgttgccaggtagggcaatggataataacaagagggagaaaagtatagaagcttactccctccggttttattttaattgacgttttggacaatgacacggtctacaaaatatacctttgacattatttttctattataatatacacaagaaataaatgcatgtttatttttattatagtgttttgaaagacaaatctatatatgttgttctagtttctttaaactaaatatttttgaagttattgatggtcatagttattgaagtttgactttaactttatccaaaacgttaattattatagaaccggagggagtaggttttactccctctgtcccatagtataagggattttggaggatgtgatatttctgtccggatttatagttctatggaatatcacatccctttaaaatctcttatattataaaacggagagagtaggagggatcaaaattgcagcagaccagcactattacatagagtctctctaacaacagtacaattaagtccgctacaaactaatgaacgatagttactgtgaagctccttttgaactgtcatatgttactgtagcaatatagtccgaataattagagtcgagagcttttgccacctctcgcatccgactgttctccgttgcattttcatgtagaagatctcattccggtttaggaagaaaaaaaagccatagttggaaaaaagtgcattttagatccgggtcatagatttgttctttcttttttatagaatagtaagggcatgtttggattgatgccctacaaaaattttggtagtgctaaatcttggacaagttttggtactactaaaatttttggtagggtagagttgaaaatgtttatttggattgaagtcaaaatttacccataagagataagtttataggcaaagccaaatttatagcataggtagagttttagcagaggtgtttggtttgcaatcctaccaaaattttgataggacaaattttggtagggtagcaatttaaattggccctaactctcggcgacagctacaaagaggccatatacaaattttcgagatacgcaatacggcgattttccattgcaagggggcgcaactctagcataatccggacgaacacttgcctccacacagagcgaaccaaatgcacgggttaagtagtaccagtacgacgtgtccatcccgttcaacacttgccccccgctctgaccgccgctgccgccaaggcgacccggtcggcggtctcccctgctcgccgcttgtttattcctcgcagtccgcgctccctcctcccggtaaacaaacgactcctgcagcctgcaggctactcctaccgctacatcaaccgaggaaaaacgtctgtcgcatgtggtgtgtgtgcattaataaaaaaaaatactatttataatattcgtaagtaaattgtactccctccgtctcaaaataagtacagttttacactattcatgttcaacgtttgaccgtccatcttatttgaaaattttttatgattagtatttttattgctattagataataaaacatgaatagtactttatgtgtgactaaatgtttttaattttttcacaaattttttaaataagacggacggtcaaacgttgaacgtgaatagtgcaaaactgcacttattataggacggaggtagtaacataaatttattaaacctaattaattttttattagcacatgtttactatagcatcatattgtcaaatcatggagcaattatgattaaaatatttctcgtaaattagtcgcaatctatgtaattggagtagttacttccttcatcccacaatacttgtctttctagcattcaaaagttgtcccaaaatattatcacttgaaagtagtacttgccacattaaccacttctaattcaaatttcttctcattatactcccaaccaccatcttacatccaactatactccctccgtcttttaaaaaaaagtaaactctggctatgcttttttttacggagggagcacattagttactaaaggatattatagtctttttctcttaatcttagtatatgctaaacaacctagaattatatgtattttgctacggagggggtatattttttaacttatgggtgtatttagttcacgccaaaattgtaagtttgattgaaatttgaacgatgtgacgggaaagttggaaggtgtgtgtaggaaagttttgatgtgatggaaaagttggaagtttaaaaaaaaagtttggaactaaactcagcctatatttaatactccctctgtcccataatataagggactttgagttttttttcattgtttgaccactcgtcttattcaaaaatttgtgcaaatataaaaaacgaaaagttgtgcttaagtgctttggataataaagtaagtcaaaaaaaataattctaaatttttttgaataagacgagtggtcaaacagcaccagcaaaaacttaaaatcccttgtattatgaaacggagggagtactttggtatatgtgttcagacgttcgatgtgacgggatgtaaaattttaacgtggatctaaacagacgatcaaacaacatcgacgaggagtaaggccctgtttagatgggactaaaacttttaagtccctatcacatcggatgtttgaaaattaattataaatattaaacgtagactattaataaaacccatccataatcttggactaatttgcgagacgaatctaatgagcctaattaatccatgattagcctatgtgatgctacagtaaacattctctaattatagattaattaggcttaaaaaatttgtctcgtgatttagcttttatttatgtaattagttttgtaagtagtctatatttaatactctaaattagtgtttaaagacagggagacagggactagtccctgatgtaaacaccacctgaaacaacgaccgctacgctaggtccatggtcgtggcaacggcagcgcgtcgggagacgagctgagcaagcgagacacgagaccatcggcggccacgctcttacacgccatcaaccgcgagacacgactcacacgagactccccacccatcctcctccgtgcgcgctggaggaggtggaggtggaggtggtggtgtccgctgccccccgcaataaataagcctacctccatgttcccacccccctctctctctcttctccgtctcgcctcgtcacctcacctcggcatcacccaggtgggagggggtccgccttgacttttcgtgttcgggtttgggtttgagtgccgcatctgcaagcttgtgcgaggggggaatctctcttccttgctgtggtggcggcgggcgggagggcggcgttgatttcgttggggtttgcgttgcgtgcggaggacggggttgtgtttgtgtgtgtgtttgtgctgatttgggcattggtgttggtggtggaggaggatggggaactgcgtggcgaggagcgggacggcggtggatgcgggtggtgatggaggggaggatgggaagaggcggaggaggaggtggaaggcgccgcgggaagatcagctcgggatggtgcccggccggatcttctccaacgacggccgcagccggacggcgacggtgtacacgcagcaagggcgcaaggggatcaaccaggacgccatgctcgtctgggatgtaagtggaaggtttctcggctctctctctctatctctctccccctatctaattcccgcttttctcggcgcgattggctgacttctcgtttgattgatcgtgaatggcaggggttcggcggcgaggacgacggcgtgctgtgcggggtgttcgacgggcacgggccgcacgggcacgtggtggcgcggagggtccgcgactcgctgccgctgaggctcatgtccgcggcgcgcgacagcggggcggacatgccggccgccgcatggaggaaggccttcgcgcgcgcctacaaggccatggacaaggacctccggtcgcacccttccctcgattgcttctgcagcggaagcactgccgtcaccgtcctcaagctcgtacgtgccgtggacaccggacatgacacgcatctcctgtccatcacccccccgtcctctcaaaaatgtcaaatcgaatctgcctactatgcgtctacgcacggcggctcacggggcgatttctgcatgcagggctcggatctctacatggccaacattggggactcgcgcgccgtgctcggctccagggaggccaccggcggcggcatggtcgccgtgcagctcaccgttgatctcaagccggatgtccccagtatgccactcccctgcttccactcacccgctaatcgtgttaggaggtcgtgctcttgcgcttatggtgctggttgtgatttcaggcgaagcggagaggatcaagaagtgcaggggcagggtgttcgcgctgcaggacgagccggaggtgccaagggtctggctgccgttcgacgacgcgccgggcctcgcgatggcgcgagcgttcggggacttctgcctgaaagattacggggtcatctcggtgccggaattcttccactggtctctcacagaaaaggaccagttcgtcattcttgcatcggatggggtaatttgctcgaacctatcacttgaacagataattcattgttctctgtttggttgttggatatttgcccgtgcagcgaatgagtatctctgtccctgcaaaatcctactttctttccgctggaattagattagttgcgatgtagtgtcaatctgtcacactttcgcattccacatgttgttagttgcacatggcgggcctagcgtatccatgacatctcgtgcatttctttagaagctaaaagagacgtgattaacatatccacgaatggtttaggcttttgacttcaaaccgctgtatctttcaggatttatttctaaaactatcatgattgcaggtgaaataatttaagtatcctccatttgtgccttttgtgactgcggcataaataatgattagccagcttaacagtcttctttgctgcatgcctgcatcgtcacccactttttgttatcagctgtactcaaactgttaaatcttatccttattcaacttgactcggttgattgatttaattgttgttgatgagatcatgtgcacctttcaactgtagcagttagaagtgagcacattaagctaatggcatatggagtagccaataaaattaggaagtcctaatggtcaataacttgttttcctgtcaatagtctacccatctgaataatgtgggtattctaccagacaaacccaaactactttgggggaaattacacgatagatcccagttcacttcaattccacgaaaatgtcataatacctagaatataccacactgttgactttcacttaactccatcatcttcacctctcctcttgttcatccacatgttgtcatctttcttcatcgatgcatcatgtgcctgctgactggtccacaccgcctcaccctgcggataaaacgtgacccaaccagtaatgctcctttccttatcgtgatcgcatactagtacctcgtgtcaccaatcatgactgcgctagggcattgacaggccacaccgctgtgaccatgactgttcacaatattgccaacacctttgtctagtgtctacgtgcagccacctgcatccacaacaatcttttgctacagttcaagaaaaaagtgcactgaaaatgcagcgtgttggaagatggggttttttttgggggggggggggggggggtggggcgcagagcagcaacataaaaggggagcatgggcgatgcagggctggcagtgctcattttgtttagtggttgtggtagcgtcattgctaagaacagatgagatgataacatagggtgctggtcagcaacaatagtaatggagggtggacacaattagctgctatccattaaattcagcaccaatagtaatggagtatcttttttttctggtattaaaatgaactgggttttttttttgtgatatataccaaaactgaatcattcagtggtatagtaggacatcctacttttgcttaaatgtttcaccaattaatttctgccactttgtaatggagtggctttaagcttgtcatttgtcaatcacttgaagtggatggttttcctttcttttttgagcattaggtgggaatcacgtatgttcaatttttttactattagggggattgaatttggtgacactcaataggtagtaccaaattaaggcctatatgtattgactttataaactagcggtgtcatgcatgatcatatagcatgaagactggttagtgtatcttaaaggtcactgctatagagtggcaatctgtcagtatgaaagagctgtgcagactattgcattgtggtttaatatagtttaggtagtccatatctaatcaaacagagccttattctgttacacatattactttacttcagctgcaacttcttggtcttttccctcctagtctcctgggctgacaacttctattgacaagtgaatgtgtgcactgtgcaaatcaactttccttttcatttttatgtcaattttaatactgttgttatgtgtgttatgtacttgtcaaggttatattctgagaaaacttataattagtaaccatctatcaaaagtttctatccttgaatgtactatctaatgtatactgccaaaaagtgatgtttgaactttttaacctattatgaaatggttgcaattggcgaggaaagatgtccattttacccatgtaataatggtatctagtatcacgcaaaatgattttataagaagaaaatagttaggtcgatgtcaatcactgtctaccaagttgatattgcagctgtgccagaggagagcaagcttctttagttcctttttgtattgaatgtagtttgaaaagtcgaaagactttagtttggaatctggaaaagaacagataagttacttggtctgcttattcatgccatagaagctctcaatttgtcattgtcttttcatgtatgtcatatatcccttgtttgcatgtatagttcttactgaagttacacaagctatgcacatacttggctgcctttgtagagtttgcactaacaaaaatcttgcaggtatgggatgtcctcagcaatcaagaggctgttgatatagtgtccgcgtccccaagcagatcaaaggctgcaaaatcccttgttgaggcagccactcgtgaatggaaaaccaaatatccaacatccaaaatcgatgattgcgcggttgtttgcttatatttggatggaaaaatggaccatgagcgtgactcaactgcctcattggacaacatcagtattgaagagggttcagttgcagatcctaatgaacctcaggagcaggagcccaccttaactcggaatttcacagttaggacagttgcaggcagcacgcaagagaagaccttagcaggggtggatgcgaggattgctggtgtagcgaacgaccaaaattggtcaggtctcgatggagtgacacgggtaaactcacttgttcagcttcctaggttttctgaagagagggcaattggctgagctgcccatcttatatttacccccgttattttcacctattgttctgaattttagcgtagttgttctagagaaaggtagatgtgggacgatcttgtgatttggtgcggtacttggcaagcgtttcagccactatgcatagaagtcgagttgcacgttttagcccaacaaaactgcacattgcataggacagaggctctcttttcacccatcttgaggcatgtcaactccatacctcgaagatgaagcacaaaagagcaggccattgctccaaatctgcaattttgctgggttaaaactaacaaaagacgacgccaaacacagtggctaaacgcacgccaggccccagtcacccctgggatgatattgtcgggtgacctgtaaattctccaccggcgcttgctttgcttttgtagagaggtgatgtccagaccattttctccgctgcatgcttagcttttgttgacacagggcggtgcgctctgtcgatgtcggattgccaatctttgccccctttgttttgttcgcggtctgtgcccttgcttttactctcctggagccatcatgccaccgagaaaaatggcagtctcaatacttttaggccccctttgattccaagggaattcataaattttagatgattttatttctataggaattttttctacaaagccctttaaatgaaagaaatgaaccctatggaatcctatgaaattcctatggaatgtctcttcctatacaagtttttcctatacaagttttgggggaattttaacaagaggtagaacctcatggaaaaaattctttgagtctttatctcttcttaaattcctgtgttttttctgtggtccaatcaaacgatcattcctacgtttttcctatgttttgcaattctctgttttacacttacattcctatcagaatcatatgtttttcctattcctacgattcaaagaggcccttagccttaatggtggtgaactggtgactgatggtgcatccgtacaccaccgtacatggcacacgctgcatcttgtctgaaatggcatgtgaccggccgagcgttgctgcgctgtaggcgtgcgctggtgagcaaaatttgtccggcgacggtggccggccgacgcacgggcgggtgcaccgtgcaagagagatgcagggggagacaggcatccggcagaccggcaccgtaccactaccgacgggctgcacgggcacctatcacgtgaagtagatttgccgtccatcctgtggctgaccatttaacgaatcttacagcttttattgggctttcacacgcacattcacgcgcacagtctcacgcacgcgcgcgctgttcatacgtggctcgttgctgttgcctgtctcggtgcgccagccatgggtggacgcgaagtgaccgctcggtgactgggcggtagcgtgaggcaaaacccaaaaaagatgaggtgatcgaaggaataagatttttcaccacaaccgtagtttcagcggtcgagcggccgcgcacgcaacaaggtaccttcggtccttcaccgatcactggccgctgagcactatttgcatgacgcggttgtggtttgagatcagaggtgcaattgtaataaggagttgcggttcgactgaggtcctgtttagtttcaaagtttttttttccaaacttccaactttccattgcatcaaacatttcatacacacacaacttttctatcacatcgtactaatttcaaccaaacttccaaacttcagtgtgaactaaacacagcctgattgatacaaaacgaacggctcagatagctagaaaacactattcacgaattacatgtgaagaatctatactgtagtgattattgtagagtgttagaggtacaagagggtagcagagcaaatctgagactctattgtagcgattactgtagagtgtcaaaggtgtaacatggtaccagagcaaatctgagcccttggctttatcgatccaacggtcaaaacgtgttgtgactgctaaagtagtagtagtagtaacgactgcatcggatctcaattccgcggttataggggatcgtgaacgtttgtggtctgcgaaagcaaaatgaaagctcacccctcccccagcaagtgacacggcgaggagagaagacgtggacgagcagccgtcgttcgatgacgaacttccttcagctagccccttcctctgactgagaagagaagatgtagtcgagccccttctttctccggttagcttcccttaacaagatcgatccgggaaccaggccagctcttttctccaccccccccccaacacacacaccacaccctgccccgaaaccctaacaaaagaattcaggcgcacattcaaaaaataggattttcagttggcggaaccagccattgaagcccacgaaatcctagcaagtggcagcaaaaacgtgcctgccaccaccatcgccagggagtggcatcatgttcgagctccgctagtccatcttcagtcttcccttgaggacaagactacagcggcggtgcaacaacagtagcagttggaggtaagcatcacaaggtgttcctcactgtgtttatgcaagaaacctaatcgaattcatacgttgtgcaggggcatgctaatcttctctgtatcgttccaattgtatcggctgttataaaaaaaaaagaattcatacgttgcttgctgcacggtcaaatcaaatgcatgctttgcttgctgcttattgtaattgtgctatgctactacctggtcttggtgcatccatattacccaagtttcacaagcagcaagcatatgctgaatagttgcgattgttgtacccaatactagcaggaagatggaccgacggagtttgagaactgcgcccaaggtggcagcgaggaagcaacgtttctcggcggcgcatcctagcggacgagctccgggtcattccccgccgccgacgatggcggcggggtgaacgcatgtcatcaaactctggagatgtgtttgctatcactagtgagcttgagctttcatgggttggttctattagccagtactctcttcatctcaaaatataaggaattttaaacgaatggaaatgtaacacttcctagtactataaatttggatatggagcctgtttagactcgtagtactagaaaatatcccatccattcaaaatcacttatattttaggatggaggtagtattattaagggcacacgtcatgtgagagatgttatatggtttggacagtggatgagtactgattgcacgctcgtttcagtcacccccatgaaggcagacaatcctggttccaacgggagacatataagagatgagggaggctcgagagtgtgggagcatctcactggagttataggaggacgattgacttcaaacataaaacaatttggcagttggagaagtggtagggaggagatggctagtagggttcaccaggaacagtggtgacgctatggatgcaggggtgacagaatgaagagggtgggatagcggcgatgcacaactagtgagaacaatactactactaggactctaggagacaaggaggacgagtgtgattgagggataaggtgtcttgcacaaatcttaaagagatttcatccattgaaaatcggttgattttccccatgaaacaattcaatgataggtagacggtctctataatttagtgcttttcacaaacaaacttgtagctcagtgctatgtcgaagttaatcattttccgcatcaactcgaaatttggcactgtggaagcgatactacactagacattgaaatggcaagaagttggtgccaatctctttggtgcacacctccaaacaaagtcacatttcccctctatccctcttcatatatgggcttgttcattttgctacaactttcaactctaccaattttatttggcaataaactggacaagtcgcatctttatttggcacaccttcattgaaaaattgacaaaccaggatatgatgttagattttccaagtttttttcaatcttataattaatttatgatattgggatttaagtgtggtagagaggggacaaactctcttttctgctccatcccgctcttcaaacaatggtgtggtgagttggtattagactttcaagggaattgataaagcagggtacactgattcacttctcataatatatttttacttttataatgccaatttggttgacggtcagtttgccgcatttaatattaagcaagaccaatttatacaactatttggttgaagccacagttgtgataatattctcttccaacaaattaggtctgatgcatcaataacttagaaaaatgtgccaaaattcttttagacttattaaggtttggtaaagattttgagcatctaaccttagagaagtttgacaactactattgacaaacgatggcgacttgtaaggctctgactagcaactaaacaaacactaattcttgagattgagatgagggtgcgggaggtcaacgctaacgagggtggtgccaaccttcgacaacccaagagaatgggcagcaaccccattcatgacactagttgtaatggactctataccataagtaccacggagttatatggctgtgctgtaaattgtagctggacaacccataatcgttaacactaagatgtttatcctccatgtctagaactctatagttaaattctaggtttaattttcgaaaaatggctaggaagtaaaaggcccaaatttgtaagatttaacaaaaattaaccaatctcgaaagaaattagatgctcgtacaaaccaaagctgatcaagggagctccaaaatctgaggatattcgacgaaattcgagcggaaaggtgaactcgtacttgttcactgtccatgtaacattgcgtgaaggaagacagctggagtattattgtactaccatccaaccagcagccggaagaccgatcatttttaacggaccaattgcgagaatacgccacaagttagcgtggtcaaatctcaggaaaagcactgcaagtgcgagacagagcagagaacagttcagcattttcaggctgctagctagcaggtgcagtcttccaaatggagcaaaaaaaaaaaagagaaaaaaatgccagttgcgcccagctgtccggagcacgtctccacgtgagaatcgccgaacgacccgccaccgacactgacatgcgggcccaatcccccgtacgcactcgctgtcctgtcacccaaacctcttcttcccgaagcctctctgaccgcgttgcattcttgcggctcacgagtcacgaccacccaacccaacccacccacgaagacgtcaacacgaacgcgaacgcgcgcgcgacggcgcgagccgtatgtaaggttcgctgcggcttcttcttccgctcgcccgcgcgctcatggccgcactccgccacgcgacgcggcgcgcgtaggaggcaggcggctcgtgcgtataagaggcgacgagacgagacgacgacaagaagacgccggaagcagaggcaggtagcgtagcggcggcagtgaagcgagggacgactagcgacgatgagttctcgctcggcggcgcgaggaggggtgccgcggccgaggaggccgagcagcggcggcggcggcggcggcagtaacacgccgaggccgggcggtgggggtggcgtgttccccgggcgagcggaggggttcaactggtggggcgcgggcgggcgagcggcggcggcggcatcgacggcgccgttggcgaggcggcaggcgtgcggcagggcaggcagggcgtcggcgatggctcgggtgccgacggggaaccgggaggtggtgcggcgggcgctgtcgccgcccgccacgcgcagccgcggcgccggcgcgctgaggaggtggagcttccggccggcgccgagccggctccgcaacgcgtcgtcgtcgccgtcctcccctgcctcgccacggtcgccgtgatttttctcctctgccgccatggcggcggttctgaccggattttggcattcttccgttggtgacttggggtaggcaccggagattactgtcctttgtaattaggagtagtagtttgtaacgtttaatttttagatgatgatcctctgtaattagtagttccagattaattcttttgacatgatacacgtacactgggaaaatgaattttgagaattacacagtacaatgcatatactcacaacgcacgcgcactcacccctatgagcatttttgaagaggcgcctcgctgtcgacgggtacatcgcatgccactgaagaacccagtacctcagatgctactgaggctcttgtaaccattaggctacaggtcctttcacactgagaaaatgaattttgatcaggttaagttacacttgcgctgtgtgtagttccaaaataattcttcaaacttctaactttttcatcacatcaaaattttcctacacacaaacttctaactttttcgtcacattgttccaattttagagtgaactaaacacataaacaaagccttgatgaaaaatgcactgttgtataggcgagaaatttcagtatatgccattcaagcggccgaagcatctccccgtaagctcaagctccgccgttgccaccttcactgtggattcgccgttggagtataaaaagatcggtagatcaccgagaaacaccatagccgccggactcgatcgatggcgtcgctgactccaccactgtgctactcgattcataacacttttcagaacttgttgccgagggcacgaagtgttgcattccgtgccatccgatccatccagtacaaaaacggttttccaaacagccaataatcattttcccggacgaggggaaggcctgcctacacgcataagcctgtgaaaatgaggcgccatagctacccacctgcgaaaatattttgggcgaaaaaaaaaatcaccacaccccccctacccaatccagccacgccgccgccgcaatcctcgcaccttcggccagatctagggttaaggttttggggggagagggagagggagagggagaggaggtgaggggaggttgttgcaggggcgacgccgccacccttccctccccccttcagccagatctgggagggagggagggtaaccgtcgccaccgcctggagccgcgtcgacgctgccaggagggagggaggggagggaaggaaagccgccaccgccgccctgtcccctccggccagatttaggagagaagccgccgccacccccctcccccttccctccggccagagctgggaggaaggaggggagtcaccggccaacacgccctcccccatgcccccttcagccggatctgggaagggaggggaggggaggggatccgggctgagggtggtgcgacgccgcctccgcttagagccgttggcgccgtcgccatcgcctatcccctccctctggccgaatctgggaggagggacggaagccgccgtcgccgccctctctcctccccccttcggctggatctgggagggagggaaggggagccgccaccgccaccgccgctagccactgctgtcgccgaggagagagggaagaagaggtgggagggaaggggaggggagcaccggggagagaggcaaggagaggtgggaggggagggagagggacttaggatttttgactgcatgtgacagtttttatgatgcttaaggtattttcgtaggcagatctattaagagatcccaggtagacgacgaactcacccacggttgtcatttttttaggtggtcatttaactccgagaggcctactcgtctggaaaaacatgccatcgtctagaaaaatggttttcctggtagtgatcgggaagtcacgtcgtacgattattagcattgcctgtcgtagtcgttgtagccacggaggtcgggcacgatggcatggaatccctggcccttctcatcaccatcggttagcttctcctcgtgttgctactctactctcccactccaacacactttttgaatagaaaacagcactatagtgccttttcattgaatagagcagcagaaaatacaacccctagagacaaaatgaaacaagtagaaacactatagctatacattatacagagtgcgggattaactcacgcaaccgtttagcccctactaaagcgcaaaggctagcctcttttttaatttttgatagaaaaaaactcgttgtcacctctttgtggttaaagatccgccgattcctctcctttcagcacactgggaggaccttaattagtggcaagcggcacataaggaatagctcgtcgacggaggcccgatgcgtgtgccggtaagaccttggtggctaacggcgtgagcgaggagctcgccaatggtgcccggatgcgcgcgccgggatgaccttgctggctggctggcagcgtgtgccgaaaggaccttggcggttgacggcgtgcacgaggacgagctcgtcgtgcttggacctcagcggctggcgacgcttgacagtggccagatgcacgcgaggaggacatcgacagccgacggcatgtgcgaggaggagctcgccgacggcgatcagatccattactaaattttggtaagttgtggtaagttttgaaagtgccgttaattgagtggcattactaaattttttccgttatatgcatattatacctacttgtacacctgggctgtgtttagttcacacttggttgaaattgaaagtttggttgaaattggaacgatgtgacggaaaagttagaagtttacgtgagtagaaaagtttgatgtgatggaaaaggttggaagtttgaagaaaaaattgggatctatacacggtgcaatttcagtactacctccgtcaaaaaagagtatagttttgcattgtttatgtccaacgttcgactgttcatactatttttttaaaaaaatatgattagtattattattattattagatcataaaacatgaatagtactttatgtgtgactatttttttatattttctcataaattttgaaacaagacgtacgatcaaacgttgaacacggaaacccacaactacatttaaattgggacggaggtagtatcaaacatcaaaattgagttgaaaaggcaaccttctctctctcactggtcgtggcagggcgacctcagactatagatggccaaaaggcccgcccggcacggcccggcccaggcacggcccaccagccatcgggccggcacggcccgatcggcacttcgtgccgggccgtgccggcccatgggctgcgcctcccgcccagacacggcccaccagctgtcgggccatgccgggccggcccgaagacgcgggtggcccaccgtgccttttttaaataagtctagttttcgtccctcgtctttgggctgtgacataatatagcgaaaataagtctattttccatccctctactttgggctatgacatatatatatatagtgaaaataagtctatttttcgtccctcctctttgggctgacatatatataggtaaaataagtctattttacgtccctattctttcgaccgtggcatataatatgtctatttttactccctattgtttatgtgtcgggcttagcatgcggcccatcgtgccgtgccggcggagaggcccaggcacggcccggtggtcgggccgggccggcacgggcccgacccttgacgggccgggccgtgcttgggctgggccaaaacgccgtgccgtgggccgggccgtcgggcctcgagccttttggccatctatacctcagacgcccctccagatcccctccttggctagggctgtggtctttgctccatgttcccaacccctctccctcgtattccgcgcgcactctttttaaattgataaacggtgtgttttttgcaaaaattttctatacaaaaattgcttaaaaaaattaaattaatccattttttttaaaaaattgttaatacttaattagtcacgcgctaatgggctgctccgtttttcgtgcggggagatgggttccaaaccatgtgttaacagtgaaatttggtaatcggcaaagacgtcatcagcttagaatcattattggctgcagcatctcggaatcagccgatgggagttatcaagtcgccaatagtcggattcctgctatattcagttaaggaaatcaatctactaaaggaagcttatccctaagtgaccgagtttaaagaggatgcggcatggcagtttatctattaattaggaatagtttgttagtttccttttatctttaggaaagtgtgtttagtgtccaataaggactttatattttccttttatctttaggttagtttctttcttgtccgacaaggaattgtatcaacccatgggtataaatatgtacacccggggtctatgtaatctatcctcacgatcaatacaattcggcgcatcgccaccttttaccttttctatttaattttatcgttcggcgggacttggcacccgacgcggggctgcatcggtgttcgatctccggcgaaggggtaagtccaatgttctgccggcccgggcaattgtctcatctacatcggcgtcgttcaaggctgcatcaagacattcgacctcttggattactctggtttggatgatatatttgcctacctatttatcatatgtctctgttaatctagtcttagcatatcaatttagctctattggctgcttctcgttttagggtttctgccggtatcggctaaatcgtgttgctagattagattagcttagacatctaccaccctgaaaactcaatcaacgacttgattgtctagatattatgtttcttttcatacttagtgccgcatcagttaagtttgatctaataagtcatgcttagaaccataatctctagcctgcttcttgattgccaataagggtttcatcggggtttcaaccggtgagttatctggacgttgcatcggctcataaggattgcatatacatataagtttgatttagccgatgacaacaaaggtttcactgtttaatctaatctgtggatttattgacatcggtcttccagccgatgtgtgcttgaaccttcggatcaatgtttattctatcatattattgttagccgattgatttatactggattatattgctatattatattatcatcagccgattgccttcatatcattatctacattggacatatagccgattgcttacaccctatcgctatcggctggtatcagcatcggctattatcggctatcggctggaactactccatcggcttgttagccgatcggctgttttgatctactatttgcatatcttgtcagttgcaggatcaaactaactggcacgcccgcatctcatcaatctttggacctgcactggagctaagcagatctcccaggccggtgtgttcgatttttttcgtcaacaccatgacatgcgaacacaccctaggtttaagaaaaccggtcggttatcatgaaactgtcgatggtcgttttctggtattggatcaattttcgtgcaacgttggttgaaagtcattgattttacaggttatcgatcggttttcgataaaccggtgagaagcggttttaaattccaaaataaaaggttaaaccatttccacgctgtcgacgggggatacccgtagaccggatatagagggtattggggtacgctggtatgaggatctacataatacgacatcaagtaggcagaaaacaaagaatatactggttcaggccccttgataggtaatagccctaatccagttaatatgggattatatgatggaaaccacatgttacaaagggaatagcggaactcgatgagatcgtagtcgagttgattcgactagatcacccggcgacttggctcctgtaggctccggcttcgtaggctgtggtggatgtgttggcggtaagattcgatgccttaggtcctcccgggggggtcccttttataccgtaggtcaactggtctccaagtaggacccggagacatcggacccggtacgatacaatgacgacccagttctatccgagtaggactctttccgtctgtgaactccataatgaatttccttaacgtatgctgaaaacgtccgtatgcacgcaagtataccatatcgatatgtaacgtatatcgaagggtagagggtataccttacccgtaaccctgacagtagcccccgatttctgtttaaatgaactcgtgaaaccgatcgcgacttccgatgtcgaggttgtcgtcgttctcagtgtgaggactgacagacaaggagtgatcgacaacaccaggtgaagctcaacggtcatgagtgaatttaaattgatgtccgaaaaactgccgcgcataacggacccagaaattttcggcggccatctctctcctttccttggaattctcaacatcggaagtgcgtctatttaagagagttttggggatccaatttgaagtccgcctattgtgaaaaaactctccagcctccaagcgtccctcgtcttctccgctcccgcaaaaaccctagctagctcatctcggtcctttctctggcgatctccggcggcaatggatctcgacaagtctacctgcaccagcgcgtcgctgaagaagctgcaggaggatggcgcccttcctagtcacgggaccatggagagagaagcaggaggtactgaaccccaacctgtcctgggtcgcatggttgcgatcgaggattatattctctgtggctttcttcctccgccttctgaatttcttctcttggtcttgaatttctacggcctttccttgctctatttgagccccaattccatcgccttcctgagtatcttttcgcatctttgtgaggcctacattggggtagagccgtttcttgacctcttctgcttttactatgagttgtgctggatggaacccaaaaaggtgtccggatgtgtcggtttttgacttcgggatggcctgaagtcacgatacatccccttccagtgcccctcatcttgcaacaaatggtgggggaggtggttctatcttcatatatcatcttggaccgccagacccgccttgaccccatccttccaatctttcatcgatatcattgatgacctccgagtacgggggttgtcggggtatgaaatcgctgccgacttcattggtaggcggatccagccactccaggcttgagcccacccagcctttgattattctaggccggaggacgcgacccaggtttctcctcggggtatttttctttttagttaaattgactcccttatgtgcgtgttcttcccgacttattgaattctggtcttgatctataggcttggacagcgcaaccgtggagcgccgcgtcggccaactgatgatcagtggcccgacaacggcgagcaacgtccccgtccccctttgcgagaaaggggcagccgagcgcgaagctgccatcaatgtaagtgtactcagcggtccttttgcattattcttccgggatcgcattatgatttcatgaagcgtaagctctccctctgactgatatcatcgggccactcgtggaccatcaggtggcggcgtcgctgaaggagaaagtcgccaaggaggcgtctgacgctgctgccgctgctaccacaacgagtggcgacaacgttccgaaaaaggagaggaaattctcctctgtgatcggacatcgttggaagacgcccaccccctcggtaagctctcctggtccttcatcacgtagtcaagaaacttccacctcacctcatatacgttatactccaggcctcggatgcgtctcccccgcttccgcgacggtagcggcttgtgacgctcggcgagaagtaagtgaatgaatttgaggtttcgtgacttcgtcaaactcttgcagtctgtctcaattgcagcctttcgcagggcggcgcgggcgaaggcggcgcaggacgggtctggggggacctccagcgcgtctcctgttgtggcctcgacggatgtcgtggtcgtgcccaagagccgcgaggcgacacctagcggcccagccagcgatctcgtggctggtcgtggtccgccggctgtcgtcctcacctgggagcagctccaggttgagatggggtgccttctcaaggctggtactcgcggcattagccgcgagatcacggaggcgagggcggtggcggcgtcgtcggcgaatgagcgtgccgaccggctggcgcgcgatatggaggttcgcgaggacctccagaagatgagggaactggtggccggcaacgagcgacaacggtagggactagagcaccgcatgtcggagctcgagaacaacttgtcggaaatctgtggctcgttgcgggtcacctatattggtctgcaccagctcgccggggagtgcggtatcaagtctaccatcccggcgaatcccgatgaattctcgctgacgtcttttcttgcggagctggcgacggcgatggaggagatcccctccaagcacgcggccaggatcggagaggagacgtccaacgggatctataccggggcgtgccatgtccttgcgtgtgtgaggctggcgcaccctgaactcgatctgcggaagatcttggatcagggggtggctagcgacgcgcacaaggatgtgatggaagaagtcggcgatctgggggagtctgttttcccactttttgtagagtaggattttgactctcttgtactctttagtcatgctttgtaaaactttcattggttccaaccgcctttgtgtgtgtagtcatcgccttagctttctttagcattttgatcttgagtactttgttgtcattcgtagagatgttgatgtcgaggatgtccagcagcgcgggcagcctgagttgccagtggtcgttccgttgcttgcgttcgagccacatgttccggagggcgatgtagctcaaaattcgcatgtggaaacgggcatggcgacgactcccttaggttggttatctctgttttcatctcctttactcttccgtctggatcgatttgatttgttgtattctcgggagagaagagcagtttgacttagtcgtttccatgctgagcagacctcgagagtgcgcttgctgaccaggatcgtcgcatccagtattggaggacgaagtttgaggtcgcggaactcgagaggactatgctagaagtgaagaacgaccaagccgtggagacactccggggtcgcgaggtgtggttcaactcgtatctgaagagttgctgcacctccatgtcaagggtctgtagagagctccgagtaccccgtggggataccgaggaatcggcggctggatacatctcgtggctaaatggggactgcgcccagctcgagggcatcggccagcgtatcgacgaagccccgaagcaggagtgtcgtcgatcgagccgatatgctgggggggcatgtattggcttgtatacgagatcatcgtccgcaactgcacctcgagttcctccacgaagggttttctcgttctcggagaactcctacggagatagatggcctggcgaagtcgatggcgccgctggcggaaaaggtcttccagtctatggactggcgttggccttcctggtagtctccgtgtcctgtgacaaatgtcttaggggaaaagtgtaatataattttggatttttatagaattgtaagaagtacttgtgaaatagaaaagaaatctatctaactaagctttcttactctggatgtagcgtgtatgagtgtcttctcacttcgcgacttcgatcagtcgtttgagttatacactctccctagcccccagccttgtcatcggagaattcttctcgggagataaggctcttgtacctttgacctgcctcgattgaacaagcactaatcctagcccccagctgtgaagttggaaagtttatttttgattacacggcttggttaatacgcacggcgagaactcttacacgaccagatcttacatggtctttcgtctctacaggatccgacaaggccttatcggctctgggcatccccagccgaagttcccttaggttcctcggaggccttgtcaagacggcgtaaagggacatgaggataggtttcaacgctaggtgtcatctgggtaagggatcatcgggaaggaacactttgattgtagtctgtacctaaaaataggctttattgaagctgtaagatgtcttacaagcatggatactattaacttatacatagaatttacgtaattgatcaatgttccaggaatttgacaactcgcgaccatcgccgtctgcaattttgaatgcgcctggccgcagaacttgtgtgatcgtgtacggtccttcccatttgggtgagagcttgtttcgccctgcttgactttgaacccgtcggaggacgtagtcgccgatcgaaagtgtgcatgctcggatgcacttctcatggtaacggcgatgggcctgttggtagctggctgctcgaacggcaactcgttcgcgatgttcctctagtagattcacatcatcgtttcgttgctcctcctgatcctcatcggaatacttctgtactcgtgtactttaatgccgtagcttggtggggagcatggcctctgagccgtacacgaggaagaagggtgtctccttattggacgttgtcggtgtggtacgcacggcccatagtactgatggaagttcttcgacccacttcttgtcatgtgacatgaacctgtcgtagacgcgggtcttgattccttatagtactatgccgtttgccctctcgacttgtccattgctctgagggtgagaaaccgaggcgaagcagatcttgactcccagcctgatgcagtaatcctggaaatcagcactaatgaactgggagctgttgtccgttatgatacggtggggcaatccgaacctacagaatatccctttgatgaatttgatggcgttgtcggccttgatttccctcatgggtgtcgcttcaatccacttcgtgaatttgtcgatcgccacgaataggaacctgtagccgccctgtcctcgtgggaatggcccgagtatatctagcccccaacacgagaacggccaagtgagagggatagtctggagtgcttgcgctggtagccttgtgtgtttactgtggaattgacaggcttcacactgctgaaccatgtcataggcgtctttgagggcggttggccagaagaacccttgtcgaaaagcttttccgactaatgtccgaccggcggcatgtgacccacagatcccttcatgtatgttgaggaggaggtgtctgccgtttggtgccttcttgtatagatcgttgccgatcatacagtagacttttgctttacggaatattttctcggcttctgcgtcgtcctcgggcaactcttcactgcctatgaatttaatgagtggggtgcgccagtcgtctgtggtcccgatatcggcaacggcgcgctctgcctctgtagcccccgagctgatgttgagggcgaccgggctaccttcgccgcttgcctctttcactgatggcctggtcaggacgtccagaaaggtgccaggttcaagtggctctcgtctggatgcacgccgtgctagatcatccggttcgatgttgtctttgcggtatacatgttggacctcgatcccatcgaaccttttttccagcttcctgacttctgcgagatacttggataactcggggctagagcacttgtaatctttatgcacctggttcgcgactagttcggaatcccctttcacgatcagtagcctgactccgagtgcagctgcagcacttatcccggcgattagtccttcgtactctgctgtgttattagtcgccctgaagttgaggtgaattgcatgcttgaattgatctcccagaggtgatgtcaagatgaatcttgcccctgctccttggctgttgagtgcgccgtcgaacgctattgtccacgttttgttgtcgatttggttgtctgacctgttatcaggcatagtccaatcggctacgaagtcggcaagtacctgggacttgatggttgttcgtggcacaaatcggacatcaaactggcttagctcgactacccatttcgcaatgcggccgacaacgtctatgtttctcactacttcaccgagagggaaggaggatacaactgtgaccctgtgggcttgaaagtagtggcgtagctttcttgatgtcatgattaccgcgtaaagcagtttttggatctgtggatatcttgtctttgcgtcgtggagagcttcgctgacatagtagactggtcgttgcaccttctctctctcgacaacaatgacagtgctaacggaatatggcgtggcggcaatatagagaaataattcttcattaggttgggggcaacaagtacaggtggatttgataggtagcgcttgagtgcaatgaatgcctcttcggcttcctgtgtccatacaaatttgtcttgctttttcagtagaacgaagaaaggttgtcctcgctctcccatcctagcgacgaacctgcttagtgccgccatgcatccggttagcttctgtacttccttgagtcttgtaggcgacttcatgttctcgattgccttgatcttctcgggatttgcttctattcctctgccagagacggggaagccgagtagcttgcccgatggtactccgaacgtgcacttcattggattgagcatgaggcgatatcatcggaggttgtcaaacgtttcccgcagatcgtcaattaatgagtcgcttgtcttggtcttgacaacaatgttgtcgacgtaggcctcgacattgtttccgagttggtcgctaagtgcgccctggaccgtgcgctggaaagtgtttcctgcggttattagtccgaacggcatcttaacgtagcagaataccccgaacggcgtgatgaatgttgtcttctcctcgtcctcttttgccatgctgatttggtggtagccggagtaagcgttgaggaagctcaacaactcacaaccggctgttgagtccaccagttggtctatccgaggaagagggaagtgattcttgggacacgccttgttgaggtcggtgaaatcgacacacattctccatttcccgttggccttccgcaccatgactgggttggctagccactctggatggagtacctctttgatgaaaccagctttgagaagcttgtcgagctcttctcgtatggcttgttttcgatctggtgcaaatctccgcagtttttgctttactggcttggcgtcgggtcgcaccatgagtttgtgctcaatcacctccctgggtacccccggcatgtcggacggctgccaagcgaacacgtcagcattgtcgcggaggaaggtgatgagcgcgagttcctatttctcgcctagtgatgccccaatcttgacggtcttgtcagggttggcactggagagtggaacgatcttgattgcgccgtccggtttcggcgtcttgtttgttttgctcagtttcttgggtggctcggctgtgtcgggtgggctgggcgtgtgctcgaccatgtcgacgctccgcttgtcgcattgcactaccagcttagcattcccttgaatagtgattgttcccttcggtcccagcatcttgagcacttgatacgcgtagtgagatgcggccattaacttcgcgagtgcagttctcccaatgatggcattgtatgctgtatcgaattcagcgacatcaaaggtgatctgttccgttcggaagttatttgcttggccaaaagtcacaggcaacgtaattttgcccaatggtttagacgatgactgaggagtgattccatagaagggttgatcggtgggtatcaactcgctttgtgggatccccatcgcgtccaaggtgctagcgaagagaaggttgattgagctaccgccgtcgatcagaactcgtgcgaccttgatattccgaaaagtgggttcgaccacgatcggatatcgccctgggatgacagcagtcttggggtggtcctcttctgagaattctatcttctgctcagaccacttcatcttgggcgcagccccctgccacgtcgaacagacttcacgttccaccttcttgtattctcgctttgagtatgccgcggaacctccgaagatgtgcgagacatggagatctgagtttgggtatgctgagtccgattcctgagtagccgcctcagcgtccttctcgaccacacgtactcgcttgcctttttccaatgccatgtgttttgcgagcgactttttgaagacgaggcaatcttctagagagtgtatgtctgacttgtgtatagggcaccatgttttcttcatgtcgctgccttgtgggtctgggcgcttgggagagtccgcgtattctgttgcgagaacatccgcttgagctttccttttcccactcttgcgatttttcttcttgctcgactcaggtgcgtctttgactggtttcttctctcctccggtcttcgaattgtcgttcttgtgtctcagtgcgtcgtccacgtgagcgcatcgatcgacaatttcgaataatctccgagtagtcgtgatgcgcctcgttgccaatgcctgggtagtatagcgatctctgacaccggacttgaaggcgcggattacataagcgtcggtgatctcggggattgtattcctgcactcattaaagcgccgaacataatccctcaaggattcatccgggttctgtgtcaacgcatgtaggtcgtcttcgatcgcgtggcgcttgtaagttccttggaagttggcgacgaactgctgtcacaggtttgcccacgaagaaatcgagtaggggggagatgcatcagccatgaacgcgcagagcctttcaatgcggttggcaaataattcgccaacacgttgtcgtccgctccggcagcgtagagtaccgtggagtaaacctgaaggaattcttctgggtcagtactcccattgtatttctctattgctcctggtcggaatctttcaggccatcggacatctcgaagtgaacgaccgaaagctctacacctagcgttgggggcggtgggttgtcggcgatcgtacgtccttcgtggatgtctatctgatgatgaggatgaggaagatgacgacgatgacgatgggtcgcttggttccggcatacgattacgaggacgtcggccgggttctcgagaatcctgtcgtcgtctcccgttgttatctcggcgtcgatctccatcatcatcgtcattatggcgacgtcctagaccagtatcgcccggcacccgccgttcgcgatcgtcgtgatcgtggcggttgtggcggttatcacggtctcggtcttcgctcgaacggcctcctcgttcttcgttatcgtgacgccgtgaagagacgcgatgtcgggaacggttctcattgtctcgtgtgtgtcgcgcctctcggcggccattcgggtgatcgcggagatcgccggtgccacgaggtggaggggtggctcgatgaggcgattcccgctgttcagggttttcaccatttgcatcgccagttggtggctgttccgggtgcgctgcagcagcggcctcttcgaacgcgttgctgaggttggtcactgattcctgtaaccgttctgtccatcgtgcgagatcgtcgttcagaacgggatcgtagggggtttccctcagtattgcgttgacggccctgatgtgctgggtcggtgtagtcacttgattctccgcttccgcattggcgcacgctgacgtgccggtctcgtcgatagccagtacctcgcacggcgtactcgttgacgatgagccatagtcttcgagcaggtgcaagactgatggttcgtgaggatcgatgtcgattaccccaacaaatcgatctgaaatcggcgtcgctccttgttccttgtcctcatccctgagggggatgtgtgactgctggaccttaggaggtgacgttttcatggcgctgagaaaggccttgcagcttgagaggtcgtgattctttgtcttgtgaataggacaatagacatcacgagttggagaagtacgctgaattccacgctctttgcagtcacgaatttcagcgtggatgttgagaaaaacccagcaggcttgcaaggtatgttttttagttttgtggataggacaccaggaccttgtcacctcggaagtcatcctcgtcggctcgtgattcttgtcgaaaagacaaggtttggccgcactaggatccttctcgggctcggatgtcgtcgacgttccgatctccgcttcggcgggaggatccttcgacatggagtcgtcctgggttgcagccactgcgttctcgtttccagccattgatagaccagccgagattggcaccgtggtataaaccgggaagactatttcgccgacttgtgtccacaccagcattgttgaagtaggaactccttggttaaggttggtgttggcgctgttgtcgacgaagttggatgacatagtagtagaaccttgagcaccaagtccccctacctggcgcgccactgtcgacaggggatacccgtagaccggatatagagggtattggggtacgctggtacgaggatctacgtaatacgacatcgagttggtagaaaacaaagattatactggttcaggccccttgataggtaatagccctaatccagttgatatgggattatatgatggaaaccacatgttacaaagggaatagcggaactcgacgataccgacgagatcgtagtcgagttgattcgactagatcacccggcgacttggctcctgtaggctccggcttcgtaggttgtggtggatgtgttggcggtaagattcgatgccttaggtcctcccggggggtcccttttataccgcaggtcaactggtctccaagtaggacccggagacatcggacccagtacgatacaatgacgacccaattctatccgagtaggactccttccgtctgtgaactccataatgaatttccttaacgtatgccgaaaacgtccgtatacacgcaagtataccatatcgatatgtaacgtatatcgaagggtggagggtataccttacccgtaaccctgacacacgcccttgccacttgaataaagatttttcgatttatttgttgaattatttttttccttctagctttcgagaggggattgtctacagttttttcctacctctttgaaaaaaaattgggtttacttttttttatatatttcatgaaaaagttgactctaaaaaaatctaatccagtttgaatttttttaaatgattttaaaaccgagcggcttgtgtcctccagccagtccgaaagaccgagaattttttttttcgattttgtaaaccctggtcatagctacttcaaggacgtgtctacaacgagaccgttctttgtatggtcataaccagctatctcaatctcatatctaattgctactagtatactcaaaagtgcatgtatttttttcttcttatggaattttctcttagattacccatccgatttacgatccgattacactattgtgttcataacaattaaatctttataacaagatctcacatcactatatttttatgaaaaaatagaaatcaattttataatatatctaaattacttttagattccattaaattacttcttagtcataaaagtaatttaataaagcttgatagtaatttacctatattatagaagtaacttaaaacaaaagtgaagtaacttgttacggcattaaaagaaatcttacattcatgttgtgagttgtttattttataatcatgtttagtcaatgatgtaatttgtgctgattaaatttaatttttatatagactcatgtttttacctccataacggatttacttttaatgtcgtgataaggttactttctttttgttctaagttacttctataatatatgtaaattacttttaggctttattgaatttacttttatgggtctaagaagtaatttagtgaaatctaaaagtaatttagatatattataaaagtaatttctaatttttcatcaaaatataatcatgtgagatcttgttataaagattcaattcttacgaacacaccggtgtaatcggatcgtagatcggatgattagtttaagataaaatcatttttcaagccggcgtagcgtagagcatcacatggcttccaatttggattcctctggatgatgccacgtccgtgaatcaccaggccatgtacagacgcaccagcgcttgtgggatcagacagccgatgagcgtgtcgcgtgataaggcaaaacagagagcgtgcgcgaattagatttcgccctacttcaatcatgtgatctttgatgaagttatagggattcttgtttgccgggttgtcaatgattcaattgatagcacctacttacagcgcggatcgtcaattttattattgtgccggcttgtatatttgtcaaaaggagcaaagatggtatccgatgctcgttcaaatagttttgtgcgtgtggggagctcagtattgtggttgtgctcgcctgctcacaaaaataaagtatctttgttcttggttgacatgtttaacgttctttctgcaacaataagattgtatgggtctcttaactctccgttggttatacccaacaacggtatttgtagagtattattatcgttagtaccagggtatatgtgatgagataaaagagccagtggacaaagatttatcttttatacagcttcgagtctcctatttacgaataatagctccactcctatactgaaaccggtgttgccattatatactaccaccgtttcatattataaatttttttgacttttttattgattaaactttttaggtttgactaagtttataaaaaatattataaaactatattaaatattagttttaatgaaactaattcagtgttgtagatattgctaatttttttctacaaatttgataaaacttacagaagtttgacttaaaaaatcaaaactacttataatataaaacggagggagtatcaacatcacactagtacaatatacaggatgggctaatctagtctctatcagcctagagacgcaaagctctcatatttggttgacagctagaggttaaggtagtcaactttcttgaataagaactcagtgatattggaagtagctctagattccttttatcggtttttatgactccgtattgaggttatatagttttgtgttgatctgtattgggttgccttggattgtcccctctttttctttgtgtcttgtatttttatcttcggatgttcccttgtccaaatataactagggaaccatgtatggatacgattcgagtaaccttgtagtgtctaagttagactctgtttctctttacttatccggaacgattttattccatataagatttggtatatggtgagttccaccaatgttaatacataaatatttccaatatcctatatccatgacactagcatgcgtttggtttaagggttgggatgggttgggttgggttgaacgtatttttcggtgtgtttggtttgagcacaggcgagatagatggtccctaacagagaatattcccataggatctatattgggatagtccataaaaaaactggctgaccaatccaacccacttttttctatcgctgtctcgctgatctgtgagttattcctttaaaagtaggatcatctgatcccttatgctaaatagatagatcggatcatcccatcctaaaaacacggatgagtccaaaccatatcaccttgtttccaaaccaaacacatgctaacagtaaacagtctcttatatagttatatttaatattatcatccatgtttctaaaaaaataatgccaagcaatacataggccggaaatatactcgatctgcaatcaaggaacaaaattggctctaatctctctcgccattttactacgagaaatggttgctacatgtaacatgtaccgggtaaaacggcggggacaaattaaacatctcccgttacagagtcctgtgtgggactagttccaaaggacgactacaacgaggacaaatcacaaaaccaacgaaatccaacaagtagtctacaaggattggtccctagctcgcactaaattccgcaccgccgggaaggtaacccacagtcatacaccgccgtgagactgtgccgtactggtccagaagatcacaaaacttcacatgcacttcgatctatctgctacagggaattgcagcttgtagcattgcgattttcaagctgatcttgtactgatgtactgaactctagctctgaatttttctagtctttcctccagttctccacccgattcggggaggcatatggcacgggccagcgagcagcgcaattacggtacagaaacccacctccattgatcatgacatggccgcgtttcttgttgcacatctcgttttctagttacgtcctcgtcaaaatgatggaaatgagcaactggtcgtggctgtctctccgttacggtgtacttaaatatataattaccgttcaatcaatcacttgtaattatagctgcaccatatcgtcctgtgcattgcgtgtttgtgttcacagcgtggccatcatcaatcatcataattaattcatgagtaagagaatgatggtgccagcgaaaatagttttctttaaacaaccctcataaaaattatactataactgtaagcttatagctaaaaaaacaaaaagacaaccacacgacacatctatgattagaaccctctactgaaaacagagggacacgacatctcaaagagaatggatctctacataacgtcttcaagaagaatatgacacttgagattatcgttgctgctcaccccgagacctaggacatggttttcactctaagaaatccatcagggagggtaggaaaaatcaaacaacaacaccccaagagaaaacgatgcccacaagcgtggccgttgcccacacaaagaagtcgggttttcgcctgttatttttctgccaacccttaccgaggtctcctcctggaaaaagaagccatcaccaactgtaaacctttcaacaagtagccccgcgctagcgcctccccaccagtcgcccatcaagtaggagttctaacatctgacgcgctccaaaaccatccatgtagttgagctaaacgagagggtgagagataagaacggatcccctctacccaacactagcccgccaacgtgtccatcttgtggcggcaaggcgccaccgcaagacgactagtgtgtagatcggagcccatggcaggactacacgcccacatcagggcaccatcgttgccgccacctcggctggactgcccactctcaatccacccgtctgcattgctatcgccttatcaagttgctccttgtcgccgccaacactgcctgccacgagccgtgacctctttttcccccggtcgcgccttgccgctccgatcccaccactatcaccatgttggagtcacatcacatctgcttgcgccgtgccagcctcctgccatcatcggctgtgccagccctcccgcgccacgctgtcgtttgccccgtagtgttaattgcagcccccgctaaattcgacgtctgtgagaggggggaatccagttgcgggggactagatccggtggagttagcgtcgaatccgttgccgcgctcaccgaggtgtgtagccgctgccggtttcgctcttttcccccacgccggagaccgagcctagctgggttttggccccaccatcgccttctcagcatgtcactcggcttttctagtagtgtgctccgacggcgacgtggcggagagggaaggagcgggcggcagctaggatttcgcccagtgttgcctgcacgtggacgatgcgggaagtgctcacaccaacgaaaataattgagtagatttcacaaaactatagatgttttgatccaactactataaaattacatatttaaaatattgtattgtaaaactacatgtttgatagtagatttgatgcatgctaattttttatacatcgatttagatttttaattttgtagcaaattactcaaagtatatatagttttaaaacttttataatccaacagtgcgcttaattagcatcgaatcgaacaggccatgattgttctaaaggaaaacccagcagtccattatgcgtgccagatcaagattgaggtagtgcaagtgtagaatatgcatgtgagtatctgtatacatgttaactagtggtctaacaattgaaaaagacgtatgtgtaccaattaaatggggggcaagatcgatcatgcataattaagctctctccggcatggattaatcaatggcacaatcattagtggcatgtcctagtaccaagccaccaaaattagttggaagctgcgtctagactactctagtgtttagcttgtttcatgtccaaccggccaaaagggacaatttggagccaacatatcatagtaccttaataagttttttcttttccgacaaataaattggcccaaattaatttgttgatcaatcaacatctctgttgtgaagaactagcactagtgtctatatcaaattatcaattcatgcggattttgatggaacaattaatagtgcaggctttttgaaaaaaaacaattcttttttatagtagcctaatattcctaggattgttttttaagagccgggttacccatggtgagctgtttcgtagttagtgaccaaaatcagaccaggaacatatatagccgagaaaacaaatgcagacctatcacttatactattattttgccttttccaaacctcaacggttgcaagtagcgatttaagtcatatgaaattgcagcttcttacaaaatcttctgttaccttaaatagtttagatttttcacctaaaattctgagtatacgtaattgtggaatctagaaaataaataagaaatcagaaggtaagaaacccagttttttcaaattatcagtatctactaattataagttgttccttagaatcttaattaagttcccaaaatggccttgattctgttttgcatcatcccgattccgatccattcaacgttcaacgggaaaacatttagtacgtttcgtgtgacagcgtgtcaagtaaacaccagccttgttagagcaagtctaataagtagacgattagccagcagatgatgtctcgagctgacgtggaagagaaaaagcgatgtgagagaaggaagccggcgcttctgcagccgcccgctaggcacgagcgcctagacgtgctgacagtttggacccatatcaagagaaagaaggtatttgacatgtcggtcccaccaaacatataaaaatacttatttatttgtagtagagtatgtgtacagagcatgctattatatgcactggctataacatcttgcataagcccatagcaggctcctctattatccctgctcttatactacagtactaattaatcagctagcagtagatgacagtagctagacaggattcgcaagtaagagatctatctcgagacaatggagcctcgaggaaataattggccgctccatgccatgatcgcggccggccggcgccggcgctataacgcgcatgccagggtagttggaagaaccccctggccggcataactgccagctgaataacttggcagcgcgcgatcgagggcccctcccaaatctcccatggttccatccatccccatcgagtgggtaaccggcctagctatacgtagtaggagtcagtagtaccccgacgacgacaaccacacgcgcgacgcatgcacgcacgctcccccgccttgtcagtgagacgtcgcgcgcggtggtaacaaaccgcgccaagccgaggggtatcgtgttgtcgcgcacggcagctcgcgcaccgtgcgatccaggaattaaacgcgccgccttttccctctcggtttctctccccggccgatcgaatcaccgaactgccccgtcccgtacgtacgtgcatgcgcgttgcgttgacgtggtctatataaggtcgccgcggcgtcaccaacttcccacacacatcagcatccatcgcagcgagcgaccgtcggcatcacaagccatctccctctctcttgtcttgtgatctagctcccgtcgcgatcattgtgatataggcatggccaggtcatcgtcgtcgctgctcgtcctcacggtcctggtggtggccgcggcggcgtgctccactacggcggcggcgcgcagcgtcccggcggaggagaagaagacggctgcgccggtggcggcggcggacgtgaagcagccggagacgttccacgaggggacggtgttgatccctgggctcgggcggttcgagctcggcagcacctacgtgccggacatcaccggagtcgaccacagcgtcccggcagccgagcacgggcagttcctccccggcgccgacgacacatgggtccccaaccccggcttcgaggtgcccaaccccttccagcccggctcgtcttctccctgaatcacccgccggctcgccgtcgtcgccgagctagctagctaggcggcggtttgccggagtaataatgtgtgtgatcccacgtgtccccgtcggtgcacggctgccgtagtggagtcgtttagtttttcaattgtgtgtggatgcgtaggatgcattcagatgtttggcttgatcgatcgcgtgcttttgttagctttgaactcgtaataatgtattaattggtgagtgattatgcaagagctcggtaaagtaattactgttcacgtactaaattaagatgcaattggaagctatacgtctgtgtgtattcatcgtgcaggcaggacggtatatccaaaacactgtgcaagtgtgcattggaggcaggaccatgcaagtacagaatgaaggcagctaggctacgtaccgcatactccatgttgtactcatcggacggtccgtcatcggatcggacgccttttcaccggcttaatttcttcgcaattttgctatatatttgtcgacaaattttcccctaaaaatttgacagatgtaattacagtacaaccgtaatgtaattacactgtaatttgcatgtaattacactgtaactataatataacttgtatgtaactttcaaaaaatctctccataacatattattttggtaaaataaaggttgtgggaacaattttttttcagatatgtgtgtactgtgattttttttcttcctcaccaaaacaaatctttataatagatctaataatttaaaattacgtgaaacttacataaaagttacactgtagttacatgcaagttacagtgtaattacatacaagttacagtgtaattacattacgattatactgtaattacatctgtcaaatttttaggagaaaatttgtcgacaaatgtataggtggtccccttcttcgagttgaaaaggagtaaagagagtagatggcccatgagagctgaggcccatgacagcaggattcgccggtacaaacaaaagggttggtatgtgggccatacggctcaggttttcggtaaacttagcggtccaaagaatgactctggtgaaaagtgatattttgataggatggcaatattaccaaaattttaatatgatttattatgtgtttatcaaagtttagcaaaaaaacctaaatgaaggcacatttttagcaactttgaaaaaaaaatggtatggttgaaaatatcatcaatctgaacagcccctaaattttggttccaaatttgttttgaaaaaaagttaaattggctccaattcaaaccaagacccctatattggaagtttataagcagctcatcttagagcctccagctctcctcatacagcctacattcttattcagattttaaggattgtattatatatttatatatatttatatatatatattctcccaacttctattctctcgtttttcatgcacatattatttataatgtgtattttacaaataattttataggaaaattgctttaaaaatcatattaatgtatttttcaatttttttactataaattcttactaacactaattcgtcgtgctatgagtatctagattttttttataactttcatctatctaaatcaaacagttgagaagatttgtcagtaaaagtttagtttgaaaattttagtccgtgtaacagtgctctcttttcagaaagcccaacattgtcgataatttcgctatcgcattaacgggcctgttagaccggaggcacgagcagttccacccaaccccaaaaccgaaacgccgaacgaaacgaatcgtaaactcccctgctgctacgcaacgactccccaactctccggccaccaccaccaccacctgttccccatccgcacgccacgcaccggcccaaccgattccccaccatgccggacggcgagcggcatgaggaggccccggatgtgaacttctggggcgagcagccggcgacggaggctgagtactacgcggcgcacggcgcggatggcgagtcgtcctacttcaccccgccgggcgggcgccgcctcttcacgcgggcgtggcggccccgtggcgacggcgcgccgcgggcgctcgtgttcatggtgcacggctacggcaacgacatcagctggacgttccagtccacggccgtcttcctcgcccgctccggcttcgcctgcttcgccgccgacctccccggccatggccgctcccacggcctccgcgcgttcgtccccgacctcgattccgccatcgccgacctgctcgccttcttccgctccgtccggcggcgggaggagcacgccgggctgccgtgcttcctgttcggggagtccatgggcggggccatctgcctcctcatccacctccgcacgccgccggaggagtgggccggcgccgtgctggtggcgcccatgtgcaagatctccgaccggatccgcccgccatggccgctgccgcagatcctcaccttcgtcgcccgcttcgcgcccacgctcgccatcgtccccaccgccgacctcatcgagaagtccgtcaaggtgccggccaagcgcctcatcgccgcgcgcaaccccatgcgctatagcggccggccgaggctcggcaccgtcgtcgagctgctgcgcgccaccgacgagctcggcgcccgcctcggcgaagtcaccgtcccgttcctcgtcgtgcacggcagcgccgacgaggtgaccgacccggacatcagccgcgcgctgtacgacgccgccgccagcaaggacaagaccatcaagatatacgacgggatgatgcactccatgctcttcggggagcctgacgagaacatcgagcgcgtccgcgctgacattctcgcgtggctcaacgagagatgcacgccgagggaggagggcagcttcctgacaatacaagattagtatccaggattcactccactctattcagattattgtgaagtagcaaatgcacaaaaagaatgattaaatgtgcaaatttgcagtgattctatatataaatttgatgaacatttgcagtgattctatatataaatttgatgaactgctcagtcaggtttacatgatttatggtataaaatatgctaagtctcctgaccaatgaaagaatgtttccagtttgcgaagcttgccgttgtatcagctctctgccggcgcttctggaggcagtacaaggcgctctctaccttgtacaagcttggcagaacgaattatatctccagttttaatctgcgacagaacttctcttccatctgtggtatacctgcagatgtttgatcgacacagttctctgttgttaatccacaaaataaaccaagtttgctgtctagtggtcacagttctgtaatggcaatcactacttacccgaatactgagaattgcccttcatcaaaagatattcctcctaaaccagactgcacaagataaaggaaaataatcacaaattaaaatatttacgcaattagttcttatacatagggcacgctatgggtctagaaaagcagaagcattcagaaatatggttcacaacacaagaggtagacgggtgcactgttgaggtacatgcacttatgcaatctgaatttaaaatactgtgctagcgaatatgtctagttctaaagatatatccatttactcacatttctcttgtcatacagatagaagaagaattggcttggtgacgagtattcatcagaatccacactatgggccatagcaacggcaccatatacagacatcggaaggactggcaattctccatcctgtattggatcaagtaacaaaggaactgggttatgacttacgaaagacggtaactctcagatttcactggcatttacagggtagtccagatgagtgggctttctttaatatcctttttacatacacttccagtttgaactaaatcgtaaggattttgattgatgatttagatccaaataccccttcagaacagacctaacagtgtggaatactgacctgaatacttagcggagttctgtataacggttcaaactgcccagcaggcatgacctctaatggaacagtgtaacctttctttccattctcgttgtctgcaataattgcctgacttgcacatttcagttttatcccatcatatgccccatccaacacctgaagaaaagttcatttcattggatcagatgatgtaacctaactactgaaaagaaaatcaagagctagtaaaggaaatttttttagcacatcgcagaaacatgaaatcttaaattgatgttctcgaagatgttatgtcgatgaacacaatcatttcgatgatctttatcatatatgtcagaaggcagagctattggcaggaaataatcaatagtgagatgaggttggagttaagctaccttaccaatttcgcaaagtttccagcagtcagtggggcagaatatccatcaatcactacctggaaattagtaaagaaatcaatagctgacacgtggaattttataactgcaactgtatacagaaccatactcttgcacaccatggtatgacaaaagataacaaccaaggataaggttcttatttctcaatgtcaaaagactgcagtttatgataccagacaattacacagccattcaaagccacctgaattgtagcaacactttttggttcaccaccagcagttggaaagaatgttgaaccatcacctttctccactgagaattcaacaactcctcttcctgctagcctattaaaagcgagctgtttaaattaaatgtacaaatgaacatttcgttacagactggaggaatgattgcatgcttaatataagtgccacagggatggaatgttcaaagcaccattacacttagggcctgtttgggatgggagggacttattttagtccccctcccatccaaacaccaccttacataatctgctaatcagctacacatactgagtgtattgcttgtcagcgatccccctgggattgaaggaacactcacaagaacaaagaacagagacgcgaatgaatttggcgctgcgcaatctcactgtagcttttctcagttttctccactgttgtttatacggattacaggaggcccaaagtagtttccattgaggccttcatgcacatgacacgttccaccgtgtcgtgtgccatcccacatgatcagaatgtgccgggcgcgacaaggacacgactcgctctggcgcaaaagtgcgcacctaaaatggacaacttggacaacaacctgggcccatacttcaccgaccccaaagacccaaaacagaagaaaaacaggggacctaaaggacgactaagtaaactaaaaacatgcgctcaaatttaccgacattgctgctgaagcgatcagccaatcagaacccaagaaaaattcaccattcctcaagagttcgaaaagaaaaatgcttgtgaggttttcttgccaccctgtaccaatctggccttaatgattttataatactatgtgatgatatatgttataaataaaaataagttcccacttggaattaactagaaagtactttttattcgacagtttctactccatgaaatatatgaagggtgacaccagcaataaatagtgagtttgcaaatatgataaaatggcaagtttgtcaaaaccaattaatttgcaacaatggaaaaactggtaagttttctattgaattcattttgaaaacctactaatagcggcagctttgattattaccatcaagaacttgggggcagagacctggttatcttaaaacttatactgacatagagcttatacttgtttgcaggacatagaaccatgcatgtcagtaactcagtataatcaaatgtcaccttcaatcttcggacctatctctgcccttccctcacaataattctagagacaaagaaacatttagattttaagctttggagagatcaacaaaagttaccttggatattccaaatattgttgtggtaagaggaaggataaacctggagcctgttgaaagaaatttccccctttaagtaatccgatcatcgccggagtataatcatcctcctttaaacataatgaaacttctattcagtttagtacagttacctgtaacagctccaattcagcaacagtatcaagagaagaagcaagtgcaaccgaaagtctgtcaggatcattttcctttatatatttcaagagagtttgcaaaccaccctgcagttgattccaaagtagctcaggtataatttataaataagtacaagtgaaaaccagaatttgatctgtttcataaactgcaattcaccatgagcacatcctagaacctactgaccttctcttcaagcaaggaggtatataacttcgagcccttttccttgagttctacaggtatacttgccaagatcgcatccttgttgtccattgctatctgcatccagagcgcatttgttctatatatcagcattcaggacaacagctcagcaagttcaataagaagttcacaatgcatagaagaagcaaaacattgttgctagaaaaatgcttatgaagaagacacagagtcaacttattaccttcatggccttttttacgtctccttccatggagccatacggcttcctctgcggtatcctcagcaaatacgaaatgtcctccagcgattcctggcaaatgggctcgcacaatctaagaacaacgcccagccaaccgtactaagcgatatgcatcgccgccgattctgatgcagtttacctgtatggtcttcatgtttgggttcgcggggatggccctcctcagcgccagctcccccgtcctcggcacgttcgtgtccggcgagtagaggatcgcgtccgccgggagcgacacggaaatctgggcgatgacggcgagcgccgcgaccgcgcccttgagcagctccaccactcctccctcctgcaccaaaccagacaaccacacgattaaactgaagcgaacgctacagctttggaagccatttggatgaggagagaccagcaaccagcgcgtgctcacctcagccgcgcaggagggatggtccgagcgacggtgggaggagcaggagaccctcccgcgaatgccgccgtcgcagcacctggcgccggctgcgaccaggggacggccgggaaacacaggaagggcaccggcgagcaccatcgcggccgccgctcgcgacgccatggcgtgcggtggattggtgcgggagcgcgggtgcttttgaatggatttccggtgggttgagacgcggggaggggaggaaccggagatgggggtggtggtggggatgccgttgctgccgtcgccgtcgtcgtcgtcatcgtcatcgtcgtggtcgccgtctcgtctatccccagccagtgagctgtgatccggttccgaaccgcctagttttgggccagcggtgaacggcccagggacgatacaagagcccaaagcccaatactgtcccgtaaagagacaaggctgaaatgccttttgcggccctgttacgtcaacgaggcctgagatggtaataggactgcattaatcacaggttttcagactctatcccaaaagaaagcacacacacatatactgccatacccagattcagtgtactttccactaaaaaatcgaagtgtattttttctcttaaaaaagactcacggtgtaaatgcttaatgatcggcaggtgatgtagtcacaatcatccctctcttaaataatattactgctaggtgctgtagctaaattaaagactgaaataactcagaccacggaagtagctggagagatctattgacatgcacgcatgtcatgatcaccgcacgagcgtacagccgcaacccgcagacatgccatcatcccgcaatcctattccaaccagcatccgagcagcccacccggcaccgcacgctcacgtacgcgacacggtcacgttcgcgccacgctggacgccgccgccggcccgccgccacatccccgagccccagaccaagtgccaacacctcacaccgctccgctcccgcaccgcacggccccaaagaaaccgtttccatcaaaccgccttgcggttgcagctgccacctcgccttgccggcttgcccccacccgcccctctgtccaccgcgccgtctcgccgaggttgctcacgtagcgcgcgctttgctagtactagtatcgaccataacttgcgtaaaatccaggacggtttcatcagtcacactaccacccacggaccacagtagtattcggcgcacgctagctatgacctcgcgcgcattgacagcgtcgtcgttggggtatgctgcgtgtgttaggtgctctcgacagcgcgggattcatggagcggtggcgctgatcggggcacgaggggtgctccccgtcctgcatgccgcctcccttaaactactagtactactactgctcgatcggcacgagcggtttttttcattcggatgatgacgacgacttcagtttcttctcgttgataggttaagttagatcaacgcgacctgattattgttttggccgcgcagcgctataagaatggtggtggcaccgtaccactcgagggaagttagcttgcacgcaaagatacgtttaagatggcacgaagctagcgtactagtagtgactgtagtagtacttactgtttcaataattgttttggataagtactaatgtagtggtagctcgtatgtgaatagtttagtagcaagattagtacgctgtgattgcgttcggtgaacgaggacggccaatgcaaagggcactaacatttgtcttgacaacgaataggtggcccatcattgattgctttgttgacctcgatcatccggaaccgtgctatgtcgtgacggtaacaagcagaaacggacaaaagctcttagctgatatgctacctagcttcctcgagccctgcctccgtccgagctccagctgttacgacttgcgagtactccgaacaaggcatgtgtttgttgggactatggggttgattggttggcatactcacattactaaaacttgctatacttcatttagctaatatgtctaacatgtggccaataaaattaaagccacacttcagtcataggagaataaacttgccacacttttatatgccaatgatatgtgggacccacatcatggtgaatgaatcttgctaaacgtatggcaccaaccaaatgaatgactaattcaaacatggctaacttgagttgtggcatgatgaggcaaattgtggtagtgaaccaaacaaccccatatatattctagtctcttttaaactacagtattcaggagcaacgaggaagagtacttctcggtaggaacggccgtatctatactttctgtttactactctctccatttctagatgtaggtaaccattttcggtgtaaatgagcacaagatcgaggaaatagcccatatctgttagaacgtactcgtactgtacaataatagaaataagcaatgctgtagtactgtgtaaggggg

SEQ ID NO: 9368 - DNA, 99336 bp, Oryza sativa
cccctatatcgaccagtatgccggtatggtcgtctactcgtctcatgtttcatgctgcgagcctgcaaaaatagtagtggccttttttactagcacgtttctacatcgacgacacaccacgtggccatgcctgcaacagtgcttagatggagattagccatgatcattgttactatggtgttcaagtgaataggggcaggggtgaaaacgagagggggaaacaccggagcaagttaccgaatgttactagttactacttactatttcctccgtttcacaatgtaagtcattctagcatttctcacattcgtattgatgttaatgaatctagacacgaatgtgaaaaatactagaatgacttacattgtgaaacggagggagtactcgtgtattactttcgtccacaaatatttttttagctacatacattcacaaagtaacgagagctacattaggtttcatgtggtgaaacctattcatctaagttaaagttctaaatttaatatagacaagaaaaaactacccatacgttacaataagtgaaggctattttaatatattattgttagaatttttgtctaaaaaatatatgggatttttattttgatagtattgatatctaatttggaacccttattaagatgatggtcatatcatgtacgcctgacgagaattctaaagcaattaagaatcagactcccatcctaggtttgcatgtgagtttttttaaaaaagatttcttatatgactccttatatattttcaaaagcgaacaaacttagaaaccaagtcaaatacgaataacatgctaaagtatcagcgaaaatatttttaatttttataataatggagaagagatagagataccaataccgaaagagaaaatgaggggaaaagagaagagattgaaagaagagggagagaattaggattatcgggaaaaagaaaaagagaaaagagtaaaaaaaaagacagtcaagggaagagcacatgacttcgagtggatgcacgcgggatggtacgggtcgattgggttgtgttgggctaggagagggatgggtgggattaggctggggaggaggtgtacagtactccatccatctacttttgataggtatatttccaaatctgaaaaatttacttttgaaatgcatattttaatccaaccacctatcatcttaatgactttctcggatttaatgcgtgactttccattctttcacataagactggttacatgggcatcaagaaatataaatattaatgaatcgattgtttacgatgaataactagtaacatgtttaaatggatgataagtagaattacttatccttggtcattgtgtgaaatatgactataaaaagtagatggatggagtagttattttaggctcgagctgaactggatgcggacgacgtacaacctagacaccgataacgaaataaaattccgacaaaaacatcttcaaattttataatagtagatatatgatatgctctcatttacacataaacttttaagtaattttaagtttagataacatatctgttaatatctgttaacagtgaggtgtttatggtaatttcgtcaaatttaaaatatatccatttagtttcttacaagtgctaataatgtgtccctgtattcacaggggattagtatgcacacatgtatatgaatttgaatatctattgtattgtgcttgtatgagaaaaagacgcatggtcgtgtcgcttgtatgagtatacgtcttttaccctttccacgcgcggagcttcgctagctgtattccggctgtacaacgttggacgcacggccaggggaagaagagtgtagaacacgcggtgcatgcgatgcgatgcgatgagctcactcgaaccgcgaccgatcgaaacgaccgcgcgcatgacgatgacgtgcacgcacgtagcaatcagtcaaacacagccaccaaaaaaaatcacagcataatccaaaattcgtcttgcttaatttatgcctctactttgcattactttacagcctgtgaaagtgagaacgaatgtttttgtcacctgcatgccgctgatatttgacgcggccaaaacacacccgtctgccaaaataaaaccacacgtttttccctctacgaaatactacaaccgtccaaaaatactcaacttaaaagaggatgtaacctcttctgatacaatgtatttagacaaaaagctatccagattcattatactaagagcaagtttaatagtatagccaactaatagctccaatttatctatagctaatctagtagctcatttatacaatagttacgtactacactattaatacctggtctcacctgtcatacacatattgcgtctcgaagtccgtgctatagctggctacaaatgtatagcccgctgctcttctctctccttatttatcttattaaaatatgtttgcagctggtttataatctgctattgtacctgcttaaaagacgtggttgagtttttttaagaacgaaaagagtactaatcaggaaatttgaatttggttgtgacaagaaaaggatcttgttatcaagggtagacgtcatgagattgagaaggatcacgacatgtaaactccatgtcagtgactcggtcgcaatttcgcagtgcttaggtggtctttgaatttagggatttaactttagttttttatttagacactaatttagagtattaaatatagactatttagagaactaattacataaatgaaagctaatttgggagacaaattttttaagtctaattaattcataattagagaatgttttactgtagcattatattctaatcatggattaattaggcttaatagattcgtctcgcgaattagtccaaaattatggatgggttttattaatagtctatgttaatatttataattagtgtccaaacatttgatgtgataggaacttaaaagtttatagtcccatctaaacagggttagactatagattttgcagggggccagtgctggatacaacggaggaaacaaacaaagggaagagatggcaggaggtagtagtagcaaggatcctctgtaacaaccatatctacaacgatcgttgcagattcgactataatttgactggccccagcaggcaatggatgctccgagtggaggagcagggagttgcaatcatgactaagagaaagctaataggatttgtcaagtttgaagattttcgaaagagatgtcaagtatatatgaaaggcaatactgcaaaaatctaaaaatgtgccaaattaaggtggtacattctctcatacaatttatgcaatatctgatcaaataaagctcgaactctaagtagccgatgtattagaagattggaacccttgatggatttccctttcgatataatttggttaacagaatttaggtcgaatgtccataatctcctaaccttagagcatctgtagtgtgaacaaaaaatcgattttacgacaggagaaccaaatcatgcacattgtagctgtcgaaccgtaggtgtcaaacaacaaatcgaactccacattggagtcgaactgaaagagtaaattaatatactgtgcatgcatgcaggtacggttccagtgattggctcattccctttttacagatcccacaaaacaattttaacattatagctatcaaactgaaattttgtttggctcttctattagattgatcaaaccaaacactacagatgcccccagtgcctttgccaactgttagataagtgtagaattttgctttcacttttgaaatggaagtacactaatatatttgggaaatacaaagcataacttttaaaaaggccaaatgcgttttacactaaacttagctggtgctctgctccgctcacagaaggtgggtacgcagaagatcattgcggcagggaagtagtagtaggtcatggtcaaccttaaccataccctaccatgacagcagcagcccaggcccatcaatcgcccacaggccctgcaggcccgggcccactcgagcagaggggcactgtgaaaaaggcccagtcggccccaccacgtcatggggcgccatgcacgcaccggtcagacgacgcggttgtcggcctggccggggtgcccagccacgtgggcagcccgcgcgctaccgacagcggccgtgacccgcggggcccggtggcgcgcgctctcgcgcgcgcgcgacgtagttgagaccacgacgccgaccgatggcgagcgcgcccgcgcccccgccccgcgcgcgcgccgcgccagccaccatgcgacgacgtcgtacacgcacagcgcgccccgggcgcgagcgcgcgcgctctgcagcgtctccgccgccgaacgccatgccgatcgatgccgccgggcgcgcacgcgcgcgcgcgtcaccattgtgatcatggcgcgcgcgacgtgacggcgacacaagccaatccatcgctagcgactcgcttagtactattaattactccactaactagcggcatgtacaagaagcggtaggagaaatatcgtgtttctgtctaatcttttctgtggttgtacgcttgtttaatcctccttttcgtaggagttaatgacgatagggctcgatcagagaataaaaattgggttggtgcgctgatcactttcgcggcgagtgttgctgacttgcagcaacgcgcgccacttgccgccgttcggttggcctccgcggcgggggatgataataatggataatgctttatgcgagatacggctctgttggttttgcatttctttttcgttagggtggtgagtgcaccggagccaataaacaggtttaggtggaggactcgtgtttttttttaaagctcagccatacgcccatacgataattatttcatttgttcttttagatgtgcctactagttcgtgctagtaatctatagagcacttcaggactagatagcgagaaatctgttttaagagatcaacacgacacccctttgcatgcgaccttgggcgagtggctagctaagcttggactggttcctaagattgccactaaaaacatgtgtcaaatggttgactgaatatatatgtaaggtgtcagacttgtctcaagatataatggtgatgagatccttttgggacgcacctgatcgattctatgaatggactacaactcttttgaagtagcagatcatactagtgagcaaacgcttaataatgtcactcattccctccgtctcagaaaatacaatctaagataggaactgttatatatcctcggacaaccaatcaagacaagcacttaatccagattcgttgttcttgaatgcgtcacattctattctaagttaggttttttttatggagaaagtactttagattataaacaaaacgtatataatgattgagacagctatgtaatatcatttatgtacacagccacatcaactaagaacaaataaaaatggcatgtacaagagacaatatgatatctaatgtcactcctctcaactgtttccttgtaccctatattatctgagatgcctctttgcaaagatacatctcctttctcttctttctttatccatcgacacttcattaattaattgcaatgagtcatatggggtggggggtgggggggggatggaggaactaagaccaattaaggactaaaaatatctagcagtagctggtctagagctgattactggttaccaaacgatgaattcagattttaaaaattcgactattatggataacctattcgatttttatattactgcaatgttttccctccaactcgtaattcataaatagtagggctggccagccagttggcaattgggagtccaactcagaagacaatattgtgcataattcagttggcaattgtccggttaattttattagtaggacaaattcgttatgccagtggcacctagttcggtaacaaattttggtgttattgtagaggttggatatagcgttttcatatcaaacactcaaaagtagtttagaggttttcccctgtgtggatattatgggtaccccatacccatacggcatggttatccgaccagtcataggggataacttatatctatagaatatgtaatagatcatgactcgggtattacgtttccttatatattacggaacagcctaaagtcctggtttgataatattgtaaagtagatttaggaaaccgataccgtattggttaaggtttctatcttgtaatcctgccccccaccctatataaggtgggcaggaggccctctagggggcatgagacaacctgatcgtcagatctataatacacccggcggattcaaatccccaaacaggagtagggtattacctctcattgagagggcccgaacctgtctaaatcctttgtctccacatccatccacttttaggtctcgtgcgctaccccgttttattattgccgaaatcatgtttcgacagttggcgcgccaggtaggggttgcgtcgagtttcctatcaacgagcgcgatggaatcaatttcatgagtcgccgacttcgctttcgctttgggagttttcacttcctttccgtcgaccacttcttcaagctcctcttctctgacttgatccaaatcagtcagggggaaactcaatctgatttttatcattatttatcatattgatttttaatctcagattaatttcttgctattttttgttgttgttcgcatataactacgcggcactattgaggcgattgatgctggtcatggactcgaggcgtctcagctttccggtcgatcggccgcgagtccactccgccggcttgtcctcgccaccgccattgctgatagcaacaacgacttcaccgccggcctgcctccgtcgccgccgactggtgtcatcgcctatacggttggtcggtcacaccaccgttcatgggcgtccatgtcttcaccgaccggctggccttcgccgccgccgactggtgtttccgcctacacggctggcctattatgccgccgctgttgggcgtctacgacttcaccgccggcccgcctccgtcgccgccgattggtgcctccgcctacacggctggcctattatgccgccgctgttgggcgtctacgacttcaccgccggcctgcctccgtcgccgccgagtggtgcctccgcctacacgggtggcctattatgccgccgctgttgggcgtctacgacttcaccgccggcctgcctccgtcgccggcgagtggtgtccccgcctatacggtcggttggtcacaccaccgttgatgggcatcgtcatcttcaccgccggcctgcctccgtcgccgccgattggtgcctccgcctacacggctggcctattatgccgccgttgttggatgtctacatcctcaccgttggctcaccttcgttgccgtcgactggtgtttccgcttacacggctgacctattataccgccattagtgggcatcttcgctttcaccgtcgaccgccttcgtcgccgccgactggtgtcttcattattattgatggacgactttgttcccacattggccacttctgccatcaccaaggggaatattacaaagctaagtcatcatttattttattctttatatgatatttttccttttcctctgcctcactacaccaattggtcttccattgagtagtgagtcgggggctacagatgttatatcatattttttataatatttatcttgattgcttgcgacataatctgagtacaaaagtacctatcgagttatggagttctatcttcctatgctttccgtttggtttgccaatggatggttgcctttgggccgattcctaacacccgggggctcgttggatggaccgagtaacgcaaggtgctaagtattactcggaagaaatcaaaagcatagagataatataatttattttctgctcttaataattgcaaaagtacctgagtagtaaattctgatccgtgaaactttgttccattaatgacgaactcatgtcactcatatgcatgtttgggaaatgcctaggccgactcccgatgcttgggggctatgactagtcggacagagtgtttaaacgtacagagtcatctgctcggggaaatcaaaattgacaagaggagaaatacatatttataaatattttaaaatacttgattttttctcgagtattatatttatatcagatactactcatcctatatgtttgttctgcaggatccagatccagatatgcataaaagggattcatggctttaagcttatctcttacgctccaggaatggatcagtcagaacaccaccaccggctcgcctcgaccgccgccgactggtgtttccgcctgcacggctggcttattatgccgccgttgttgggcgtctacgtcttcaccgaccggcttgccttcgccgccgccgactggtgtttccgcctgcacggctggcctttatgccgccgttgttgggcgtctacgtcttcaccgaccggcttgccttcgccgccgccgactggtgtttccgcctgcacggctggcctttatgccgccgttgttgggtgtctacgtcttcaccgaccggcttgcctttgccgccgccgactggtgtttctgcctgcacggctggcctttatgccgccgttgttgggcgtctacgtcttcaccgaccggctgcctcgaccgccgccgactggtgtttccgcctgcacggctgacttattatgctgccgttgttgggcgtctacgtcttcaccgaccggtcgccgcatccgccgctgactggtgtcaccgcctgcacggctggcctgttataacgccaactgatgctatcttcttcacggctggctacatcgctgtcactactaataggcatcagtatcttcaacacaagctgcctacgtttgccatggctgccgactggtttcttcacttccatggctgcatgattctgccagtgttgattggccttatcttcttcaccgccggtcgtctcgtctgctgctgactagtgccctcacctctacgtctggtttatacagctaccactactgatggacatcatcgtcttccgttgccgactggttatgccgccgccgactagtgcttttatcttcacaactgcgcgtcttcgctaccagtttgcttctgttgccgccgactcatgttcacttcatcacggcgatgcaactttgtcatcatagtggagcgacttcatctttattatcttcggcactggcaaactctattgctgctacttcgcaagttttactacttcaccaaccacgacgtctttgtgaacctcgacatctcggcatgcaatgccatgatattttactacaacaagtgactctccaatattcaggatttctacttggacaccttcaacacatatcttcaatcaagcaatgactactcgacgacaagaagctataattctcgactctatgttcagttgtttcccaactaaccaaagagtcgggggctacacaaatataaggctcaaaatttgacaaattttatgtcaagctgaagaaatcaattaatcagccaatgagtcaactccaggagtcattatcttcatctttgcttcggaacagacattctacttcaacaacttcaaatatttcggtttagacgagttgggcaacaacatcaactctcctccaattatttgtcttcacggttggcctactacgcaactgccgatagaggatctcatcgttatcatcggctgctacatcgctattgactggatcaccgacatcgtcatcttcatcaacatcttgtcaagcctcatcaacatagcctactctgctgccgttgatgggaaacttcgtcatcatagtcggctatctctgttgccgctaatcatcattaccgtcggatgcgtttgtcgccgccgattattttcttcatcttcatgattggtggatttcgccatcaccgttgatgcgcgtctacgtcttcatcgtcggtttgcttttgtcaccaccgactgatctttcgttgttgttgggcgcctacatcttcactgctagctgacctgactgttgccgactggtttcttcgcttccatggttatgcaacttcattacatttgattggtggcatctttactaccactgacatcttccgttacttctgatgagcaatttcgtcttcatgttggtcatttcatctccatgccgactgcgtcagctattgccaatagacaattttgactatgacagaaggacaagctatatgctcaggggctcatcagctcaagcgtgaggattatatctccaatttggacttgttccggatacattccacatggattcatagtcatgagtctattttctatgctcaaagactggaccaattattattccccgtaagggctatcaaccgaatacttgcgccagtcgggattcaattattatatttattttggagtatcccataagggataatcattcagatcagaagctattcatatgagctacacttggtctatattacccagaagatttattactcgggagcatgttacatgcgtcatcctttaaagggtgtcgaaggcatattttttggcctaggcctaatatgtctgcagcccatattttcaggtgtggcctgtcacgttcttttagggacttaggcactttttgcttaggccaaagtgcgcgtgatcaagtgcccaataccttaaaatccttttataccgcagttacttaactttttaggagttggtacaatgcatcttaaaaggtgtcaaacagtaaagctttatatagctgtcccgctgacttttttatatataagtcaaggtgctgtttgggtttttaagcaattgattagatacaatatcattgcttttcgccacgtaagtgtgcatttttattgaccaatgttatggcttaggctgattatatattgtggtcattttctaggcggttggtaaatcctttatgagtttatttactcagattttacaccacatatgccatatatttccaggtgtggtgaaaccatgtgtcttctagggacttaagcacatctgttaaagcagtgtgcgcatggcgtatgcccaatactttggaaatttctttattcacaatatacaagcttctttatagctattttgctatatcactcatcatattttacaaagcagttggtatatcactcggatcatgttatttggaggattcacaccgcatatgctatatattgatatcaagtcacttggttgattacgattatcaaaaccactcggttggttggattatttattccttgactatatgcttggtttgttcaattaaccacattgtcgggggctacacctattaggtgcatctagtcggtgcacctgactttattttccagccctccacagtcttcagatttggtaaaagtactcgggagaccatgacaaagatgattgaagcactcggctttggagtaatctggttcgagagaagattatcttttcgactgcgaaggtctcaggggctactgtggatattatgggtaccccatacccatacggcatggttatccgaccagtcataggggataacttatatctatagaatatgtaatagatcatgactcgggtattacgtttccttatatattacggaacagcctaaagtcctggtttgataatattgtaaagtagatttaggaaaccgataccgtattggttaaggtttctatcttgtaatcctgccccccaccctatataaggtgggcaggaggccctctagggggcatgagacaacctgatcgtcagatctataatacacccggcggattcaaatccccaaacaggagtagggtattacctctcattgagagggcccgaacctgtctaaatcctttgtctccacatccatccacttttaggtctcgtgcgctaccccgttttattattgccgaaatcatgtttcgacaccctggttcttctaaatgtcctttttccccattaccgctatgatccggtgtaactgcacaacagttttaaaattaaacatttaccaatattgtgtctgaaagaagtgcgcgagacttaacatggatttgaatcagatgtgatagtgtgactgcaatttatgcaatctatgaccgcttattagattgggtccaatggtcaatatgcaccctggtagtgtagatcactgtggcaaaaattgtttacttttgtgttggcactgtagccaataatctggttcattcatcaacaaaatggatatagtcgcaattgcgtgccatagcttaacttgtaggcggctctattaattcaaattgtgccttaacgtagcatagaggtggacaaaaagcgcaaagctcatggcttagatcagcttgtagcgatctcgactcagataggctcgaactcgtaatcttaatgagtcaggccaggttagatttttaactcataaccttaacgagctaactcgcgagctcctcgtttagcttgttagtacaagatatcaccacatctttatatacttagtacttcttaactagtgcttagatttttaattacatcaaaattattcgtatttagtgagttcttcattagtttgtgtttattattatgttaatatatgataaatttgaaattatcgatatgatataaatgagatagagcttgttaacgagcctaatgagcttaacagctcacgacccgaaccgagctagtcttttagctcaatgttaatgagccgagatgactcgtactaagataacgagttttaacgaattgagccttaacgagtctagctggttcgttatccagccctatttagtggtggctaacgagccaactcggctcgacttgtaaaaactcgttaagttagcgagctagctcgggttgacttgttaacataatgagttaaaaatggaaagcgactcgacttgttaaaataacaagttaaaaatgaaagcaactcgacttgttaaaaagcccaagtcgactcattaaactcgttacatcgaaatacatggtttaaaattcatatacatggggcaaagcgaagtttgtccctcgcgtcgacctcgcgcggcggctcgggggcgaaaccctagccgccaccgcccctcctcctccctcctccctgcttcgccgccgccggagctcgtcgccggcaaagccgggcgacgcgctgggatggcggcggcggggtaatctccctcgactccatctcgccccggcgcgggtgtggcgacgatggcggcgggacggcgaggtcgcggcggcgggacggcgaggtcgcggcgatggcgtggtggtggggctccccgcggcgatggcagcgcggcggtggggctctgcgcggctccgttgagggcgtcgccagatctggtagccccgccagatctggccggggtacgacggcggcgcggcggcgggtctcggcgtggccggcgacggtctcggtcgacgccggcgccctcggacgtagcaggtggccagcagcttcggcgcggtttcatcggcgacgacagcaccgggtcggcggcggtgctccggcgccggctgccgcgtggtcctggccaggggctgccggcctgctgcggcttttgccggcgacggggaaggcgcctccatctccctccctcctggtcctccagatccggttctccccttcttcagtggtgtttcttccggtgctctctgacggtgcggcgtccgctcccctcttcttaggtgctcctcccttcttaggctaggctgcttccagtcgatgccggggagttccgtggttcggtaggggtggcgtgcggagttgtttcggcatcctgttcgctggtcgtcggccgcgccgttgtttccctgcagctgggttcctgggtgtgaggtggtctctggtcgagctgcagggttggctgttgaggtggagttggagctgcttgtcttgcaagctcggcaacgatgaccctcaacgaacgtcccggcaacgcgacgagggttttgaggtggagcagttcgagagagccttaggtgaaaaccttgcctagtgtcgtaggctctccagaccttccattatatttgagagatgaagtgaataattcaagtcatcaaacaagcataatgaaacatccgacgcctcgagagaggaattttggagacattgctgggcccttagcctgccagtcaacttcagcctgagatgtgcccgtcaaaccactcaaaggcggcgaccagatgtgttacacattcaggagacttgacaaaaatggctaaagatctacaacctctcaaatattcctaactcatactcatgtgaatctagttcccaggatgtgcactagattcacactttcatcttaagcatgattatacatagcaaacacaactaagatgaaagaaacttaagacttacaacaacttaataattacataggccaaccggccaaatagacttattagagaacagcggaagcttgactacccaatcacaagcacaccgactaggggtttaccctattaagttctcatcctagaagaagcaatcggaacccgcatcactcaaagactaagactaaacctgcaaacaaaaggttatatcaacagcaagagtcagtacattaaacaagttaatgtactggcaagcacaagtcaatcctactatactacatgtaaggcatatattcaaaggaaggcaatatgtagttcaatttcagcatatagcaagttttgttttgcaattcttttgtaaaggaggtgatgcttcaattaacaaagacaagttttaagtttcattattaacttcttcataattccatcataaacaatctcttattgccatacttaacaataagtcataatgtatcaccacatacacaactcaacacatttatcaatttcaaaccaatgtcacatgatcacatttttaaaacatagtctatactcatgacacatcaccaaagcgctcatgaccgtgagcacggctaatcgattagtttaaagaactctgcagagtttgtacagctttacccacatgatatgaactctctagtttgttttgagtttgcaagactccaccacactcttcatgttgaatgtgatctagaggtcataacgaagcctttacactacttagagcctagccttgcaccagcacgatacgtgttcctccatcctaggcatacttggaatatacctggaaccgttaagtggcgggcccacgccttaaacttaacgccgtggtagcggacacgacgggaacccaccacgtggcacaataccgttgtattggacacgcttagtcacctaaactaccacgtcggggtaaataggaagctcctctgaattatacgaactcatacacaccggcctaccagaatgcaaggctagtcctaaatagattaatcagcttaggccatcccatactagcacatgtggatgtacgaataactttaaatgggtgacacaagttcggtccttatggacttgggcaaacactccccctatcggtatgcaactaacactatatgcacaccacttgctgcccaagtgtaaaatcacattttacacattttagttcgcaaatacccatcatattcattttattccagcaaaggttcaagtatcaaaaccacattttaattatagatggaatgagcatttgcatatttctaagcatggctaagcaagtaattgcacatagagcatatataaacccatatgagcacaaagagtgtactctaaccatttctagggttcaaacagcaagaggatcaattattcaaggtgggttatgcagcaaataggtcataactaccttaacccagtttcaaataccgatatagtctaagttcacatgcaactttgcaaacaaatattttcattcctcaaatcatgggatccaatgtgttcaaaggatgggaggagaaaacttgccttgatcagagaattgttagcacctaatccacttcttcaccgattatgcaattatctagataaaggacacgacatgcaattaaacaccgaaagagctgaaaatccaaaatgctctaaaatgcatgatttatgcacagtgggttggaaatgatctaaaatgaatttaggtgaaataattcctattttattttattccatttgggagttatgaattttagaagttttatcggtttacaatagtatagtcttaggtagtgttatgaaatacttttgtaaaatgatttttattagattagacttcacaggggtgtggagatgtgttttctaagactaacacatttggtttcacaatttttggaattataatgaattctttatgcattttacaagttataacgtgttttagacatatagtgttttatatgttcatgacttttgagttataggttcagaacatgctacttcctgtttaagttgaataaaaggaataatttggttaactaaaacatttttatctcacatgtttatggtctttactactatggttcatattttataaagtagagatgctttaatctaaactagcaatatattatattaacctagaaattgttatatgagctaagttcttctaattttagtggatggaaatggaactatggcttcactggtcaatcaagtttttatttaggtttaattagacctaaagtgtatatatatacttatacatgtttatgtattacttaaacaacactatgtgtttaaattcttatttcactaagttaaggttttgatcaatgttctctacaaaaggtgacaaattttattttactatgttgaagataactatttgctggttctatagaaactttgttcatttcatttggactaaaaataaattttctacaagttttacaaattaatggctgctctatgttagtaaatccttatatgaatatttagagacttttactacacagcaagtatataatcttatttcataacatggaaatacatgttttagtgatcctacataacttaagtttattcaaattgaagctaaattgggttctacatgaatttctaaagtttagcttatctaaaactaatcattatagagataatagttttagaggcatttgatgcaaagtaagtaattacttttatttcacttaatcagagactgtatgatgatgaatctgtagaatttgattttgtttcaaaatgagttgaaatgaattttctatgtattttataagtttgtacatgttttatgtataacctatcttagataaattttagagacattatttgtacagtgagtgtcaagttttatattcctggaataaagttcataacttcaagaatctacagcaactggaataacttcaaaatgagctatatttgattttatatagattttacaactttgtgcatttttctgctaaacatatatttgtttgggcattttcctaatttttcttcagattttaaaggatgggtccacatggctgtgagggaccaatatgcacaaaggcccttgaggtttctaggaatcaacccgcagtcctaggcccatatgtcagtgtgtttctacaattgtaaacagatccctgcacttaatctaattcacggaagtcatccctctgctctaggcagagcagagctagccatggctgagctcgatctggagctcgccggcagcaaacggtggctcgtttgaggttgaggtcaaaagataaaatgaagagcaagctctcgcgattccattcctctagttttcttggttagaggacatcggagtagcgccgatggcgagtgtgagcggcggtggttttggggtgaaagtgcatgtgtgcatggaagtcgattacgaatgaaaaggatgcatgcatgtggtcttctagacttcaggatgctcaccgtgggtcgagctagggttgtcgaggtcttggcggcagcggtgacttgtggaacggctcggcgacggcgctcctcctcgggtgaacgacgacggctcgaacgggacaatgagctgcttcaagcaagcatgcacgagggttgtgaggtcaaggagatggtgtatgtgcaaggaatcgaacaatggctcaccgaggcagcggtaatcgacgatgacggcagaggcgatcctagattggcgccggtgaagaaaaggatgtgttctccgtgttcttgatgtttccggctggggttcttgaggcgttttgaagaggaggttgaggtgatgacaatggcgcagcggctttctctgaggtggatgagaatggccggacgacaacgatggttgaagcggcggcgctccggtgcgtgctccagggcatcgtcggcgtggtcgcgttccggtggctgtgatacacaaaacgggaggtggtcaaaagagaaatggttcggcactgtgtggagagaagggaacgcggaaaacctggagatgacctttacccaatcagcgatggcgatggtcgtcgtctccacggccggcggcaaggtttggggcgatggagaggcagagaacctcctccctcggtttcttcggctctgagtggtgaatggagaatggcgacgcgtctaggaggagtagagagcgagaaaaaggaaaccgagatcgacgacacgttgcggccacgcgtcggctcgctcaatctctccctctctcggctggagcagtggaggaagtgatggacagagctgaacctagcctaaggcactgacaagtggggccaactcgatggaaactaggccagggagagagatatgggtagaagactggtaaactggatttttagattaattttcggaattattttctcctctaactttgtaactacataattcaatgtgtggaccaaattaattagtgttgattttactggaggtaaatgattacacctagattccattttctttggttgcactcaaaaataatgggtggactgctcacagaaattaaacaaagatgggctattagaaagctagattgaatttttaggaggcttaaacagagaaggaaaattctagaaaaattacatttattcatgataactaatctagtatttgaataaattattttccatgttcactgatgtgcagttaaatgtacttttggatgaaatatggttttagccgattaaaatttaatttgatttcttttagttgtctgcttcgaccgattaatttgagatatcaacttgagtgttaacacgttaccaaattacggaggataagtttgtgctaatcattgtccacataaatttttccatgattttatcttgcacaaaatattttagagaattaagttgacctttgtttgtatatgtgttcccacttcataattgcatctaatattattatagggattacattaaacttcttttagactgagaagatgatatttgagtttaatattaagtccacatgttattacccaagattaactataggtttgtttagtgaagtaattcttttagattatgctcatgggatctattatggaatgcaagaccaaaacttcaaatgcacaaagaactcgagcctaggcatgcattatgtacatgtatgcttggtgacatttctagtctaatgttgggaatgaaaatgttttattttgttctcaaattttaatcatgcaatggtttaagttgatcatcacctaaattaaaacggaaatttttggctctcaaaattggagaaattaacctctaactattttgataagaaattttaagtcctaaaatttcgggtatgttacacctagtctatcctaggttgatgatatcgacgcttgtgggcgccgtttcctccttggaggtgtcgtcatgttggttctctcttccttcaggtgaaaaccgggttcctttcggaacgggcgttgacagcatccttaatgttgtttccttgttgaaggcttcgctcagaaggtatttgctccactagaggatgtttggtggttctggagaccttgtcattatgttgtcgaagctgcttgccttttggtaagctcggtaacgacgacttctgtgaggtctcattagttgtttcttttcttttctgtattggtttttgccggtttcccgtttaattaaccgtgcttgtttggttttcgggcccggtttcccttattaactgggccaattctcttcttctataaattccggcaggagaaactcctgccgtcggttcctcgaaaaaaaaattcatatacatatataaatcatgatttgtgagcctatgaccaaagattatgattgtcgtgctatgtatcatgactaacaatacaaggaataattacgagtttattacgacctttacactggcaaaatgtggacaattaacttatatcttaatacatcatgcgctcaacgagctacctcgagttgtctcattaaacaaatgagtaaaagttcaaactcaactcaactcattaactgccaagtcgagttgagtcgagaagagttttacacaaattaaattggggcaatagcgcttttgaccctgttctagaacctaccaatttgaccatactttttcaactttgctcatttgaccctcgtttttaaaactgaagatcaggtctgacccccttctgttaaatcaacgtaacggtgtgcccttcttattcacacgtttgtgccgcctacctccttgtttggaacaaacaggagaagaccgcgtcgccatcctcttcgaagcaagaaggagcatcgccaccacacatcgtcctccccgtccagatcgaggaacagcgccgccaccgtcgccgtcctcccgtcacgacgcggcgccgccacggatttactccctccgtcgccgccgccgccgctaccgtcttccacgagctggcgtgaccgctccctctctccacgagctgacgccggcacggatccgcttcctccgtgtccctccgccgtcgctgctgccttcctccacgagccggcgcgtccgctcatccgccactgccgcaactcgcccctccatgcgccgccgccgcacaggatatatgagagagagaaacggtagtgaatgggtaggttagatgtggattggtttccttgagggtagtttggtcattacagtatttttttctaaaaaaaatggaaccttaacagtgcggtggaaacagggttagacggggtgttcatttttgaaaagcgggttcaaatagcaaactagaaaaaaaaaagctagtttagtagttagtctttcaaatgaggtcaaataagtaattatcccaattaaattagcttacgagtttcgagatttttgaccaacccctattcacacatatccatccagcatcatagacccggttaagcccctcctatttgggcaggcctacatcccgaaaaggtgctccatggaatgccaaaacgcacccgtcccggttcccattcccattcatagctatctaccacctttttcgatcgttacgcaatgctcgcgcaataacgaaatctaccgcgtgccataccgccacgcaactagctagatgccactcactcgaggttagttaggcatgggcatcacatagcaaactggccatcccatagctttcctagctcccacgagacgaccctgcaccctgcatgcggcagcacggcgcacacgctcctttcttgatcgtgcgcgtggagcccagacgtgaccggccggaacggactccggcttggttcgcccttgcacagcactgcacaagcacaacccggtcgatcaatcgatcgatcagtgagtgccgaatattccgcacctacacgtgttcaccgttatgcgatgcacaagtctagctagtgcacttgaggaataatttggatgcatgtatgctgctgctgcgctttcgaatgtcaggaaaaaaaaacacatgggtgatgatcgagtgaacaatgtgtctcatcaatcagctggccctaaacgaacgaaccatactctgattgcgtagcaagtaccgtgggtgattcgattcgtggatttttcgttcaatacaaagagcgctaactggtaacctggtgcgcttagataggagtaatcagataccactggttatctggtgcttagataccacaggttggtcgacaaatgtccagaccgtgtacacacctgcacgcaccaatgtggcaatgtgcaaaacacccggcctcaacctgtcggcaaatgccctcgatcggcatcaattccctaccaccacgtacacccccgggaaacggagagtgaccgtcgagccgctgggaggaggaaacaacaaccggacgagaagaaagaaccagagctcaagcacccaaacaaacaaaaagttcccggttgaaaataacctgcagtagcttagctactagtagcactgtgagcactagctttgtcctgttccaatccatgtcgtagtaccgctggtgatgctggtaggaccggctagatgcaggccggatgcacctaccttcctccccgtaaacaaacacgtacgacgtgccagcccgggacccgattcgatcgaccggatcaggcaaaaaaaatcataccagcacgaaaagcaagccaaccccgcgaaagcggccgcccggcaaccgccgctccgttcgcctgcggccgcagcagcagccgcagcgaccgtacgctaggaaaaaaattttccgaacggcgccaaacgcgcgaagcttccctccgacctcccccgccccgtctcgccctccgatttggcgcatgccgtgcaacgcaccggccgcgtgcgcgtcgcgtcggggacgagacgagacgtcatctcgcctcgggtctagctagccggtgcaacggctgtttcgcccgtgtcccctcccgcgcgttggctttcgttcgggccatctgatgatggggatcacgctgtcacgcagcacgcgccgtgcgtggcgcggacgtgccagaaaaatgctctcgcgtgcgtgcatcaacgcgcgtttcgggtggtgtgtgcccgtgtggagtacgtatacaacctttttcctggttcgcgtcagtgcttgggaagagataactgttttgtgttacatcaggtgaattcagggtttttttatggcaggcagcacgttcacgttaatcggggatagactatcacctattggaattgtcatatgcggtgcatcggtgtgaattaatatctcggttcgtaatcgtgattggctggtgcgttcgtgcttactttagagctcgtcgtgccgggacaagatgtttcacttcacggtcttcacgtccgtgggtgatgacgtatagatgaaagcctaagaaatttagccttttattggtcttttgtttaatcaacgaggtagctgtcgagctttaggggtgccacgtgtacgtccaacccagagaaatttagccgtggatgtagagccgctggtgaaatgatcgatgtttactggagttacgactaggtcatttgtttggaaaagtaaccactaaccagtcaaggtcactggccatctggctccacctggacagattggacgcacgcacttgaagttttgaatagttcatgacgtcttttttagtgctttcttctctaaatctaagatgagcataatatatactgtaaaatttggtcaaatcacgtgtaggtgcaccagatgatgtaggagtaattatgtaatgcaccgtgcgtaatcggttacggaactgggtagtaggtttaccgaattgcaccaatccattgttggactagatgatgcaatcgccttgtgagcttatttacgaacaatatgatcttatattttctccgttcaagtatataagggatattggcctaatcccttatctaaatatataagcaattttacaatcccaagacaatgtttatcttctatccatcaatgaactcatgcactagtttaatcctcacttaacaactttggtactactccctccatctacttttgatagttatattttcaaatctgaaaaatttatttttgataggtatatttcaatcaaacaacctatcatcttaatggctttcttggatttaatacgtgactctcaattctttcacataagattggctctatgggcatcgagaaatgtaaatattaataaatcgcttgtttacgaggaatgactagtagcatatttaaatagatgataagtagaattatctatcattggtctgtctgccaagataacatatgactatcaaaagtagatgaagggagtattagtttattttttcaacctttaccttatgtactggtttatttcctcaaccatcatcttttatactatgatttaaccctcttttaacttccttaattattctcaaaatggcataataccatgtatttaaagacagagagtactttgatcgcagatcattcagaaagaaggtctatttttgagatgattcaggcagaaagtttcttttttttgagagagaggaaggcagaaagtttcgactttcgatcatctggtagcaaacccagcaaaacttcagcttacaaggtgagcgtgaacccgacaggtcgtcgacccttcggctggatggagcagcagctaatcgcggttacacctttgggccctttcctcggttgggccactggaaggccgtagtgctgctcattgtagccattgggccagtgtcacatgggcttacaatgaaaagcccatgttctccgaatgaaaaaaacgtacagaagcaacgccgtcttttcagctcggatgtctgaaaactcctaaaaccccaaagcagccagaccagtacacacaccattttgcttgtcaatggccgccgccgccgccgatcccctcgtcgccggcgccaccgtctcctccgactccgactccgactccgacgatctccacctcctcctcccgaatctcctcccttccgccgccaccgccgcatcagacgcgcagctccaccacttccacctccccgcgctcccgtcccctatcaccgtccgcaccctcccttccctcggcctcaccttccagctctggccatcggcctccaccctcctccgcgtgctccccgcctcgccgctcctcctctcgcgcgcgcccaccccggagagcccgctgggcatcctcgagctcggctccggcaccggcgccgcgggcctcgccctggccgcggcgctgcccgcccacgccgtcctctcggatctccccgcggcgctccccaacctccgccacaacgcgtccctcaacgcgcccctcctcgacgcccgcggcggctccgtctccgtcgtcccgctcccgtggggcgacgccgccgcgatggaggccgtcgctgctccgccgccggcttctcggttcgacctcgtcgtggcgtcggacgtggtgtactacgaggcgttggttgaccccttgattgagacgatgcggttcttcgtcaagggggaggtggtgttcgtgatggcgcacatgagaaggtggaagcgcacggacaagaagttcttcgccaaggcgaggaagctgttcgacgtcgaggtggtacacgaggacccgccgctcgaagggtggcgccatggcccggtggtctacctctttaccgagaagaagcggcgtgacaagaagtgaagaagctcttccaaaaggtaatgactgcctgctcgattgtgttcgtcatgtgttctttctgtttgttgtgaaagatcatactgttagaattcaaacagagaaaaaaaactgagggccaaaacttggttgtgtggttgcatatggatttggatgtgtcaggtgctatcctttgttttatttatggattctagttaattctcatggagtcacaatgaagtttaggatttcactatcttagaataaccaatctaataatagacgatatgattatgaggtggtagtagcagtacaggactttatgattggcaagggactgccgaaatttgtagtttgaacaagacaaagtttttggttctcaagaacacaagtctagcatgtcttcgtactagcacttcaaatggtgatggacggtctctagagaaaagatcaatggcacaattcctctgcatgcaaggaaggaatgacataaaacattatgttacttaacatggaaagttttttgttcttttgtgttacttttatggaattgaagtggaggcccaagaattatgtgttccattgctgctattttccttcaaattgttcatacatttagtagtaagttccttttgttatgggaataaaactgtagaaatccatttacacgaggaactgacctttttcttgttaacatgcaaagctatcaatatattgaaagcgagaaaatcagtacattacaaattaaccccaagagaatgcagatacacaggcttacaccatgacatttagctatgaaacaataattgaatcagggatgttcacagcatttagctagagtcaaatacacgtctgtttgcagttaaacttgagtgcctctcaaaaacagtcagcactgcacaaaggcaaacatgataacacaataggaatacacggcaaacctagtaaccaacctctggcaaccgaacagagggaggggcacaagaatcattggttgcactggacgagctcgtatttccataactgttcggcctttccagctccttcagtgtcccattagatgactgtgaaaatctgcagagagaaattggtggtgcaaagtacattgccactggcatctttggtggaaggtctggtaatggtgcttcaaacttcagtacgcttatgacctggcgaattgaaggccggatattataatctgggtgtgcacaccaaagtccaacaaccatcaaggaaataacttcccgctcttcaaattcaccatcaagccttccatcaattgcattaagtatctcatttcttccataaagatcccaaacccattgaaccaaactgatcctgtcattatcttcctttggcacaacgggcctccttccacaagctatctccagagcaagaatgccaaagctgtagacatcagtctctttgcttgctttcccagtagtgacacactctggagccatgtaacccatggtcccagctatcactgtagtttgtgagcctcggtcatggtctacaagccgtgcgagcccaaagtccccaagcttagcgttgaatccagaatcaagcatcacattgcttggcttgacatcacgatgcacgacacattgttcccactcctcgtggagatacaggagggcggatgcaacacctatggttatcttgaaccgcaatggccatgctaacaggtttccaccatcatagaggtgtttgtccaagctcctgtttggcataaactcgtagactaacaagaactctccatgctcatgacaccagcccacaagttgcacaagattccgatgccttagtctgctgatgatcttgacctcagagatgtactccttcctcccctgtgttgacccttttgcaactcgttttatggcaatttcaatgttttgatccttcaagaaaccctggtatactgcaccgaaacccccttctccaagctttctctctgcagcaaaattatccgtcgccactacgagttcattgtattggaatctccttggccccttgcctttctcaaactcactgtcaatggactcatcacagtctagtttctctttttccttctctcttgaccttgtagtccttctaatccttctaaaacataaaaagaagcaaaccaagccaattgagcagaccacaacactaccgctcgtagacaagcttatgaccaatataccttttgttttctcagtcttcatcaggtgcacatctgtagaatcaaattcccagtaaagaatctggtgcagctctacaaatttacctgtggaagcagagaatccgatggacactttgtcagggagatatttgctgagatcaaccgaataagataggctggagttgccactgaattgtgggttgtcctggtacgacaagaagacactcaagttccttgaatttgcctggtaagttacccaagcattggctatccggccatcgttgatactacttcgccatgtcacgttggctacagatacaattgagtggatgttgatgcctacatggttgccatctggatcccaagtgtttttgtggctgtcaaactcaacagccacaatctggttgagtggatcgctctgatcattactattgctgaagaggccaagataaccatccatggagttattggggaccacagaagggtatgatgagaggaagaaggctaggccctcaccgtacgaactgtcgttcgtgggtgcatatatcttgaacgtgaagcgggttgtgaagctggctaactgaccggtggtgctatcccagagaggcactggatcggtgtagattgctcggcctacgctttgagtgatctttccattcaactcatccttggtgagcttgaccgccttgttgtagaaggcatcctcctggagctgaattgtggctgatccattatgatttgattcagtgaagttcaacttgaaggacagaggattgacatgggcaattttcagggatagggaaaagtagagagccaagaggcaagtatatttggttcttgatcgcatggttggaatcctggaggctggagagagagcaggagggagagatggaaggaaggaaatgaaaagacactacttttgcagacctgataacctgtataaccattaacttggtcaatctccttgattgtctcagcaatacttggtgctattaaagggtagtatcatactgccggcctgtcaataggccctgaaaggacagatgtaagccacaggagaagcagctcaaatttggaacttaactaagctttccaaaaagctagatgaagcttggtttgtatcgtctttgccggccaagattatgaagtcaagtatgtctcgcccataatatgattatggtggttgccggcagaaaaggaggttatctcctctcagcaaatggaacatgtattttctaaggcagaattggactgagttcagacatgcacagaatctgccaaaaggaaagctcttatcgatcttatatgcttaacaaactgggtcatgatgtaatttttgtctttcatgcggcatacaacaatttcatgcagcacaggagagtttattaatacatatagcacaatgatttaccttgtccttagggatcagttcgatgacaacttgacaagcagtaaatatttcttgactgtaatctctattctggagttggcacaaatctattgagttatggcaaccaagatcagacggcagaagtgaagtatatggcactatgatatatcttgcttgtgcactgaaaaaagggttcaaacatggaaaattaacaaagcgaccacagcttatgtatttcgcatagtgtgtagtacacaaggatcagcatcataatctcagtaactagaagaaaatatacaccaactgttctttttactaggagaatatacatcgattgttctattcatgcagggctacttatatacacaaatgattaactcaaaacctgcaaggaatattcgtaaagtacattattgagtggatctgtcatactcaacatgagtttcaagtttgctgccatgaatcgatcgttcatttcgccgtgtcgctggtgtttgtgtcgtccgttggccacgctacagtttccattaacctctgacgcattatctccagattctcattcgaaatcttctcgtacatttttgcatggtcacatttctgcattgatgaagaggtaactaattaaataatttatgcatcaaagatgtctcaaattactctggaatatctcactcttttttattaccttgatccatttgctgtacaagtggagtcgtgtgatcatcactctctctgccaaatcttgcctctcctggtgcatacgaagtcaaattaattagagaatgaaccttggcacaatgctgaacatcatatatatttttcttcattgcttagtaacaagatgcaaaaagatacctttgcgagtgcgatgaggaaatgtttgccctcctttggatcgttaaccacgacgtagctgacaaatcgtaagtgttcgtattttagacgctaaggatgcagattggaactgacaccaacattaacctattctacttagatttcatttcaacatagcacaatatatcaatgtgagattttcttgcaatggggtgacttacttatacagccaagtataagcaggtggattcatttcatacaactggtggagcaccgtgcttgtggccttgtaagtgaagtaattcatgatttcctgcaaaatggagagaacaatcttcagagttccatgcaatctaaacccaattaaccttgcagttagagaaaattaaccattatattgctgtcgtttacagatagcgttccgattatcccctgccggttcaaaaaaaaagaaaatcgaaatcagtagtgtacacgcaccgtgtgcacgtcttcgaacccctcctcgtactgcccggcgaactcgtccacgatgacgaggccgcggcggccgggcctcctccccctccgccgcgccgcccgcgccaccgtgcgccgccgcctcaccccgacgacgacgccgcgggaccacggcaatggcgccgcgcggcacgcggaggaggatgaggacgaggagggaaggcagacgaccgcggcggccatccgcgcgacggcagccatcggcggcgccgcgaaggagagctagagatgtttttttccctcccgacggctcgacgccggctgcgacgatgcgagccgcggcggggttctggataggcagcagcggtggattttttttgctgaggctttggctgattctgtccgcgaaaacagcgcgtttcatgggcttcctgagggcaaacgggagaccccacgttcgcgccgatatttcgtccggcagctcgctgattggtggcggaatggcgacgagagatgattctatttgcctctctgtattttcgcgattcccttgattctttttttttttggcttcagaagtacatttctctttcagccttttccttttttttttgagaatattcacttttagctttttgtgagaatgtaatttgtggaatgcatgactgccaccctaaaatatcttttctgatagtgaacaccaaagtaagggcacttgcgtatgtttatcatagtgaaagaattcaagttctacatttgatattaatgtttataagtacattatttgatattaatgtttataagtacattatttgatattaatgtttataagtacattttactacaagacatcgcaaattcgtgattttagttatgggacaccacatgaaatcacttttggggtaagacactatgtaatcttggttatttgctaacgggcacggctcccatttatttagcgttttagtgttgactatgcaagagctgtccactttttgatgcgctgtgaccaaattgcccctgcccatcctcaaattgactcacctatcggctggcgccgctcttcgtcgtgcagttcatccatctcgcttcaatcctcgagcttcgcctccactcactcctcacctcagacactgtcactccgccgtcaccgcatcctccccaccagcctgctctcctccctcccgacaccataggcgccacccgcacccacgttggtcgaggcgcttccttcccctccaccaccgcaaacctcagtattaggagcaggagaccagcctctaccatggtgttgctcgcacccacatcagtcatggcgcttcctcccctccactaccgccgttgcggcggtagaaccagcatgacgagaagggcctccaccacggcgccacatgcacccacattggtcgcgacacttcctcctcctctactgccacaagacaagcgccgtcgcgagcctagcaggagcccaacccaccgccgtcgcccaagcccccttccgcagaggagttgggctagggtccacctacctcgtggaggtcatgtcggcgtggctcgtcagcttctacctaggagcctagcaagggagctgaggggagccggaccaagccgccacagcggaggtggaggaggcgaggagggagggccagggtggttgctgatggcgagcagaggtggcactgtggctggagtgtgagaaggactgacctagggatatttttgacgtttcatgttgtttatctctcctatttagccggaaattaatattttaatgactatggtgtccataagaaaaaaaaccacattttgagagtgccttcccctaaagatcgacttttgacgtgccctagagttaaaaaccacgaagttacagtgtcctacagcaaaatttgccatgtttatatgagcatctcatttgtactatgttttgaaaaaaatcttgttctaactgagactttagcttagaccctgtcacgtagaatgttttgatactaatttagagtattaaacatagcttacttacaaaactaattgcataaacgagagctaatatgtgagacaaattttttaagcataattaatctataattaaagaatttttacggtagcatcatataggataatcatggattaattaggctcaataaatttgtctcgcgaaatagtccagagttatgaaataggttttatcattagtctatgtttaatacttctaattagtatcaaacatccgatgtgccagggactaaaattttttaaccccatccaaactcccccttaagaagcccaaatccgaacacaacgctttgtagctgactagcttagacctgagggcctgtttgatatagctccaactcctaaatataagtccaggagtttagtctggagtagagttgtggagctgcctaaacccacctccacaactctagtatattttgtgagagagctccacccaactccattcctaattttggtggagctgaaactgtttggctgagctccagcttcagaagggatggagctggagctgaagctgtaccaaacgggcctgactctgagaggaaaggcctgactccacggtccacgcgcaccgcatggcgtacgcgcgaaatggttcacggactcgcggtcatgcacacccgcgaaaacctgcgctaagcaaaagcaccggaaaagcaacggcacgagcccgtgccccgtgaggcaatgaaccaaattggcggccgcgtcaaccacgccaccgggacgcgcgcgacggcaagaaaaagaagtcgcgaagtcgcggattctgcaggcccccacgagaccacggtttcctacggccgatctcgcggggacgcagccggagacgacgcggtcggtcgcgtcgcaccccacgccccggccggttagtggaccgattcccgcaccggcacaccgcgcgcgcaccgcgtcttcttctctatcgcgacaagtctggcttggtcatcgcgtgagtcgatcgcctcgttgctttccgtggccgcgtccgtcgccgcctcgcgcaccagcgaatccggacgtcgaccgctgcctgcggatgttgtggacagctcacagttggtgttcctctgaatgcacaggcgccgtggttcctctcacttggtgtgcaatttaccgtgaaatcccagtgagatataacctacgtcttcgtaacggtctcccgtcttaactccgagtctctgactaaccgtgaacctgatgatgcagttgctagcctcatcgcgtgcgacgaaatatcaaatgatgtcgtccgtgtttagatgacttcttttgtactcctgcactgtctgtcgatgtcatggcagtaggtgcctcctttcaccgactccacctgctccagaacaaagcaggtaccaactgttacaaggaaaaaaaaatctgtattttccaatactgtctatttttattatcttgctttgaatactaaccgggtatttattttggattatagaaaagaagtacacaccattatgcacacacttcaaatattcgtaagccagtagaaaacggaattgtgcaggtggcaagcattctcttttctaaaaaaaaaatcaatatcataaatcacattcatttttctaaaatatttaatttattattaaaattaaatcaagtagataataatacatggtaataattcaatgaataacccatgccaaatagagtcaacaacattgttcacgttttcgacaaaaacaaaatgaaagccaccaaattataaggtttcgacgttgaacacaagcagattctaagtaacttttcaaatgattttcaagaatttaaatttgaaataataaatttgattggaatttatcaaggttcatgaaaaccgtcataagatcgggatccaatgctcaattgaaaatgtgagaccctgccaacaacggctgtgtttagatccaaagtttgaattcaaacttcagtcttttttcatcatatcaacatgtcatacatgtataacttttcagtcgcatcatttttaattttttaaaaaaatttaactttacgctgaactaaagacagccaacgaatcaaagagggttatagccatcccggccgttttcggcccgggtcaaaacgttatgtatgctactcgatttcgtgcccccacacccttgacgagcgagccttgccctcttctcttcccttctctcctaccggcggcaactaccgggaagccgccgccgaccgccggagcggagtcgtcgcggcggcgagggcgaatcggtaacccccccccctccggagttccgggatggggacgccggagttccccaacctgggcaagcactgcagcgtcggcgactgcaaccagatcgacttcctgcccttcacctgcgaccgctgcgaccacgtacgtctttcccgtctcctcccctggccgttttcgtgtctcggtgcctcgttgccgaaatcggatttgctgctgcggtagtttttaaggaaatttgttcttctgtagattgtggaaccaaagaactgattcttcctggaatttttgcttgatatacggtttcttgaagtagatcttggaaagcacctagtttagggaaaatctcgtctgggctttagcctttaggacagtgatccatcacaatcgaggagatggagaagggaaattcatgccaatgcctaggcagcacgaatggagatctttttttgaccgtttggtggatgagagttgatgtgtctatcgttgaccgagaacatgatgaccctttcggtgatgctcttgcagttttgcgcccttttggataattagtttcatctactaattgaatgctatgtagccaatcacataattggtcagaattgttgcttcaataagaatgaaattgatctcagacaaaatctgaaactgggcttaagaatgcaatgggtatggtttcaaatttggaacggggaaaaggaggatttagttgacaaggagtccttcattgttagcttgttgcctatggttgaatgcacataatgataggaaaaaaagaactgaaaaacagtagtggaagtgtggtatttattcacaatgccattcatatctgtattttgtgccagaaacatgccctctagtcattgtactgtttctttgttgccctctagtttctttcgttgacatcacagcatgcagctccactggaatcatgacactctggaattacacaccatataggagtatgcgttattgcagtgttcaagcataactcatcctgagtagcactccaaggtcttgagttcaaatctccataggagcaaatttcagattgggttatttgagggctaagttccctgtttgataggctaagttcctaatttaaaaggctgcatatatccggttggatgtagaggccggataaaaaatacccttctctaaaaaaaaaagcataactcatagacattttgggttcaaaatttttccataatttattatttttgaatcctttccacttcatggcttcccgaatgtaaagtaacattgcatcaacatccaattggcagcactgacatggttatttgatcattgtttaggtcttttgccttcagcaccgaagttatacatcgcatcagtgtccaaatgcaaatcagaaggatgtgactgtcctcatctgcccactctgtgctaaaggagttcgcctgaacccgaacgaagatccaaacatcacctgggacacccatgtcaatagtgactgtgatccatcaaattaccagaaagtaacaaagaaaaagaaatgcccagtgcctgggtgcagagagacactgacattttcaaacacaattagatgcaaagattgcaccaaagaacactgcctgaagcatagatttggacctgatcacaagtgtccagggccaagaaaaccggaatctacattccccttcggaaatatgcttaggagaagtcagaaagcagaatcatgttcaaattcaaacagcagtagcactagttcatcctggtggagctctagtcttcttaccgcagcaacgagtttcaaatcatctgctgaagctgggatgcagaaattgagcacagcaactacccaagccatccagaaggctaaggatgggatctcgacaagcagcagtaacagcggtgatctcgtggagcaatgtgttcagtgcccagcaagattttccaccgtgggggccttaatcgagcattgcgaaaagtcccatcagagcaactcgcaatcaagtcgtagcagagtgacggtcgatgtctgcccgaaatgcagcaaggcatttcgagatccagtgttgcttgtggagcatgttgagagggaccatggaggaacgtcaagagcgtagatctgcttatgtttactgtacctgtgtaacctgtaatttgcttctcattggtcaatggtcatcacactcaataggatttggttggattgtgctctattattacggttgggttcaaaatgtgcccatgaaagaaggtatagtttgttggctgtttcaaggcaagccattgtgaattgaacctcattctagacaccaggaaatcaaatttctgattagttaaaacaatgcgtcgtttagatggctatgctgttgcaagttacaaatattgccttctaccagtttgttaatggtgaaatggaattcataacctcaccgtgcatgcacaggaatccactgtagttacattacctgtcaccattgacaacccttgcaacagggaacatcatcctttggtctgctgaataaaggcgaaggattattttcacatggtttgcatcccagatgctaattgaacactgagagaaacgtgagtttcccaatggttaaaaccacgtaagaaatttcgaatttgtccctaaattggacgtcttttagccgtctaaaatcctttttgttcaacggatttggtcgagatataagccgaaaaacaaatagtgaaacgcgttcctgaagcccatcaaagcaaacctgcctcgaacaccttggatcctgtgacccggcatcgttacgacgctctaggaattgcgaagacgaatggccatgatgttgtggtgacgaacggctgctgttgctgtaaaatcaaattgttttttattcttattctgcgatgaacaattggcatctgagattattgattttgacatttgaagattattggcgaagtggttttggaaataattgattttcagatgatgaacaaggtttgttgttttgtcgtgtccggtcagaccggccaggtgctctgtgtcgactctgtgtcgacttcgggttgtttgtttagaaatccgtggatgtttcgtgtttatggcttctagatggatcctatgtgtatgtaatactgttgtttgctaacaatgagtcaagttgaaaatagcttggtcttggaatatggtttccttgtttgattcatgtgtaggtgacctgatgcctcagaagagtatagtcggtgatggatcgggagtcgacttggagataaggcgacgtccggacgatcggatatcatgcgggatacttaggctaaagatcaatgcacgtggttggtgaatattccatatgacatacgatggagatattgtgtgcgtatgggatgcggaggccattccagggctgtcgaaccgggcggatctataccggtcagaccggcggcacaagcacgatcaaactggcagatcaacctcgattagaccgatctatatcgaaattgagggtaacttttaattccgctaaaaattttggtttttgggtacaccaaccattcaccccctatggttgacttaattctttctacggagttgctagaaatatggcgtcatatgctacagtcgattttttttcagccacttacacagtagttacacctcatttacatcctacttacatatgtaattactatgtaatttttgaatttacatatgtaattttagtacttacacatgtaattttgagacttacattgtaaatacattaaaattagatatgtaatttagggacttacaatgtaaatacatgccgactatttttttttgatgaaaatatagtgccataaatatagctacacccttctttctattcgatcctacagttgtgagggtgacgcgcgccgatactggcggcaagctagcaaatcagaagtccggcgatggcatccaagcgggaaatcaatgtccaaaatccggcaacaaggacaatagaaaggtcttggttagtgtgcttgactaggttgccgttgatttgtgttttgacttttgaaaagactactgttactaggttattccccatagtgtgtgcagtcgcagcgaggaagattggccatttctttgcgtggctcagtcattagttagtggatctcaggaagaaaggggagtgttctgtacagggtgaaattacatcaactactgaaaaaaaaaatccacctctctgaatacgcccgccatcttccatctccttgatgtccccaaacatccgaagtggcgttcgcgctttctgattgaagatcatttcgttcctttcgttccacaccgctcaggttaccagcgtcaagttacatttgttttggacctctaattgtttcttgaattctcttctcctagtcagatatcgctgccgccattaatttgttcccccctttgggaaaaaaaaatattttgagcttgtgccaagttagtcatgggtgccaagaggagctcaatgatccccgcactcttgctcctcgcttccttgtccatcttcaagctaccttgcttctccagatcactctctttcagctacgatttctccaagcccaccactttcaatcgttccgacatcgcaatagatggatccgcgagtctcaatggtctcatcgagctcacgcagaacgctgacccgaaacgtgaaggcatatacgacacggtgggccgagggtcctacggccatccggtgccgctctgggacgaggccaccggcgaggtgacgagttttacgacgcgcttctcgttcgtcatcaagtttaactagtcagacaaggccaagtacgcacccagcgacgggcttgccttcttcctgtcaccctatccgtcaaagatgtctccactcgacggcggtggattgctcggcgtcttcaccaacagcactggcatgaatccgtccgccgccgccccgatcgtcgcggtggagttcgacacgttccaaaatgagtgggaccagagcagcgaccacatcggcatcgacgtcaactccatcaactcgaccgcggtgaagttgctgtctgaccgcagcctctccaacgtcaccgagccgatggttgcgtcggtgagctacaacaacagcacaaggatgctggccgtcatgctgcagatggccccccaagatggcggcaagaggtacgagctcaacagcacggttgacctcaagagcttgctccccgcgcaggtggccatcggattctcggcggcgagcgggtggtccgaggagcggcaccaagtactcacctggtctttcaattcgacattggtggcgtctgaagaacggagagaaaacgcaacgcgaggtaggccggccgctgcggtgcttgcaggtgtcgttgtagcatccgtcgtcgtcgtcggggcctcgatctgtttgtttgtaatgatcaggcggcgtaggatatctcgccggcggacgagagaagagtacgagatgggcggctccgacgacttcgacatgaacgatgagttcgagcaaggcaccggtccgaggcgatttctgtacagccaactggccaccgcgacgaacgacttctccgaggacgggaagctcggggagggtggcttcgggtcggtgtacaggggcgtcttgagcgaaccggccggcgtccacgtcgccgtcaagaggatctccaagacctccaagcaggggaggaaggagtacgcctccgaggtgagcatcatcagccgcctccggcaccggaacctggtgcagctcgtcggctggtgccacggccgcggcgacttcctcctcgtctacgagctggtgcccaacggtagcctcgacgcgcacctctacggcggcggcgcgacgctgccgtggccgaccaggtacgagatcgcgctcgggctcggctcggcgctgctctacctgcactccggctacgagaagtgcgtggtgcacagggacatcaagcccagcaacatcatgctcgactccgccttcgccgccaagctcggcgacttcgggctggcgaagctcgtcgaccacggcgacgcctcgcagacgacggcggtcctggcggggacgatggggtacatggacccggagtacgcggcctccggcaaggcgagcaccgcgtccgacgtctacagcttcggcatcgtgctgctggagatgtgctgcgggaggaggcccgtgctgctccaagaacaatccatcaggtcccgcctcctcgagtgggtctgggacctccacggccgcggcgccatcctcgaggcggccgacgagcggctgcgcggcggcgagctcgagctcgacgcgaagcaggtggagtgcgtgatggtcgtggggctctggtgcgcgcacccggaccgcggcgtgcggccgtccatcaagcaggcgctcgccgcgctccagttcgaggctccgctgccggctcttcctccgacgatgcccgtgccgacgtactcctccttgccgagccttgcattgtactgcgacgcggcggcagctagctcgtcgtcatccagtgcagggttttcttcttccacgagtggcgagcgttcgtcgacgagctcctctgcagcaaccgccgagtcgtcgtggctacttaagcacaacaacaggggcagtgaaaaaatagtattaggcaacaattgattagatcatatctttagtttgatgccaccttgatgttgcttagctcttcgttgtttatgtgtattgttcttccttgggccgccgtgtcatttgtgatatgtacctcaattcatatctccttttctatatatgcgttttcaactttcctagtatagcctgctatctttgatcttaattgaatgtcacaagccgagtcactgtttcgcgaaacgacatatttgcaaacgaaaagtaatttgtgaataaaacttttatatacgtgttctttgcgatctaaaagtaaaggctaaaaaataatttcgatgaaaaaaatttctcaaaatcagtttcaaatttaaggttgaaaattcaaattttgactaataattataagcataagcgaaaagacgaggagcataagcataagcaaaaattcaaattttggcgggacaaaggattgcgatctcgtgaaggtgagctaactccaaaaatccgtcctcggttcggattgtaggttgcaactcatttgcatctcatttgcatgaagcaggaatcgctagttatcaccggttagccatacgacggtgaatccgttcgacacaacgcccgtcacactatagaagttgactatgtttgaactcattaaccttaaccataagaaggaagatgcctaaggctaggcctttgactagagtgaagttgtaacaaggtagggcatgtctgggggagcttctggcagctgtagtttctctcagaatcagaagctctacctaacaattcagtttttttgtccaatttctgagaacctataattgtagaatctagaaaaataaactagaagctagaagctgaaaaactccagactctcagaagctggaaaacttcagactctaagaagctggctatgaaccagctgcttataattttaagctccccaaacaggctcatagtcgtactggaagttgcagctggatcacctcctttttcatgagctaatacttacgtattttggtttgacattaattgcttcatgcccaaaaggaaggcagctacgtttgagctaaatttggatatggaagtcttttttcgtttagggcaaagtacgaccaagctcatgagcttattatcctatatcggaacaattactagttgatattgataggatctcctttttaatggccccacaccctcctgtgtggtgtgtgcggtgtggcagatggggatatcaaaaggaaagggatagagtttttctcgtttttggtatagcataccttcttttgggaggcctgcagccccacacaatgagctccctcataattgcgtcgttgtgcctaggtaaggaattttgaattttttttctctgaattggacatctttaagcagtataaaatcttttctgttcaaaagagccgaaacaaaaactgttcgagatatgagccgaaaaccaaaagtgaacccgttcatgaagcccatcaaacgcatgcagcttaacctcgcctgattcagcagcccagttgaaggtcttcaaatcgtaggatttgaaccctcgtgatgaatccacaaggtgatctcccgtgtgtgttagactgttagtcacccttggtgccagcaaaaggaaaatgaaaaggtcattgtacaagggcccaaaaaatataagaacagttgaagcagagaagtatgaacatatatccacaaaaagttcctttaagaatgatatagatgatcgtgattagaacccacaaagtgatcgccaggagaattgaaaggtctaggcttgactagtgtatcgaaagaaaactgtggaaatatagatgtatcaacatatgcccacaataagaacgatcgaaattacgtgtaaagattattctttcgaaatttgcaagcataaaaaaaaaaaagacctatagcttcatctgaccaacacctcccttgaatgaaccgtataaaggtctcgacctcctgaagctgaatatatcggttatttgatacgagtgcggctgtggctcatcgtgaactatcttttcgtactcggaggaatggagaccgccgtaaacttgaatgctaagaattttcttttgtggtgcattaactttgacatgattattgaagaactcaatcaactcctctttattgagatccctcagtgcagcaacctgcagcaagagaactccaggtataaaaaaaaatgacaccatagggacaaaattacagaaatagagcatacctccgcctcttttctatcaaatttcagagttccttccgaaatttctttccagaagaacgctgattcctctcttatattcttgtatttctccagcttcatgtcaatgagagcattcacgttgctctgcaggtaacagaagtgactgtttactctgtataatgtcaagtatacaaccatacaatagagctacagcaaccttcggccgacccggcaaaagagctacagcaagctataacagaagccaacaaatactgacagcaatcatcttaccttgaactcttcatcaggcatttggtatagagtcccttcaaacatattaagaaaagcttccactctgtcatccaggtttgatggatcctgtttaagtaacttcttagaacaggagataaaaatgatccagcagttgaaattgcattggaaaatatatttaccttcacggttgactgaattatgaattgcaatccccgaacacctgaatcatttctgggtaaacaagatagtgtgaacaaagatttagaggagttgcatgagcatgactactaagtcccattaccacataccaatgcaaaaaagtgctgcacatccttttgcaataaagaacacaattaaaataaaggcaacatcgtacctttgtgtaagcactgttatgtagccaagttgctcaactgaacgcaattggtgaaaagctggttgcttagcaacaagagcaagcaattgaagtagaacattttgtttgagatcatcctgatgaatctgtgcagtggaaacattgttatagcattgaaatgtgtattgcaggtatcttccaggaaaaactagatatggttgatgagaggctagagtaagaaaaaaaactggatgttcaggtattcttctgtaaatgcaaaagaggtccacagagaaaacatcaaagaagtgcaaaggcatacctgaatataatgcaggatggaagaatttttttcatcctggtgatttaggcacaatgctggataataatacctccaacccctttcaagttttacaattcgctttgtaagatgctgtgatgggggtaatgctttgcagaaactgatgggtgcattgaataaggtgtcttcaacatgctgtataacactttttgcttcacccggttccatgttccctaatatagtaatatcgatcacatacagaattaagaacataaaataagtacacccttcttaatgagaaagaatcaaaataatgaagttagttattaaacaaaccagcaaaatagcattcaataaatgtcttgcccagaagacgaggcaaaaaaatctgtagatcgcttgcttcaatatgagaaactgcagcaagtttttcatcccatgcccaagtttgttcctctaatatcaatgaacaatagtaaaatgcctgctcatatggttgtcgaaatttgaaattctcgtagtcctttattatagtttcctgatgacagcaacaaaatatgaacacacgcagctcatgtaatgtaaaatgcatagaatgctaagttaatattgcataatcaggaagatagaaggtacgctagacatcctaggcagacactcttttgtccttcaagacatcctaggcagatagaaagtacgccatatttaatccaattagaattctatagatagaaatgcatatattaggaaatatcacaactgttgtttatagctttttagtcccgtttctgcactgttttttcctaaatgaaagtagctcatgcttctgacaaggaatctcctgactgttttatacatgtccaaatgacaaccaaaacaaaaattctagcaggtctgcagaagatattttaacaaagaaccacatgtaaactgagcatggccgttacctttataacagcaaaacggtcaaccttcacttcaaactcagcaatttttccaatgacagtatccagaagggttctcattttgtcattataaccgaccatagttatctgtaaggaaatcataaatattggacggttagaaaataagaagatttcataaggaaaagtctcataacacgccatgaattatgactcgtttagaaggaacagttgagtgatagatcgcaatttacaaacatacataacaaagttttacaaacatgcaacacaccaacagtgtcagccactcagcctgctaccacacagtatacatgaaaaagtaacagggattaggtaatattgaccatttaatctaatatagaatataatgccatttgtatatgcacatatgaaaaaagaaaacaaatggagaaaaagctgctgtaagactgtaacttatgaaagcacatagccatgtacatcttctaattacagtactaatgatgtctttattgcaaactagtccagttaagaaaatgtacatctgaaccaatatgtggaaaatagttccaagtgtcaagactgatgatagcctacttcttgcttctatatgcaacaggaatcaggattttaatattaaagattaaatgagaatcgaatggcaagcatctgcttattagtaacacatattaccatttttttcatacttgcgcaaatacagtatgtgtttaattaggagaaacaaaaaagtttgagtatagaagcgctatcggtattgatacatattgactgaagagcttggtgtcatggtgtgcatcatgcatgggttatgcgcatcagatggaacacattgtatgaatatatgatgcaggaaggcctgcaccatagtacgattgtcacatgacaaccatatcagcagcatgcaacaagtaccaacatagatgggtataagagtgttcgtactggtttaggtgaaaacatggctaaaggcaactaacatgatgaataaagtaggtggtataaaattattgtgtagttggcaatgggcatgtggtatgtgccacaccacacaagtttaatgtcagtggaaaaccttttatttggtaacttccaagctgcgatgcaataaccctcgggcatttgaccaagaatatttttcaaaaatatatgcactttgtgatccccaggcatatttccccaaaataccccttctgactgtacctatctccgtatgtttcagtgctctgttgattgtgagatattattaaagggtactttcattacattctaaataaattgttttttcgttttgagagggtaagccagtagattgtaattacttggatatatgcaatttagtcaaaagtaataaatattcaaagtggaggggagttaacttatatcaatgcaacagttcaatttccacaacaaccaggaattccttctgaacccgcaggaatatcatagaattttcacataaaacaggaatcggggaaaattccgtatcccaaacagagcctaagagaagtatgaacagcaggaccctctttactaaaaataaaaagaagattcagcaaggacaattattttcaataatccagtataattaatgctcacaaggagtcaagttattcaatcttttctgatataattagtgtgatgtttccatcaacactgcatcatctggattagcaatgaagataaacaatcaattatgtcatgcaaactgtacagctaacctgaaatccagtgtcacttggcctaataaagtagtaaagaccagcaatttgagcatcataagctgaaagcaaaacaaagttggtggattattgcaacagataaatgaaccaaaggcaaactaaccagaggatgaccatgtccttagtccctctattttctaggattgataactgtatgtggagaacgagttcttgtttcggccaacaaaaagaattttccaacttctccattagtatatgtcaattttatgatagaacattgtatgaagagaagtttgaaatatactaaacaatttcatgaacctgtgccataagaatcataaaatattgagatatctcatgtattactacataccaaaatcattcaaataatccattatcaacctcgtgaacatatcagtaagaactgtcgattcaggagagctattggacagtggacagtggaaatccatcttgacgtaggccttgggtgtgaagaacattgtatcaggcttataccatactcttgaaaacattgttttcctaagcatacaaggaaaacttccctggataaaccgaaaatatcaataaagtttcacaaaataaaattatgagcatttttttttaataaaaaataccttttcctcaacatttttcaatgaaagatcacttggaatgaagatattaggttttggaatgtgcaaatcttccatgggagccatatttacccatttctgtacaaattatgttagaaatgtgtacaattccaaatatattaaattggagaatatgataggaacagtaacatccaaatgtacacctgtatgatggaaggagtgactgcttcaactgaatatgatgtaccataccaaggctctgttaagtttgtttgcccttcaaacttttttgattcccagaatattctgaaggagatgaagaagataacccagaagtattaacacccgtaagtaaaagtcacaatgaaaataaaatctaaacaaacagatcaagtgtgtgaaaggaaaaaataaagcaaatggccataagaggatcaacgatgagtgaggagcctgttgctgctttttggaagttaacaataaaaaaaatgcaaagggacaagtaatgaaatttcttccgctttctctgagaaaaaaagctcaaatttatgaaaagtagtgaaagttctcttggctgtgccatccttctagaagagcactatagtgttttataattgattaggccaagaggagtgtgaagcgacagctaaatgcaaagaccgatcattttccaaactacatgcagtagttgaagagtcacaataataagcatatgcatacattatactgttattgctgaaatgaacaaccaactcaaattggctagtccccaattctgtatgataacattaaatgcatgagattactgtcgtgaatagaatacacattgttgtatctttgcagtctcatactgatccgaaattttccattcgaaattgtgggatacaagatgtgctggaagtgctcctgaaaaatcctaggaatcatgtctaacctaagtgtacgggaagaagcatatgaagattttacaatgtggtacatgaaccattcaaggcatcaaagatatgtagcacaaatgaattaatatagatatgagtttcctaagaaagtaacttttgaaatactccaaaaaagagagtataatacataaaatataacttttcaacaaacatgtgctgaatattaaaacataaaaaactatgactaaaccttaaaacagaacaggaaaacccaacaaggccatatggcctggatgtactcaaaacctacctaacattatctggagtcaagtcatttaatatattctgaatagcatctggagaaaactttgatggcacagatgatgcaatcagccaatcttccggcggaaagatctataatagagagagatcatgagatggtgatactgagcagaattaatttgcaatttatgaacaaacattttggcataatttattaggaggaactgatcatttcattgttcaatgaaatatcatgagctggccttcttgttaatttcattttgtgtaacgaaacaaagtagcctacaaacataagttaagaaaagctaaacagtttttagatatgccactccacttcctcccagtcatacgcatgtgaatctatggggaatgcagatccgctcatgtagaaagcttcaattttgtgaatttggcgatattctgttcaaatttgactaaaatttgttcaaaattttggtatatcagcaccctccaatagaaacgtccaaacctaaagattaaaccctggggggggggtgcatatgcaaaaatttcagtcttttgggcctctgaaaactcggatattttggtcaaactacaacaggaagcatgaaaggatcataacctacacagaagcctagagcctcattagtggaactatgccccactgcatccttgctgacaggatcacgttttctctcagggaagtgttatggtagatgtgactatcacctccaaatttatcgatatcattcactcataaattaagaggcaacccatataatatgtcacatttagtacacaagcccagcaaaaaacatttagtacacaaatacattgtaatatatctaatactctcacacccttcttgaaatttgtgtggaggttgcctcttgatttaggggtagctcatcatctctctcctcacttatctccaccatctcatcacttaatccaatgtggcactcttaggggcagcatatggagcattatagtacttgccctcagcgacttctccctcctcaccgtgatccaacttaccgctagtcgctagagagtacaagtatctaatggctatgactagagattgccaagctgatccaggcattaccacattggtctcttacccctagaagccacattaatcaccttgacacataagacagtcgtgcaacatggagtcagtgacaaattgcagaaagaagggagttatctggtggcatatagttcatattctcacttcatttgtgagggatcccacctaatcacatccctatgaattcaaccgagtcttatccaacaactcataggagtatcaagttacaaggttttaaagtagcacagcaatatagttttgcactagattctctcatacaaacatgtcactgacaaaatataataataaggtgcagattgatagtagaattaatgactggtcattcttgacttttgcatgagcactttcatgccttatcaaaagtcacatctgtctaatcagaaaatagttaggtagtaagattttaaaaagtcactttcttttataagcaaagagaagtctgctttctgccctcgattcaaacttttatgagaaacagagatggaatactgtttctcgtaaaaaaaaaagatggaatactgtgataccaccacctatcaggcccgacgagcggtccactgtataggaaaatgggcaacaatgggactcctaactctttcttgaacatgcaggaacagtcaattgcaattaaaacagatgctattattgctaacttccttttaaaatgatgacaagacatgataaagattattagttggcaattatggacatgcaatacagatgcccaaagcaatgactaaaatatacctgcatgtttgaggaaatattgacaacataatggataggaggactcttgtctcggtagtggaatcccatctcagaaatagctacaagcttgacaatcaaaacagagtgaggtagttagctgtgtgcaatgctaaatggacttcatgtgcatcattacaatttacaatgtcgcaaaaacacatagacactgtcattatcgttcaccagttagacaattatacaaattccaagcattactatagtagttggacaaaatagaatttgaaggaagcacgcaaaaacaatgtgaccctttgacaagcattactgtagtagttggacaaaatagaccctttgaaggaacctaatgcatgcagcgtacacaaaaacaatgtgagcaacttgatgatatggtcacatactcatgtttcatgattcatcttgaaaaggtaaagtataattaaatttaaatattaaatagtagctccctaaaatgccatttatagagggatattgggtgataagaaaaggtactggtcaaattacgacaaattagaccaaagatcttatgtacaatcctgaccaaaacaataatccaatttaatgacttcattaatggcctgattgtttaaatttcgaagtagcggtatcagcccaagaaaaatttgcaaagcttaaacggatgtcacgtacagcttacagttgattttggtcattataaaaaaaaaatctattcccaaaaggtacacaaatccaaaaccaaaattcacctcatcaaaaatccactgacgagttccagaggtctggagcaatgctatgtatcggaataacagtccaataatgtcctccatgtgctctatcatcaatgatatgaaataggtaaatattatatacactgtaaatcttcagtacttaaaagtaaaatttgatcttccatcaaaaaatagtaaagtttgatcatatactatccacttagattgaaattaaggatttaccctcctgactctcatgtgagtgaccttgattaccccacgtcttttttttatgcaagagattaccccacatgtcattggcacaggagggtaaatcctcaaaaaattgttgttaaaaaggcccttcttgaatgaaactcaccatagcctacatctgtgagctgtataacaacattgaagaatgaaaactcataactccagtcaccttcccatgcatacaaactcatagcccatcctgaggaatttaacaaagacaaagttaaaaacaacaagcactatgaaagatatatacacacacccatacatagagagaaagggaggtgatcaggtgaggatgatacgtgggttatgtccacccattaagcacagtcaagtcactatttatcttctttattttgttgttgtttattattgattgttatggtggcattatcactattttcctacgtagactccacataggtcaccgagagacaccacggtttaggcacagaggggacatgtggacactttcgaaagttgagggaccaaaatcagaccaaggccatagtttaagggactaaatgtggaccttttccttttctttattgtgtattgtttgcctgttccattgaaactttactttgatttttccttgacaaacctaatgtcatttttacataacaaagtcaatagcttcttgtatcagtagccaatttttttgaggtttggctgcacataatctaaaaatgaaacctatttgaggaaggaggtcgcagtgaattattagcacaccacctaaagaggatattgctgttatacctaaatatcctcgaatgaaacattaaataaaagcaaaggaataagatttcatctccagatttttcctatataacagtacggaagaaccatacagagataaaagagttgaaaacaccacacgaaagcatatacatagaaaacacaaaagcatctggatatgtgcactacaaaatggcatctcaattggaaaagcaaagtaagactaattatatgcatttggatagtaattatatcagaccaagaaccagctcaacacgtcacctcgaaagatggatataaactccaaatcagtgaatcacataacacaatctaaagtagcattcttgaattaaatggcgctatcatgtctaaatgcttcatcaaagtgcgagtacaatcctgtattaagctgacaataaggtcagatattcacattaacagaaatacgtaatatcttgaagcaagaagcatagaaccagaggattttgtattcatgttacaccaaatagcctatggactgaccaaacagccccaaacccgtccaccagaaaagaagctgaacttctcatatatagcttacctaaattttttagcacgtaaaatagagacccctctccttcatggccaactagacgactcacatacttgcaaggcccttccttatagtgctgaatatttggggtgattggccactgtattctcaaagtgtggccttcttttatgggaaccgctttaacaatgatctgcaggtcattaactaccatattaaaacatgttaaagtatccttacatttcaaaagaagtgccagatccagtggtgcacttgacttatcaacctatttttagcaaatggaaaatataaacctggagatgttcacttgaacatggatgaccatgaaaggaaaaactttcccttccagtattcctgacatcagagaacttattttcaacaagattttgaaggttgtcaagactctctgcatacacaagttacacaacagataaaagaaaaaaaaataatttgaagaatttgtacacaaatgaaaaatataatggtgtaattcagtttgatgaaaacctttgccatacacaacaagttgcatcaaattagctgagtaatgtgaattataaaatttaataagctcttccagtgtgtccaatccttccttatttggattaaccagcaaagtgtccaggtttcctaaaataatagatgatcagaatattagtgaaaaaaatagtcgacctttctatcatgtaaaaaaatagcctcttatttggctcaagttaaaactcccacaggttttgattccagagaaataatatctaaaataattttaaggtgtaaatactccctgtcctgtatgtttgttagacttcaacaaagtaatctccaattcacatatttggccagtgacttttagtggtagtttaattttgactccactattctgaaacaacattattttttaagaacaagcacgatactgaccaacagaataaagtagaatcagagggcaggcatcaattattctcaaagtataagaaatgtcaaagtacttcatgtacaaacttgtgaattcagtgcttgttcgagcctatgtggtcctcgccaagagagggacttgatgggttagaaaaatagaggtgtatttgccagatctaagagttgcacaatctttgctcattcatcacaacctttgcccattcatataactaccatgcctcaccaccaaataaaaaaagggatacgataggtggtgctgagaaagatcagctagatgccgagtaatcttagttaggttgtgctggaaggcatgggccgacacaaggggagatgcaaaacatttgactgacaaaggcacaattttacgtgtttctatgtccttcatatgctattgtttcatttgtgaaatcagtgttttttcaaatgatcctcatggtccacatggatcaatatcaatacagaagaacttcaagaaaagatgtgtgtgagccttggatgacagaataaaccacaaatgaagagaatccatcatgaagattgagaataccataaaacaaatggaccatcaggtttacaaatgcagcctttttccttttggaatttggaaggatatatagtgagtttttttttccccatcatgagcaatataagggcattcaactagttaaaaacttaaactcagaagttcatatgacatggatattttctgcaacattacaaaacgaattcttgacttcagcatgcaatacttgtgagttgtggctataaaatgaagatagaaacatggtaccaagcatatagttgcaacatcagacactacaagaaaatgaaatgatgactaaaacacacaccagtgctaaacttgtgatatggatggctctccgagcaaaaatgtttctggagctgaaaccaaaagattatagacaacgaaattattatagcatgaaagagcatggtaacataaatgaatttgacagaaacaattgtaataaatcaaaaaaaaatcatattacaccgctcaagaagaaatgtaaaatataattaaattaggtagaaacatagatttagatgtcaaaaccactatcagagctgggttgcattgctctttaatttggggggacgggatatttttagtcggttttatacttttgttagttaaagtgtgatttttagataaaccctataaagtaaggggtgtaatatagatttatcccaaaatcaaaatagaatatgagtatgataccattcaactataacagaaaatattccactgcgttgatgtttttctaagataaaggtacctgactcattcgcaaaggatctgacaacaagtttttcttattttctgcaggtgaagaaaaaaaagacagaaattagaagttaattctctcagcagaaatgtcagttccagataagagagaagcaatatataccagagtcaacagcattaatttcccttagagttgcatcgggtgagatcaatggctttataaaaaattgtgcaaacctaaaacaacagacgagaagcaaaatgaatcagattctgcaaaataagaacaaaggtgaaaagaaagaaagcagtagaaggtacctatccaaagcatcatccaggcaactattgttcacatcaaaataaaagtttgtacgttcacgacatgtgaaggcgttggttgaaccaccatgctaaaagaaacatccatatcacacaattgatgatttcaaagtagagaagaaaacttaaataccatgatattctttatatgaatttatgaacaattatgccccctattctttaactatatcagaggccagccagacgatttggttttcccaattagtattgttaataatttaaaaggctaaacctctgcttgcaaatctccagtagcagcataacattggaggaacccatggttcaaggcttgaagcactgaaggtacagagcttcattggggccaaacttggcctacccaatgattgtacagtctatatgatacttcctccgtcccaaaatgtaggtattttttaggttggcacggtattaagaaagtaggtgagaatgattggaggaagtgtgtggttggttgaaaagagaaagtaggtgaagaagaatggttgtgattagttgagaggaggaggtaggtgaaaaaaatagcttcattttgggacaagatactgtgctagaaatagctacatcttgggacggaggaagtaagtacttgtatttggggcattttacttattaagcttcaaattggtcccatatggattaagccactcgtgcatcattagtgttgaaccactctcactctgccactgtaagcactggtgcaccaccgcaaactcgcagcagtaaatatatgagtttactcacaagtcacaagctggatactatagttacgtgtgcctattatactgttaccaactgacaactggtactctaggggcaaaagggcagtaaccatgattaaaaaaattaaactagattagctctacagatactgaatttctctaatcgcactctgcttaaagtactataaatataaaaccaaacaagtggcatctattggcataacaggaagcatccaagaacccccaaaatgtggtacaagtctctagtcattgccagtaaattgaacgtagactggacgttttgcaaagaatgcagtatgctgaagttcaattgtccttccaattgttctgaagcatttagattaagttttgagatcaattttagttcgatctaacaaattattgaccacgacaaatcaagatcacttacaaatgtcctcttcaaattaacagaacagataagaaattggccatacatacctctgcaatatactttgagtaatcgtcttccacagggtatttctcgctagcatagaaaagcatatgctctataaaagaagaaccaagcataagtgaatcaaacaatacagagacacatacatgttaattactgcaaaacacatgccatgaagctctctacatgcgatagtacaatccaaccaagataaaaaaacaattcaatgaggtttgaacagtgcctggtgatgcattaaaactctttaaaggtacacactagaaaatatataaaagagcaacatacaaaacaaggcaaattaaacatacactaagcacatcgatagcatgacacacagtgacacaagaaagttgtgcttactttatctgtccaaggaaaaatagttacaatgactagtgagtaaattaattttctaattgaataacagtgtctccttagatttttacaatcaccttaagtatccaaataatatgttcgaagcactctggtgtcgaaatgaacctcctattaatatatgccatccatttcaatacagaggcaatatagcatgtatatgtattacaatattagtataatagtttcaatcacgaataaaatttctgaaacatctgatccttcaatgaacccgtgagtttcagataagtaagccattttaaggcccaactgtatttttctcttaatgccctttcacatgtgggctttgacatctttgcagattaatcaagtaaatgattagctcatatacctttgaaggtatgggccattgtcgcttattagctggatattctgacagcacctatcaggagatattgatactgaattgatacattgagttgcacatgtgaatcaatcatctgtatattttcctggccatgctatacttgttttaatcttctcatccagagatactcagcatgatgctggaaattcattttcagatgttttgcatatatttgtgcacatattttacttatccaaaaaaatatatgaaaaagtatattttccttgcatattttctatgtgacaggggctgtgagaaaaatatgcatacctaaatttcgaccttcttcatctttattacattatcaattcaacaattaaacaactaaaaagggacatgtacatattgtaacagaaccaagccacaacctcaaacagcttggtgtaaaaagccagcaaaattgtagtggtaggctaatagcaggcctgacactgcaacggaaatgcatggagatgatagagatcaattgcataggcatcaaggcccgaacgcactgagattatcattactaacatcatgtacagtgagagccacttaaacggaagcagctaactacaacggaaatcatactagcatccgttcaagccaacaaaaaaagaaaatcatagcatccacgattactaatttctcagaggttttacgcaacaagtcaaaacaggaagctcaccaaggaaatgtgcaaggccagggagcctctcgggatcgcagaagtagcccaccgagacattcatcgacgccgccgcctgcaaacaaacaaagccgggattcacccattcaagccaaaaacccaggaggcaggcaccaaaacccccggcacatccccgatcgaaggagccagcgaaagcacggagaccttgtcggtgtcggggtcgctgacgaggaggcactcgagggcgttggggagcacgacgcggcggtacccgcgcttgtcgttgcggggcctggtgatctccgcgtcgccctccgccgccgccgccgccgagggtgcggccgcgaccgcgccgtcggacgacggctcggcgggggcgtcggtcgtcgtctcgcgcgctggcctcgaacccgccattgcggccgccgcggattcgccgccgctggcggtgggtggtgttggagttggagtggactgcgtccgcgaagacgcgaagttggcttggcagttggaacggcgagtaacaagttgtccccggagacaacgcgagagagggtggcacggcagcagtgggtggacctgcagcgcgggttggtggacttggtagttgggcacgtcaggagtgggcaaatgggctgggccggaatgccggatttgtgcacggcggcgtgcaccgggacatctttctgtttgaagtccggcgtgtaccgggacatcttactgtttgaagttcgaagtcaagtaaacgtctactcgaacgttcggaatttttacggaatgggaagaaaactactccctccgtttcataatataagccattctaacatttttcacattcatatggatgttatatgcgtagattcactaacatccatataaatgtgaaaaatgctaaaattacttatattatgaaacagagagagtagctaggtgtgccatagcagatgcagcatacaaaagaggcagcgagtagaaaactgaaacgcagcgaggaatgtgacacacatgcagagttttcaagcaaaatataagcgtcgcctgcttcggcagctttgctatactctccatgtgtagattgcagtgggagctgaatgtaactttctcgcggcacatggttccatttttcaggaagagataacgtccaaagaaacaacagcgagctcactgaaacggaaataaaatttggagctaaactaaggatctgtaggtggaaccgtggaactgtggaagcacctctgctctggtggttacgtcgtagggtctgagcccacgtaatgagaaaccacaaggtgatctccagtcgtcagtcacccttggtgccagcaaaaaggagaacgaaaggtcgtggcgatagaaaatggtggaatggaaatgcagaagtatcaacatctgtccacaaaaaagtttctttaataatgatcaaaattacacgtaaaaggattattcttttggaatttgcaagaatatcaaaagggttgacttatagcttcatctgaccaacacctcccttgtatgaaccatataaaggtctcgacctcctgaagttgaatatatctgttatttgataggaatttggtcgtggctcatcgtggactatcttttcgtactccgaggaatggagaccgccgtaaacttgaatactgagtatcttcttttgtggtgcattaactttgacatgattgttgaagaactctatcaactcctctttcttaagatccctcagtgcagcaacctgcagttacagaactccaggttttgaaaactgatactacatcagagggataatgtaaatatattgagcatacctccacttcttttcgatcaaatttcagagttccttccgaaatctctccccagaagaaagctgattcctctcttatattcttgtatttctccaacttcatgtcaatgagagcgttcacgttactctgcagataacagaagccactgtttagtccgcatgatgtttacaagtacaaaaccatgcaatttagctacggcaagctgtaatagaagccaatgattaacagtgagtcagtgacatcatctgtccaaccttgaattctgtatcaggcatttggtatagagttccttcaaacatcgtaaggaaagcttcaactctagcatccaagttggctggatcctgtcaaatcaatatattagaataggagaatgattgtttcagcgggtttgaaactgcattgagaaatatatctaccttcacggttgactggattataaattgcaaaccacggacacctgaatcatttctgggtaaacaggatcagtgtcaatgattttacaggaattgcatagtctacatatagaacaccattcttgccaaccaaggcaaaaagaccactgtacatcctatcaattacgtgaaggttgtacgtacttttgtctaagcagtgttatgtagccaagttgctcaactgaacgtaattggtgaaaagctggttgcttagcaacaagagcaagcaactggagtataacattttttttgagatcatcctgatgaatctgcgcaatggaaacattgttacaggatagtaatgtctattagatgtatctttccagggaaaaactataataattcaagctagaaaagaagctagagtaagagcaaggaaaaactgtaaatgcacagaaacaacacccaagaagtgaggcacacctgaatataatgcagaaggcaagaattttcatcctggtgatttaggcataatgctggataataatacctcaaacccctttcaagctttacaattcgctttgtaagatgctgtgatgagggtaatgctttgcacagactgacaggtgcattgaataagatgtcttcaacatgctgcataacaccttttaccgcacccggttccatgttccctaatatcgattatcaattacataatgaattaataacatcaacaatgcagagcattctctaaagaagagagtagtgtggctacaaaagtcattagcagcattacacggtaattttatgaaatgacacatattcatgttagttactccctccgcttcatattataagtcactttgggtttgtcctaagtcaaacctcaacaagtttgaccaagtttatagaaaaatatagcaatatttccaacacaataaatatgctataaaaatattatcgaatgatggatttaataagggagtattaaacaaaccagcaaagtagctctcaataaatgttttccccagcagatgaggcaaaaacttctcgagatcgctagcttcaatttgagatactgcagcaagttcttcatcccatgcccacgtttgctcctctaatatcaatgaacaatagtagaaagcttgctgatatggttgccgaaatttgaaattctcatactcctttgttatagtttcctgatgacagcaataaaagattcacaccctcagttcatgtcgaatgcatagaaatatagcttaatattgcatcatcaggaaggaccacaaaatattgtagaacataatatatactccctatgtccacaaatacaagggattttagagtactagctgtctaatcaatcacctctcattcaaatttcttcccatcttactcccacccaccccacccaaccctcattgaacatgagcatcctagtcttttatcttcatccttgatctctccaaaaacagagggagtatgctctttcacctctccaagatagcatagccatatagaaactatgatatgtttaatccaggtagaattatatagatgcttaaatatccatatgcacctggaaacagctctcctgctgtatatagctgttcagtcccatttttgcatgggaagatagtaatgacaaaaatgttgcatgtgtatgccactaaatgttttgcagatttgctcagattcctttgaattactttacctccagggaaaacaatttcagaagatagtgaggcaaatgtcttcttttataggtttttacctgtgtgccattaaaaaacatgacccctgcctctgtgccactaaaaagttcgagcctccctctatgccatcgtcgaactttatcgtgccctccacaccattccgtcgctattctgttagggtcttaaccgtttggcagcactgacatgtgggcccggacaggaaaaatgtcgctctggccctttcagtcgcgggccccacctctcatactctcacctctctctttcccctcttccccttttcctctttctctcttgagtagcgatggccggcagccggcggcgggcacggcgcccacccgcaggacgactcgcgcaacctcgtccaccttcctcgccggccaccaacctaccacgcgggtggggcccacatgtccgaggaggacgacgactagccgccgctgctgccggtgcagaagcggccgcgcgacgcgcgccggaccaggtgctcgacaacgtcctggagacggtgctgcaccctcgccgtcgcctttgcaccctcgccacgcccgccgcgcacccgccggcgagctcgcactcctcggccccgccggagaggccggcagtcgaggcgacgacgaggtggcgcggcgaggtcggcgagtaggggggtcgtcgtcggggatgtgccggctcctcgccgccgaggaggccgtggcgtccgcagccgccgccgccaccgtcgtcccggcgctcttcatcggtggcgccctccgtcctggctctctctctctctctcttttctctcaaccctaagggcagcaaagtcatttggctacgctgtttgacaccgttaggactaaaaacggacggaatggtgtggagggcgcaataaagttcgacgatggcatagaggaagtcttgaactttttagtggcacagaggcaggggccatcttttttaatggcacataggtaaaaacctccttcttttatctttgttagattcaaacagttcactggagacatcagggaaatgaaaaaatgtatagactgtacatgtatattttgatttctgatcaacaataagtattgtctacacaatacttactcccttcagtaaagaaaaaggtaaattgtgattctcggagtcaagacaatgcccactttgaccactagattataacatcatatgccctgagaaaagtacattgaccactgatatcatgcaagtacttttcatacaaattgaccaatcaaggcaagagatgtcattttacacgtttacgccaatcttaataagaatacacaccattatctaaagcagacatgcccaattgtccacccatgaatgcaaactaccgctttttcctaaacagaggtaacttgtggctaacaaggaacctcctgaatgtttatactcatccaaatagccaaatatcaggcctgaaaagatatttggtaacaacaaattacaagtaaactttagtgtggccattacctttatcacagaaaaacggtcagccttaacttcaaactcagcaattttcccaataacagtctccaaaagagttctcattttgtcattgtagccaaccatggttatctgtaaggcaatcataaatattggagtattagaaaagaagaggattttagtaagacacgtaacatgccatggggtctaacttctggagaaggaataatatcaacatcacaaaacatgcatgatgaaaaatcagggttatgcaatattgaccatttaatctaatagagagtatagtaccatttgtaatccacaaataagaaaaaaagaaaacaaatggagataaaaggccctgttctattcttcaactttctcgttttctgttagcacgtttttcaaattgttaaatggtatgttattttaaaaaattttctataaagaagttgtttaaaaaagcaaataaatccttttttcagatttataatagttaatacttaattaatcatgtgctaatgaggtttctcgttttgcgtgccataaaaatctatctccaaaactggagatcgaacggggccagatgtagcaacttatgaaaagattagatcatgtacatcttataaattaagatcatgtagtaatgaagtatttacaaaccactctcagtacttaactacatctagttaaaaaaatgcacatctattactatctccctacatattgcttccttgaacatgcatgagatattattgaagtgtaattccattgaattatatctaaattgggtttttgagcgtcaagccagtaaatactaatttgatgcacatcgtttggtcgaaaaatggcacgtattcaaaaaggagtagcttagtatcagtggaacaattcaatttccacattaaccagaaaattccttttttgaacccccaggaatttcataaaattttcacatggaacacttcaactccctcaggaatcagaaaaggaatgtgcttatcattatcaacagaagcccctccccccggcgggattaacaatgaagataaacaattgttatttcacgtgaactgcacagctgacctgaaaaccagtgtcatttggcctaacaccgtaataaagaccagcaacttgagcatcataagctgaaagcaaaacaaagctgttggattatggcaatgggtaaatcaatcaaaaggtaacttaacaaggagatgacaacgacaatgtgtttaacccctcgtttttctaggatgagtagtgtatgttcaggacggtgatttgttttaggcaaacagaaattaaggctctcaagcagaaaagaaccttttccaacttcatcattaatcttacctcctttaatatatcccctctagactatatgtctatcgtcagatcatcgtacaaagacaagtttaaaatacactcaaattttactacataccataatcatttaaataatccatgagcaaccttgtgaatacatcagtaagaactgatgattcaggagaactacgggacagtggacagtggaaatccatcttgatataggccttgggtgtgaagaacattgtatcaggtttataccacactctggaaaacagtgttttcctcaacatacaaggaaaacttgcctggataaaccaaaaggtatcaacaaacagtttataaaaacataattatgacttttttaaggtggtaaaaaccttctcctcggcatttttcaatgaaagatcacttggaaggaagatattaggttttggcatgtgcaaatcttccacgggagctttctctacccatttctgcacaaatttatacaaggaacttttatgtttccaaatatagaaattggataatataacaagaacagtaacatccaaatgtatacctgtataatggatggaggaactgcttccacagaatatgatgtaccataccacggctctgttaagtttgtttgcccttcaaattttttggactcccagaatatcctgaaatgagatgtggacgataagtatatgatgcccacagtaaaaaaaaaaaaaaaggtagagtgggaaaaaaatagctaatttaaggaatatatagagtgtgaaaggagaagagaaagcacatgaccattaaaaaaaaaactaatgaaaggaacagattggtttttgaaatttgacaaaaaaaaggggggggggcaatgtaagcaaagaaatttctttcaccttctttgacgaagaaataataaaatttctggcaagcaaaagttatcttcgttttttgacatgaaacagcaggagcatatatatatacacacacacacacatattaaatatatgaaagttctcttcgttagatcagttttctagaagtattacaaatttaagtcaacaagaacaatgaatctggtatcgcagagtgatcgaagagcaacactaaaagcatatacagtattctgttactgctgagataaccaatcaaatcacagtgactagtctgcattactgtatgagaacgttatatgcataagatcattatcattaaaagaatacacttttgttttgtaagttgaacggaaaatttctgtttgagattgtgtgcaatagatgtgctggcctgtgcactcgataagccctaagaaacatccttactgttcaggaagagaagaagtgaagattttgcaatgcagtaaatggaccgttcaaatcatcaaacatatgtggcacaatgaattacgataatgatgaatttcctaagaaaaataaattcagagtactcaagagaagaaaaataagtagattataactggatttaagtatggcaaatatgtgttcagataacatatgctgaacattaagtataatattcagtaactggtgttttgaatcttaaacataaccaggagaacctgatatgggcaatatggcatggtcgcactcagaacctacctaacattatcaggagtcaactcatttaatataccctgaatagcatctggggaaaattttgatggcacggacgatgcaatcagccaatcttccggcggatagatctgtaacagtgggagataacgggaaaaaacatgagatggcgatactgagcagaattcaattactgttttggaatgaaccatttggcagaatttattaggtgaagtggaaatgatctttcattgttcgatataaaatcacaatctgacattcttgtcagtttcattttgtgaaatgacacaaagtagccttcaaacaaacaaaacaaagttgtcacatttttagaaatgtccctcccaccgtcctgcccacttactctccccaaatccacatctcctccaaatcaaagatgcaagcatgtgaatctatagggcatttagacccatcagtgcaaaaagctccaatttttggtgcacatcgaaaaacttcggtttgctctggcagcaaagtgatccagtgatgaggaaaggccatggctgcataacaactactggcaagatgagttcttagcaactatgaagaggtagaattggaggaatcaaacaaagggaaagtggagatgtaataaagaggtacttgaaagaggataatggcaacaatgtgcgtgcctcgcctatgctggggtgggtgggggtgggggtgaaagtttacagaaaataatggaacatggtgactgtagagatgttaatactctgagatgatttctcactgacaaaataaatgaaagaatatcatcaatcttgatcttttgcatgagcatactcatgtcttatcaaaagccacccatccgcttagaaaataacccggtactaagattttgaataagtcactttcttctaagcaaagagatgcctactctctgccctcaatccagactttgaagagaaaaggcggaacagtgtacaggaaaacaggcaacaatgagaaattactattgatacacacacaataagaaacaatgatttaaaatagtgaaaatgcaaataaaaatagatgccattattgctaacatcctatagacatgcagatagaacatggtattatcaacatgcagtgctcaaagaaatggctggaatatacctgcatgtttgaggaaatattggcaacataatggataggaggacccttgtctcgatagtggaatcctgtctcacaaatagtttgaagcttgatgataaaacaagtgagatagttagttgtgagcattgcaaaatggactagcgcatcatcataatgtttcaaaaccaaattgactcagtcggtactgttttaacagtcagataaaatacaaattccaaccattactatactaatgacacaataaaccatttgaaggatgcacccatgctttatttgcacaatagaggaagcagttcaagtatagcctcaagcagaagacatatttgtctgtaatagaatgacaatcatgcaataattacttttccctccagttcttttttgtaaatactgtacattttccctctccaaaaccatatacagttcgtccaaaatgctaatggccaattaataaggacaatgaacctcataaatgcagagcgaacaaaaaaaaactgtacgagtcttctaggaagatatggcatgtttcatgattcctcttgaaagtgcagaacataataatttaattaattaacaaagatcactaaaatgccactatagagggatagtggaagcagaaaagtactaataatactaaaataaattactccctccgcccccaaaatatagcaacttctctaccagcacaaccttccccatctagttttacctactttcttaataaccatgcccaactctaaaaatccttatattttgtgacagagggagtactagatacaacaatagaagatattacatgtcagatcaaaacaagaatccagtttaatgaattcataaggtcatttgtaacaatttgattgtctagatttcaaaagatagcactaccaactcaggaagacatgtgcaaagctttaagctgatatcacataagataacaatcgattttggtcattataacacattctatttccaaatgaaacgcaaatccaagaccaaattcacctcatcaaaaatccacttcagagtgccagaggtctgaagtaatgttatgtatctgaacaacagtccaacaatatcctccatgtgctctatcgacaataatagtaaatggaaaatatcacttgcactgtaaagattcaatattaaaaaaggaccttcttgaacgaaaactaaccgtggcctacatcagtgagctttatgacaacactgaagaaagaaaactcataactccaatcaccttcccctgcttccaaactcatagcccaacctgaggaatttaatggaatacaattatacaatgttaaaaacagcaagcactatgaaagattataaattgaacttccctgaaaaatgagcaagtaaactatgtaagattaacataaaccaagaaattatataaccaaatctttggttttccttttagtgtttccatgtattgtttcaatgggggtgttcttgtacttttctttatcgtgtactctttcatttgtttcagtgaaactgtagttttattttccatgagaggtttaatataatttttgcatgacaaatgtttgcaccttttgcatattaatactcagtttgtacagtttggctgcatacatcccaaaatggcacctatttgataaaggaggtagtgaaatactaatgtgccacctaaacaggaaatcattccaatatgtaaatagttttgtacggaacattaactgaaagaaaagggacaaaacttgaagttgcctgtatataatactagtaaggaagcaccctacagagattcattaggtgaaacaaatatcacatgaaaacatatgcctaagaagaaaaacacaggaggcatcctgccatgtgcactgccaagaaatgaaccaattagaaatggcaactcgatgggaaacagggaaagccaagctaaggctggttagatgcattacaatgctacaaattagaacaagaccaagaaccagcttaaacatgtcacttggaaaatatggatagactgaatccattaatcacgtaacacaattgaaagtagtataattgaattaaataggattatcatgtctacacattgcatcaacataaacaatagaaaggttggactgccagtaagatcctgcggtaagttaacaataaggcctggtattcctattaacagaatcccttgaagcaagaggaacattacaagaggattgtatactcaagttccaatggaccaatcaaaaaccccacaactcactcatcacaaaataaattgaacttcttgtataaaacttacctaacttttttaggacataaaacagagacccctctccttcatggccaattagatgactcacatacttgcaaggaccttccttgtaatgtcgaatatttggggtgattggccatagtattctcaaagtatggccttgtttaatgggaactgctttaacaaggacctggaaatcatcaaatatcatattaaaacttgtaatatttcagaaaaatgcacctgattgaagcaatgcacttgatctctcagcccattattagcaaatgataaatgtaaacctgtaggtgttcacttgaacacggatgaccaggaaaggaaaatcgttcccttccagtattcctgacaccacaaaacttattttcaacaagagtttgaagattgtcaagactctctgcaaacacaataaatataagacaaaatataaattgaagaatatgtaaaagagatgagaaaaatagtgtaaagtagtttgctgaagaacctttcccatacacaacaagctgcatcaagttggctgagtagtgtgaatcataaaatttaataagctcaagccttgtgtccaatcctttctcctttggtttaacctccaaagtgtcccaatttcctagagcaataaatgatcagaaaaaaatgaaataaataacatttcaacctttctagcatgtaaaacataagtgtcttgtttggttcacattaaaactcccatggattttgatttcagagataaatctaaaatactattacggtgtaaatattcctgtctcataataagtttgctacaatttacaactttcaccagtaacctttcgtagtagtacataacttttactctgttagtaccttttttttgcgggaaggtaacttttagtacctactccctccataaaaaataaaatcgatttttttacacaaatctggacatagtgcatgtccagattcgtgtataaaaattgaattattttcggacagagtgagtaacttacaagtgtttcttaaaaaaacattgttattatcaaaagtttatgtttgactgcactattctgaaacaacattattttaagaacaagcacagtattaccatgctggcaacttaatgaagtacagtagaataagagggcagatatcagttattctcaaagtataagaggcaccaaagtaatccatgtaggatttgtgaactcaatggctgtccgagactatgctgttctcgccaatgataggaaattgatggtgtacaaatagaaatatattcgcctgatctaagagctgccgtagtgttctcccattccaatcacttccatgcctcaccacaaaatcgaagggagatgccaggtagtgttgcaacatgttaggtagatgctgagtcatattagtctggctccactgttgaaaggcatgggccagcacaaaatgtgaaggcgagcatgcaaaacattttactcacaaggacacaattctattcgtttctatgtccttcatggctattgtctaatttgtgaacacagtgcttttgcaaatgatcctcacagcccacatgtgtcaacagccaaacttcaagaaaagatgacctgatcctcagatgatagaatgaaccaccaacgaagggaatgcatctctttcaagaatacatgtagactggaaacataattatataaaagggctgtccagtttaccaattaaggcttattttctcagaagaacatacagtaagttctttttatatccatatcgatagaagagaattcagctagttaaaatcagaagttcatatggcacagacattttctgcaacaccacaggatcttatcactaagttaaatgggtgaagtctaacatgttcttgaaatatgtatgagttatgattataaaatgaagatagaaactaggtagcaagagttgcagcgtccactgctgacatataaatcagatactacaagaaaatgaaatgaggattaaaacacacaccagtgccaaacttgtgatatggatggctctccaaggaaatatggttttgaagctgaaaccaaaagagaatatagaatgaacagaaacatcataacattaaatgagatgagtaacatctatatctttcaatttaaggagcactacacactatcatataaatacattatcgcagcaatcacattaacatgagggtggcccgactatcaggaataggcaggtcaagcctctaagtggcgaattgcagcctcactatcctaatgagagatgcacaagtaggcaagaaagtaataggtatagtagttttctagtttctagcatctctcttagcatagaacaaagaaataaaaaactaaaagcaataatattttttgctggaagacagagtgacgagcagcagccaggcaccctagcatggcagaaacttcagaatgaatgacccacatattgttctttttcttgctatctgaacacctaaaaagttaaggacaaatggacaacttccatgaaggtaataagggaatgtttttgttcaaactttaaacctatgctcctggtgaggtaagtcatgagccaaacatatactgttacagtatgtcaagcgaagtcaagcacctcaggacaatggattgataactcaacacgcaagtttggaacagtcaaaggcggttctaagtttatctctgacgatatacaaattattttgttggcaaacctttcctagaatcacaacactcttgtcagtaagcaaaacttgtagattcaaccagagatgacaatcagtttcactaggcatatgtttctgatgaaagatcttctgaacaataatacgaaatgcagctatcaggatatccttgcttcatggcattcaaaacaagaacaagaacatcgaatctaacataagattgatagctacagcaatttagaatgaaaaaacatgtaggagtagatgaatttcccaaaaataattgcagtaaatgaaaatgacatatgaatacggtaccattcaactataacagaataagattccactataataatgttttttgcctttttaacagtaaggtacctggttcattcgccaaggatctgataataagtttttctgattttctgcagacagagaaagatcgaaattagaagttaattctctcagaagatctggtagatctagataagagggaaagcagtatataccagagtcaacagcttttatctccctaagagttgcatcggctgacagtaatggctttatgaagaattgtgcaaacctaaaacaagagatgataagcaaaatgaatcatattctgcaaaataagaataaaggtaaaagaaaagaaagcaacaggaggtacctgtccaaagcatcattgaggcaatcatggttcacatcaaaaaagaagtttgtatgttcacaagttgtgaaggcattggttgaaccaccatgctataaagaaaattcccatattacacaattgatgattcatagtagaggaaatacttatagatcatgatatttttgtacgattatatgaaacaactatgcctcccatcaactatgtgaaaggccaggcaggtggcttttccaactagagctgttaatggtttaaagggcccaatccctgcttaaaaattccaatagtaacataccctacaagaactatattgtagtgtgaccaactggcactaggggaaaaaggaagttatccattatcaaacataaactaaattaatcgtacaaatatagatatactctaatggcactctacttttaaagtactataaatgtaaaattaaacaagtggtatctgttaagcatacagaaagcagccaagtacctccataatgtgctacaagtctctaatctttcccaagtgattgagaatatttatacatagaatgagagattacactacattaactttcagctgccacagacccaacagtcatggaccttccagttgctctcaagcattccattaaaaattggattcaatttgtgttcagtcgaactatagaccaaactaagatcacttacaaaacatcgttttcagatgaacatgacaagtaaaaaaatggcctggtaaaatacatacctctgtaatatacttggagtaactgtcttctataggatatttctcactagcatagaaaagcatatgctctacaaaagaagaaacaggcataagggaatcaaacaatacagagctacacgcttatattacaatacatgccatgaaacttttcacatgtgatagttaaatccaaccaagataaaagaaaacaacgcaatgaggttaaaactatggctattaatgtgctaatactcttttaaaggtacatcctacaaactatactaaaatgcaatatgcaaaacaagccaatatgtaactgttcaaattaaacatagactaggctcagaaacagaatgacacataagaaagttgtgcacttgcacttactttacttgtccaaccaaaggtaaatacaatgactattaagtattaaggaaattaattttctaattggataacagtggcacaccagatttttataatggtagtatccaaataagatgttgaaaacaatctggtgctgaaatgaactttttattaatacgtatcatccctttcaatacaaatacaatatctcaaacccactttgacatatttatactgcattagtataacagtctccagtcccgaatgacactgttggtacctttgttctttaatgaatctcatgagtttcagataagtaggtcattttacgtttcatcttttttttttcttttttttttttttgctctctgacactttgcaaattcactaacaaaattttagttgcttattagctggatattctgacagcacctatcataagattctacaatctccgtcccaaaataacttcattttttacccatcagacacataccaatacaaaagcaaaaagacaaaaatgccctctactttatcaaatccgaatgcggttgttcccaaatttatctagtcccaatgcatttgttccccacttccataaactccaatgcaatgattgcttgaaagatgaagctattttgggacaaataagatgatgaaaaatgaagttattttggaacggagggagtagtgttgaatttgtacatttttttacatgcgagaatcatagttgaaaaaaccgaaccggatcagcagcttaaccgggaaagaggaaaaacagaaccagtttctaagctcgggtcagttatgcgctaggaccattcatgcatttcagaccactttaaaccatttcaaccatcaggtttcacggtaaagtagtgaaccgatgtcaaaccaggactggttgaaccagctgagtttgggctgcactgttgaaatgggtccagaaggaaggcccaagttctcatcaaggcctccaccaacttcatttattctaaatatttgtgataatagctcgagggcagggagtccaaccttggtctctgaactgaacaccacctcttgttgctatcctgccatctcataacttgtgtttgtaccagtagataaactacacagaacagtttgttgaaccgtgtaccactggactagtgaactagcttgggcagttcgctcaacaggtccaatatttttttgctatggtgagagtcaatcatccatgcattttcatggccatgctatacttgttttaatttctcatccagagatactggcaagaagctggaaatgtcttccagatgttttgatggatgtgatcccaaaatcgcaaaagtagcaagctgctgtctctagacctaaagtatttttttcttgcacattttcatatggtatgcctgtgataaaaaatatgcacaccaaatctcgattcttcatgttcatgatcaattcaacaacttaaagcaaacatgcttgttatgactgtgtcagtccacaacctgacaacctaaaacaatcttatgtaacaagccaaatgtagtggtacggtaagcaagcctagcattgaattatcatcactaacatcatgtgtagtgattaccacagcagccacgactaccatattctcaggtcttatgcaacagctcgaagcaggaaaaactcaccaaggaagtgcgcgagcccctcgagcccctcgggatcgcagaagtagcccaccgagacgttcatcgacgccgccgcctgcaagcaaaacaagtagtcgcgggattcaagccaagccaaaaccccccaggagataaccaaacccccttccccatcccgatcgaggtagagcgcggggcgagcgaagcgggaagaaccttgtcggtgtcggggtcgctgacgaggaggcactcgaggtcgttggggagcacgacgcggcggtacccgcgcttgtcgttgcgtggcctggtgatctccacatcgcccgccgccgccgccgccgccgccgccgccggtgggaccgcctcggcgggggcgtcggtctcggggggcctcgaatccatcgcgtccgccgccgctgactcgccgccgatggcgtggactggctgagtccgcgaggcctccgggcggttgcggttgggttgggtttggctttggctttggcacggcgagaccgcgagagaggtgggggcggtggatctgcggcgcgggtggtggacagtggactggtggttaggcacgtgaggggtggggggggagatgggctgggccggaatgccgccaggtcagcgtgcgtgcaccggggacatctttctgttcgaagttcgagtcaagtcgagtaaacgatttgtcagttttctccgaatttccagtggcgtgtctagaacgttggaatcaaaaggatagtcactggacagtatggttgtgtttagttcagcgcaaagtttaaattttggttgaaattggagatgatgtgactgaaaagttgtatgtgtatgacaggttcatgtgatggaaaatgactgaagtttggatccaaactttgaatctaaacacagcctatgtgaaaatatagaatatggtacacgattaaattcttctattcccttgaaaacctgaaaagtggctgaggacctctttcctatggcttataagccaacgctaaaatttatcagcttcaacttttaaaatgctaaggacacctatataaaagttttacttatattatttttaacattgataagctgttacggcttatagttagccataagcaactgatacgaatgatatgaacttgaagaaagccattcatcaaatcgctggaatgcaacgtgacaaacaaccaaatttggcacacatgcaagagtacatttttcccatagtaatgcatagaagctacgcagtgcttaactgttcattaataccatgtgtaagagagttgattgtcatcagatgtaaataaaacttatttcacaaatagacccctgaaaaaacttattctataaatggtcctttttggacgccagagtcactggcgttgtcctattgccaccatagcgggtcacattgacatggcaaggggagcgtgccaatgaggttggtgccgcccccctcctccccccacccacgccattttttttcctctcctctatagtgtagaggagatatgtgcaacttttttattttcttttattttttttatatatttttttcacattgaagagcacacaagaaccaaccatagaaaaattaaactcaaatggatgaaatatgtgacctatagaattttccaaagctcaactgaaaagcttctcgcctcgaaaacacaatcttgcaagcgaaatttggagtttctaattttgccaaacccaaaaagcgggggagaatcggatgtaattttttttacatatccatggatatataaattgtctgattccgagtccgtatgaatgcctattaaaataaaggacactcaaatgtaaaaaaaaaaaaaactcaacaaacccatttttttatagaatgtaaaaaaggcaatgtacaaacttttttttgtttttttactataggaaaaacaaaaacaaaaaacaacgagtgaattttaggagaggggagagaggggggggcgctcaaggggggagggggcggcgaggctagcacgctcctcctggcacgttagtatctgaccgccacggtggcaggggcgacgccagcgacgcgtctcaaaaagaaccatttcttggataagtttttttagtgatatatttgtgaaataagtttttcaaaaaactaaattgtgaaaaaatccagtcttcttctccccttccctctctccttttctcatgcaatggggtaggacttgggctgcgttcgagagcatgggttgagaaccctccctctcatgcacgcaaaataaagcgactgtttaatgcatgattaattaaagtgttagcttaaaaaaacttgaagactgaattaatatttttctaaagcaactttcgtatagaaaactattgtaaaaaccacaccgtttagcaatttaaaatgcatacacgtgaaaaacgagagaggtgagttgaaaaaatcggggaaagaactcagcctaaggagggacttgagtcccccacactcacgttggatcagcccctatttgcaagttgctacacttgtgaatcagttctactgggcaagctctggtgatgaatgtgaaacctcataattagaataaaaaaagaatgctgctcgtcaacgctacctttttttcctccttttcttttttttttttctcaccaagttggtataagatacttcctccgcctcgtaatataacagattttgacattttacttatactgtttgatcattcgtcttattaaaaaaattaaaattattatttattttatttgtgacttactttattttccaaagtattttaagcacaatttttcgtttttatatttacacaattttttttaataagatgagtagtcaaacagtgcaagcaaaaaatcaaaatcccttatattatgggacgaaggaagtacgatatatgtgcatacaactgatggtattttttctgctgaggtgcgaattgctttttttccctatgttttcacaatgaaatttgatacgttgaattctggtaatctcaccactcaaaaagaggtgattgaactcaaacccttttgcaaccaaccaaacaaaatatcttcaatacaagatcatttcatacattcatccaaacaacatctcgctacaaccaggatcaaccaatccagccaaccaaacaacctcgttaggatctactcagccaggctatagtcatcctgactcatacgagccaggctagcatgatgcgagcaaccaaaaacaccctaggtgatcactagtgtcacggtcaccctcggtgccagcaaaaaggagagtcgtggagaaagtgtcgaaagaaatacatgcaattttgtctaaaaaaaataagaacagatgaaattacatgccaaatttcgctgcatacacaaatggaaaccaactataaaatccccaaattatatatgctaaatcatccacactaacaatccaaccatctccccaacaggagatttcagtaaataaccaaatacaacgctggtgctaatcatttgattccttattaccgcagagattattctttcggaatttgtaaatatataaaaatgttgacctataacttcatctgaccaatacctcctttgaatgaaccatataaaggtctcgacctcctgaagctgaatatatcggttatttgataggaatgcggctgtggctcgtcgtgaactaccttttcgtactcgttggtgtggagacggccgtagacttgtatactgagtatcttctttcgtggtgcattaactttgacatgattatcgaagaactcaatcagctcctctttcttgagatccctcagtgcagcaacctgcagttgcagaactccaggaattgaaaaatggtacatcagaggggcgatgtaaagaaatagggcctacctccgcctcttttctatcaaatttcagagttccttcagagatctctcgccagaagaaagctgattcctctcttatattcttgtatttctccagcttcatattgatgagagcattcacgtcactctgcagattacgcaaatcactgtttattccatataatgtttacgagtacagaaactgccaatgaataataatgacagcatctgttgaaccttgaattctatatcgggcatttggtatagagttccttcaaacatcttaagaaaagcttccactctggcatctaggttggctggatcctgtcaaaccaacatattagaacagaagaaaattgtttcagcatttaaaatcgcattgagaactctatgtaccttcacagttgactggattgtaaattgcaagccacggacgcctgaatcatttctggataaacaggatagcgtggtcaaatttttaagagggattgcatgctacctggaaaacattattgcaaaacaacacaaacaaacaagatacatcttattatgtacctttgtttaagccatgttatgtagccaagttgttcaactgaacgtaattggtgaaaggctggttgcttagcaacaagggcaagcaactgaagtagaacattttgtttgaggtcatcctgatgaatctgcattgaggaaacattgttacaggattgtaatgtgtattgggtgtattaaggaaaaactataataatgtaaggtaataaaagaagctagactgcaatgtttgtcatatgtttgagagttggctatcatgtgtccccaaagagatgaggaatctgcttttgatgggtgcaacagctctgtgttgatccatttggctaagcaggaatggagtaatttttgataataagatggtgtcttctcctttgtaggttatcactttagttactcggtggctacatacctgggctatcctccaccaaccgggactgcgggatactattgccgtggtatcacaacagttggaccaggtggcgcatgagtttttttacccaagagcatgggtggcggtctagtctatggattgatagccactaagatatatgtttatgtcaaacttttgtgcttgggagatgttctgattgtttctttcttcttttttggctgtgtgcattttatgcagaggccgggggtgactcagtttgtttgtatcatcttgatgtaattaactgagtctaaataaagcttccattatctaaagaaactgctagagtacaaaaggaggggaaaactgtaaatgcacaagaaataaacggaaataacaccaatgaagtgaggcacacctgaatataatgcagaagggaagaattttcatcctgctgatttaggcataaagctggataataatacctcaaacctctttcaagctttacaattcgctttgtaagatgctgcgaggagggcaatgctttgcacaaactgactggtgcattgaataagatgtcttcaacatgctgtataacaccttttacctcacccggttccatgtttcctaatatcaattacataaaaaagaacatcaataatgcagagcattctctcaatgagtagtgggagaaaaagggtcattagcagcattacaaggtaatataaagagcagtactaaagggcctgttcactttgatgctattttcaaccttaccaaattttggtaatgttactaaaaaagtggctacatttagtaggttttttttggcatcaaagtgaacatgcccaaagatgagggaaagtagctgtgaattaacattcaagttattaaacaaaccagcaaagtagctctcaataaatgtcttccccagcagatgaggcaaaaatttctctagatcactagcttcagtatgagaaattgcagcaagtttttcatcccatgtccatttttgttcctctaatatcaatgaacaatagtacgatgcctgctgatgaggttgctgaaatttgaaattctcatacgcctttgttatagtttcctgatgatagcaacaaaagatagaacaccctcactttatgtcaaccgcatagaattctggtttaatattgcgtcatcaggaaggaccagaatgtttgtaaactgtagcaagtcattacctttatcacaacaaaacggtcaaccttcacttcaaatgcagcaatttttccaatgacagtctccagaagggttctcattttgtcattatagccaaccatagttatctgtaaaacaatcataaatattcaaggattagaaaagaagaggattttgtaaaaaatatggctcataacatgccatgagttctgagttctgactcctggagaagaaacatttgaatgatagatcacaatttacgacacgtccataataaagcttcaccacatacaacaatgtcaggttgctaccacacgctatacatgaaattaacagggattaggcaatattaaccatttaataattgagaatctaatgccatttgtatctgcaaataaggaaaaaaataaaataaatggagataaagctgctgtgatgtgagactgtgacttgtgaaagcgtaaaatcatgtatgtcttctatactccagtactactactaatgaggctttataagccagtgcctgtacctaaccacatccagttaaagatctgaagcagtatgtggaagtaagaaggaaaatagttcaagggtcaacactgacaatggtatattccatgcttctatatgcaacaggaatcaggattatgatattataatgatttaagtaagaatcaaatgacaagcatctgcttattagtaacatactatcatcttatcacatttatgcaaacacggtatgtgtttaggacaaaaaatgtttatgcatagaaacactgtcagtactgcatcatctggattaggaacgaagataaacaattgattatttcatgcaaactgcacagctgacctgaaacccagtgtcatttggcttaacagcatagtaaagaccagcaacttgagcatcataagctgaaagcaaaacaaacttggtcggttattgcaacatggaaataaacaaaggcaaactaaccaggggatggcaatgtccttaatcgctcgattttctagcataagcagtgtacgtagaggatgagttttttttccgccaataaaaagtacccaggctctaaacagaaaagaattgtctccaacttctatattaatctcactcttgcatatgtcctttctaaaatgaattatatgtgttagactattgtatcaagagaagttgggaatacattgtaactgtttatgaaactatgccataagaatcataaaaaaattaagacatctctgtattactgcataccataatcatttaaataatccattagcaaccttgtgaacatatcagtaagaactattgattctggagagctacgggacagtggacagtggaaatacatcttgatgtaggctttgggtgtgaagaacatcgtatcaggcttataccacactatggaaaacagtgttttccgcagcatacaaggaaaacttccctggataaaacaaaagatatcaataaaaagtttcccaaaataaaattatcaatacgttttaagaaaaaataccttctcctcaacattcttcaatgaaagatcacttggaatgaagatgttaggttttggtatgtgcaaatcttccatgggagctctatttacccagttctgtacaaattatgttaggaacgtgtccacctccaaacacatagattggaaaatatgataggaagagtaacatccaaattacatgtacacctgtatgatggaaggagggactgcttcaactgaatacgatgtaccataccatggctctgttaagttcgtctgcccttcaaacttttttgactcccagaatattctgaaagtaaatgtagaagacaatcgatactacgtaagtattaatgcctttaagtaaaagcacaatgaaataaaactaaacaaatacatacatcaagtgcgtgaaaggaaaaaaggagatggttgtgataggatcaacttcgtgaggagcctcttgctgttttttggaattataacagtaaaaaatgcaaatggactagtgatgaaatttcctccactttttcgtaggaaaaaacttgaaatttatgtaaagcgaaagttctctttgttgtgtcatccttctagaagagttatatagtgtcttacaataggttaagtcgaagaatctgaagcaacagctaagtgcaaagcctgaataattattttccagacactacatgcggtaattgaagagcaacaataatagcatgcattatactgttactgctgaaatgaacaatcaactcacagtagctagtccccagttctgtttgataacattaaatgcataagattactgtcaaatagaatacattttaagtatgttcatggtttcatactgatctgaaatgaaaacaaaaaacagagtataacttactaaaatacatataatatacctgtgtaactaacatatgctgaacactaaaaacaaataaaaaaaaacatgactggtatctcaaactgtaaacatagcagaaaaaaaccttatatgggccatacttacttaaaacctacctaactttatctggagtcaagtcatttaatatactctgaatagcatctggtgaaaactttgatggcacagacgatgcaatcagccaatcttccggcggaaagatctgtaatagagggagattaggaaaagtcatgagacgatgatactgagcagaactcattttgtaatttatgaatgaacattctggcagaatttattaggtggaactggccatttcattgttcaataaaatttgatgtctaaccttcttgttaatttcattttgtgcaacgaataaaagtatcctccaaagatcactcaagacggttgtcacatttttcaaaaatgcccctaccttcttccctcccacctgctcactctccccaggaccatctctctttcagttcacatatattttcaaacttttttgagggcatatgcaaatttaaactttgggggtcttccaaagctcagatttttttttgtcacaccataacaagaatcatgaaggaatcataagctacacagaagcctagacctagagccttctcattacccaagaaccatgcaccactgcatcgtcactgccaggatcacctttttcctcagttacttctctggttctcccttctcgtccctgatcccactaatgctagagaatacaagtatccaaaggctatgactagagattgccaagctggggcccaggcattcaccacattggtctcttactcttagaagccacatcaaccaccttgaaacatactgcagtcatgcgatatggacttattcagtgacaaattgtagagagaagggagttatctggtggaatacagtgcatattctcaaatcccacccacacatccctaggaattctccccgcaaaaaaaaaaaaacatccctagggattcaaccaagtcttatccaacaattcataggagtcatcaagcaatagggccttaaagtatcacaagaagatagttttgcacaagattcttcctcgtacaaacttgtcactgacaaaatataatataaggtgcagattgatggcagaatgaaagacaatgtccattcttgatttttgcatgagcactcacatgactaatcaaaagtcatatccgtcaaatatctaggtagtaagattttgaacaagtcaatttcttatataagcacagagatgccttctctctgccctcaattcaaacttctaagagaaataaaggtggaatactgtacaggaaatattgacaacatatacctgcatgtttgaggaaatattgacaacatattggctaggaggactcttgtctcggtagtggaatcctgtctcacggatagttagaagcttgacaatcaaaacagagtgaagtagttagctgtgtgctatgcaaaatggacattatgtgcatcattataatgtctcaaaaacacattgacttagtccttatcatttaccagttgggaaattatacaaattccaagcaataataatatactagttatacaaaataaacccttttaaggaagcattaatgctttgtttgcatagtaaaggaagcagtgcaagtatattgcaagcagaagaaatttgctagtaggatcaacaatagaacatgcacaagtactcctccagttcttttatataagttgttttagacagtaaacttctctcctgaaccatctacattttgtcctaacttctaacagccaattaatgtggaacctaatacatgcagcacacagaaaaaacatacgagcaatttaggacgatatgctcacatattcatgtttcatgattcatcttcaaaacgtaaagaactatttaattaaataagaaaaaggtagctccctaaaatgccattcacagagggatagcggaagctcaagtaaaagtactgacccaattacaacgaattggacataaaaatacatgtatcctgaccaaaacaattatccaatctaacgacttcattctgtcgtgtgtaacagcctgattattcaaatttcaaagtagcactatcagcgccagaagaatttgcaaggctcaaactgaggtgacaatcaattttggtcgttgtgacagtatttccaaaaaaaaaaaaaatccaaaaccatagttcacctcgtcaaaaatccatttaggagttccagaggtctgaagcagtgttatatatctgaacaacagtccaataatgtcctccatatgttctaccatcaatgatatgaaataggtaaatattacatgcatcataaatcttgagtataaaaaggcccttctggaatgaaactcaccatggcctacatctgtgagccgtataacaacactgaagaacgaaaacacagaactccaatcaccttcccctgctctcaaactcatagcccatcctgaggaatttatagaatacaaagttaaacacagcaagcactacaaaagattatagattagattttactcggtgaagaatgagcaagtaaaccatgtaaaaataatataaatacaggaaactatatagcagcaaaaccaaatcttgtctttcctgaagaataataaagcattcaaaactaacataaacaaaggaaattatatagcagtaaaaccaaatatttggatttcctattagtgctttcatggtttgttcaaaagaattttcttgagctttactttagttaaaagtccatatttggtcccttaactatggcatcggtctgattttcatccccaactctcaaaaccctccacatttcatccatgggcccaacagggtttgatgtatagatggccatatggcccgacggcccggcccaaggcccggtgatttggcccagcccgactcaggtcgtgcccgtgccggcccggctggacagtcgtgtcgtgcctgggctgctacctcggcacgctgggccggcacggcccggcacaaagttcagggatgcgaaacagacgtattttcaaccatatgtaaggcatggcacaaagaatagggaggaaaaatagacgtattatatggcacggcctaaatagtagggacgtaaaataaacttattttagctatatatatgtcacagcccaaaggagggaggggaaatagacttatttcaaagaagacacgatgggccgcccatgccttcgggccggcacggcacggcccgactgctggtgggccgtgcctgggcctgaggtgcagcccgtgggcaggcacgacacgacccgaccgtgccgtgccagcccgatcgcctcgggccgtgcctagcccatgcctaggtcgggcgggccttatggctatctatagtttgatgtgccaccacatgcatcatagttggcaaattaaaaaacaaatatatgggttctagtattttctttttctattgtttacttttgattattatggtgaaatttttcattatttgcctatgtagactccacataggtgccacatcactgaaaattgtcccggtttaggcacagggatgaaatgtggatggttttgagagttgagcgaccaaaatcagaccaaggacatagttgacggatgaaatggggaatttttccttttctttattgtgtattgtttgcttgttccaagggaacattagtttggcttttcctaatgacatttttacataataaatattaatagcattttgtatattagttacaaaagtttttaaggtttggctgtacatataaaaggcacccatttgaaggtggtatgaattatcaatacaccacctaaagatgatattgttgttatactttctccgtcccataataagttcatttttagctccttccatttctcctaaaaataagttcatttttagagtaatcaatgcgtcagaatttgtgaaagtagaaaaataatagtattgggagtagataaagtaactagtaaggaatagttgcattgggatttgataaagtaggggtattctagtcttcttagttttgtattggtatgggtaagatggatgcaaaatgaacttattttgggatgagggtagtacctaaatatcctagaatgaaacattaactgaaagaaaatgaatttcatctccagattttttgcttatactccctccgtccctaaatatttgacgtcgttgacttttttaaacatgtttgaccgttcgtattattcaaaaacttttgtgaaatatgtaaaactatatgtatacataaaggtatatttaacaatgaatcaaatgataggaaaagaattaataattactccctccgttccaaaatataaggcacaaccacccttactccaaagaccaagaaacaattattatcacctcctaatttgtatcaccctaataaataacatgcatgcacccaatagaattagagatcttgatggtggaggacttaaaaaaatcataatttaatggagaaaagatactaactaattgcatacatgcatgcacgccttatattatgaaacatctataaaaagtagttgtgccttatattatggatcagagggagcacttaaattttttgaataagacgaacagtcaaacatgtttaaaaaagtcaacggcgtcaaatatttagggacagagggagcatatgaaagcagggaagaaggaagtgcacagagataaattaggtgaaaatgacaccacatgaaaacatatgcataacaaaaacaggcatctgtacatgtgcactacaaaaacattagtaatcaactgtaaaatggcatctcaatgggaaaagcaaaataagactaattagatgcatttggatagtggatcaggccaagaaccagctcaacacatatcaccccgaaagatgggtagactctgaatcagttaatcacataacagaattgaaagtggcattcttgaattaaattgtgttatcatgcttaaacacttcaacttcatcgacctaaacaatagtaataagcgacaaaagtgacaaaagtcagactgccagtacaatcctatagtaagctgacaataaggtccgatatccatattaacataatattttgaagcaagttgcatagaaatagaggattgtgtactcatgttacgtcaaatagcccaggccagccaaaaagccccaaaccgacccaccagaaaagaagttaaacttctcatatagaatttacctaatttttttagtacataaaacagagacccctttccttcatggccaactaaatgactcacatacttgcaaggaccttccttataatgctggatatttggggtgattggccacagtattctcaacgtgtggccttgttttatgggaactgctttaactaggacctgcaagtcatcaatttccataattaaacatgtccaagtaaccttacatttcagaaaaaatcaccgagtggtgcacttgacttttgaacctatctttagcaaatggaaaatatcaacctggagatgttcacttgaacatggatgaccataaaaggaaaaccgtttccttccagtattcctgacatcagagaacttattttcaacaagggtttgaaggttgtcaagactctctgcatacacaagttacacaacagatataaggaaaaaatatataaaaattgaagaatttgtacagaaatgaaaagaatggtgtaaccagtttgataaagaaaaaacctttcccatacacaacaagttgcatcaagttggctgaatagtgtgaactataaaatgtaataagctcttccaatatgtccaatccttccttatttggattaaccagtaaagtgttccgatttcctaaaacaatagatgatcagaatattagtgaaaaaaataattgttcaacctttgaagcatgtaaacatagggcctgctcgtaactgcttgccggctgccgctgcggcttctatacagaaacagtagccagcatagctctttgttgcggctgtgcagccgcatccagcagttccaatcaggcctatcgtcccgtatttcattcaagttaaaacttccatagattttgatttcagagaaaacatctaaaatggttttaaggtgtaaatattccctgtccaggagcaataagtttgttatgcttcaactgttcaacatagtctccaatttacacctttgaccaatggcttttcatactagtacataacataaaattcttagtacaaacttacaagttcttgtaaaaaaaatattattattgaagtattttcaagttacaatgggaaatctgcagaaatcattttcatatggtcaataagtaaagtaaaatcatagggcaggcataaattattttcaaagtataagaaataccaaagtacttggtgttcaaattgttgttgggatggccattgttattaagattgaggacaaaaaggtacaagaaacaatatcattgacacaaggttgtcgaggttggttatgcaccggagcgcactcccaagaacgcgcttcccctcaaaaataactttttgtgaacgcactactcagtgcattcccctgatcttaagagctagctaccacaattttcaccaaatccaataaacaccacgcctcaccaccaaatcaaagaagggatatgtaaggtgttgtgacaggctaggtagatgccaagttgtattagcctggttgcatgggccaattcaaatgtgaagggggaaaatgaaacatttgtcccacaagagcacaattccatgtgtttctgtgtccttcatatgctactgtttcatttgtgaaagcatttttttaatcaaatgatcctcatggcccacatgcaatacaacagatcttcaagaaaaggtgtgcgcaagccttgggtgatagaatagaccacaaaagaagtgaatccatcatgtagattgagaataccataacagaaatgggcttgtccagtttacacacacagtcttatttttttcttggaagaacagtatgtttttttttccatccatgattcaactagctaaaaatttagaatcataagttcatatggcatggatattttttgcagcattacaaagcgtattcttgaaataacttcaacatgcagtatttgttagtagtgagttgtgactataaaatgaaggtagaaacttggacaccttggtaccaagcatgccgtatagttgcaacatccaattgtggtatatagaatcagacactaaaaaaaatgaaattatgactataacacacaccagtgctaaacttgtgatatggatggctctccaagcaaatatgtttctggagctgaaccaaaagaatatagacaatggaattatagcatgaaagaacatggtaaaataaatgaaaacaataaaatagatcaaaatatgatatgaatatgataccatattactattcagctataacagaaaagattaatgatgttttttggacataaaggtacctgactcattcgcaaaatatctgtcagtaagtttttctggttttctgcagacaaagaaagaaaagaaagagattagaagttaattctctcagcaaaaatggcagttccagataagagagaaagcaatgtataccagagtcaacagcattaacttccctaagaattgcatcaggtgacatcagtggatttatgaaaaattgtgcaaacctaaaacgacaaatgtgaaggaaatgaaacagagttgcaaagtaaaaaacaaaggtgtaaggaaagaaagaagtagaagttacctatccaaagcatcatccaggcaatcattgttcacatcaaaaaaaaagtttgtgtgttcacgagatgtgaaggcgttccttgaaccaccatgctaaaagaaaacccatatcacacaattgatgattcaaacatagaggaaaaacataaagaccatgatattatttatacaaatttatgaataattatggctcctaccaactgcatcagaggctagacagatggttttctaattagcacagttaataattaaagggatcaatctctgcttgcagaattccagtagcagcataacatgtgggagggaaatcatggttcaaggcttcaagcactgcaagggacaaagcttcattgcggccaacgttggcccacccaatgattgtacagtctatatgataagtaattgtatttaaggcattttacttattaagcttcaaattggtcccatctggattaagccactcgtgcacattagtgttcgaccactcactctgccaccgaaagcactggtgcgccgcaacagacttgcaacatcaaatatatgagttcactaacaagtacacgtgtctattatattgcgaccaactggtaatctagggaaaaaagggcagcaacccatgatcaaacataaactagattagctttacaaatactgaaacactctaacggcactagccaagtacctccaaaatgtggtgcaagtctctagacattgccaaagtaaattgggcgtggactagacattttgcaaagcctacagtatgctgaagttcagttgacactctcctgaacaaattgttctcaagcattttcactaagttttgagatcaatttaagttcgatcaaacaaattattgaccacagtaatatcaagatcagttagaaagatactttttaaattaacagaataggtaagtagatctgcctggcaaaatacatacctctgcaatatactttgagtaactgtcttctataggatatttctcgctagcatagaaaagcatatgctctgtaaaagaggatccaggcataagggaatcaaacaatacagagctacacacatgttattactgcaatacatgtgccatgaagcttttcacatgcaatactacaacccaaccaagatttaaaaaaaaaacaatgaggtttgaagagtggttctttatgaattaatactctttaaagggacacactagaaattataaagagagcaatatacaacagccaaattaaacatagactaagcacagtgatagcatgacacgcaagaaagttgtgcttactttacctgaccgagaaaaaaatagttacaatgactagtaagtaaattaattttctgattggataacagtggaacattatatttctattgttcaccttaagtatccaaataagatgcttgaaacaatacttggcctgcccgagaaaaaaagttagaatgactggtaagtaaattaattttctaatcggatggcattgccacactatatttttataatcacctcaagtatacaaataagatgtccaaagcactctggtgctgaaatgaactttctaataatatacgtcatccatttcagtacagaggcaatataatgaacccacattagcatttataatgtattacagtattagtataacagttttcagtcacaaatggcattgctggtacctttgatcctttaatggcatgtgaatttcacataagtcattttaaggcccaactgttttttttctcttaatgccctttcacatatggactttgacatctttgcagatttatcaagtaaatggttagttccaaacgttattatgcaactcataaacttttcaaggaatgggccgcttattagctagatattgtgacagcacctatcaggagatagtagtgttgaattgatgttgtacatgtgattcagccattcgtgtgttttcctggccatgctatatttgttttaatcttctcatccagagatactcagtatgatttggaaaatttattttgagatgtgttgcatgtatttttacagctattgatgttacccaaaaatgaaaaagaagcatgctgctgtctgtggacttagaagtattttttacttgcacattttttacttgatgggctctgagaaaaatatagatatccaaatttcgaccttcttcctctttacatgaccaattcagcaattaaacaactaaaagcgcatacacgtattagaacagtgccagccacagtgcacagcctaaaacaaccttcttgtaaaaaccgcagaatgtagtggtagcctaagcaggcctgacgcaacataagtgcatagagatgatagagagatcaagggtattaagcaccaaggcctgactgcactaagattatcgtcaccaacatcctgtatattcataaccatttaagggaagcagctaactacaactaaaatcacacatccacgattaccaatttctcacgttttatgcaacaagtcaaaacaggaagctcaccaaggaagtgtgcaagcccagggagcccctcggggtcgcagaagtagcctaccgagacgttcatcgacgccgccgcctgcaagcaaacaaacaagtcggggttcaagccaaaaaaccagagagataccaaaccccggcggcccatcccgatcgaaggagcgagcgaagcaggaagaccttatcggtgtcggggtcgctgatgacgaggcactcgagggcgttggggagcacgacgcggcggtacccgcgcttgtcgttgcggggcttcgtgatctccacctcgccgttcgccgcagccggggccgcgccgccggaaggctcggcgggggcaggggcttcccggggcctcgagtccatcgcggccgccgactcgccgccgcgggcgtggactggactgaccgagaccgagtccgcgcgggcaccaggcgggcgaagagccgaagacgaggagttggcttggcacgagcacgacggtgtcttcgcggcggagaggggtggggaaatgggcttgggccggatgagccacagcgacatcggggcaacattttgttcaaagcccaagtcaagtgtactcaagtcaacagctacgtaccgctccctccattttattttcatatatagcaagactttctagtatattcatctagatatataaatatggataatattagaaagttttacattgtgaaacagagaaattactactatggttctagtgcgaagacaccgtcttaactaggtgtgtttagttcacgttaaaattggaacgatctgatgaaaaagttggaaatttatgtgtgtaggaaagttttgatgtgatggaaaaattgaaagtttgaaaaaaaaaatttacaactaaacatggtgtgaaattttgacattcttcaacgaaaaaaaatgaaccctcacgctaaagtgtacttcagcattatgtactctggccctaacagctctaacgtactggcacagaatccaggtcggcatgattcagtgtgagcaatctaatgtgcttcattgcctgcaatatgacaagtagcctagtggttagatgaccttcatgccataccagcgtcgctggttcaactgttggagcatccacgtctctaagagggaaagctacttaaaaagtactaactctgcaattctgtggtatcgtgtagacccatataaattcaggctgtgtttagacccaaagtttggatccaaacttcagtcatttttcatcacatcaacctgtcatacacacacaacttttcagtcacatcatctccaatttcaaccaaaatccaaattttacgctgaactaaacagtaaacacagcctcagctggcattcttatggctggttttcaaggataggttaaatactgaagccaatatggtcagcaaaaagtggaatgatgacccccactgccctgtttgccttgctcttgagacagctgatcacatcatcctaagatgcaaaaataccgacaatctctggagaaaactaggactcttgcatctggcaaacaaagcagaaacaatctctgatttcatccaagcagccattgacaggaaacaacacaaagggtgataccaatctgatttgcagtctgcgcttactctctgtggaaatcacgcaacaacatgatttttgacagacagatggacaatctccagggtatcatgcaacagatctgtgattccctaaatctctggtgtgtacgaagtaatgaagacactagacacaaaattcgatcatggtgtgaaagactgtcctaaacaacagcctaatgtttatgcttctgtaaattctttcttttcccccgtttttttctttcttccttaacctctataactctttttccacttcactcttttttattccttcttctccctacctctctcttaactaataatcttgtaaccctaaacctcatttctataaatgaaatgactataaggtagagcgctctaccttcttgcgttaaaaaaaagtactaactccatcccaaaatacttgtcgctttgagtttttgtttgtaatgtttgatcattcgtcttattcaaaaaaattatgaaactattatttattttgtttgtaactcgctttattaaaaaatattttaagtatgacttatcattttttgtatttgcactaatttttcaaataagacaaatggtcaaacattgtaagtaaaaagtcaaagcgaccactaatttagaacgaatgtagtaaagaataatgaatatattaagtctttattgcttcccgagtcaaacatggcaccctcaagcagagaagggtggacaccacactaccacaccacaataactctattgtttacttaaacatggcactgaggtggtgtttttttgtgttgtagatgaagataaagtgttttacgtaaaacgaggttgtattagcgtgtgattaattgagttttaattattacaaacttgaaaaatagatttatctgatattttacagcaactttcatatagaaagttttcgtacgaaacataccgtttagcagtttaaaaagcgtgccatgaatatctaaattttcatccaacttttgttagagaaaagaacaaggcctgagcccctagtgatatgaactgcgtgaccatatagcaatgttcccagcgccaagtatacaacgctaagttgtacttcagtaccaaagatgacaacaataaggttggcatctttttaatttttttttgcgagattcattcttcaaataagttttaaagacggccaaatgtaaaatttcaaccatctataggtagggtacgtgtgtatttacataaacaagactcaattgtcctaattaatactctttccgtttcatattacaagttgtttgacttttttcctaatcaaacttttttaagtttgatcaagtttatagaaaaaatgtagtagtattttcaacacaaaacaaacatactatcaaaatatattcaatgttaaatttaatgaaactaatttggtgttacaaaatgttctaattttttctataaatttggtagtttgactagaaaaaatgttaagcggtttataatatgaaaggaggattaggctaatttaatgatatccctatttcatcatgtcttgtactaagcgcacgaggtaggatttgcgtgtgatctaagtcttccttctcttcttattagctcacttgatatatcaagttttttctactccctccgtttcataatgtaatactttatagcattgctcatatacatatagactatgtgtttaaattcattaacatctatatgtatatgagcaatgctaaaatgtcttacattgtgaaacggaggaagtacatgacatagcgttaaaattatgggttgtatttttggtttaaatgtactatctatcttaaaatatatcaatttttatacacaaatcctaacaatggttcttatttttgctagaccggctaaagaccaagctagccaaatttcattaagattaggattatttacaaagagataggtccttatcatggtgcaggtgaaaaaaatggttcttatttttgctagaccggctaaagaccaagctagccaaatttcatgattttacaaagagataggtccttatcacggtgtaggtggaggtggggaaaaaaacaagattaggataaagagacatccctccaaactttttttttaagaaaacattgtgaacatatatattggaaattgatcacgagacaccagagttgaaaccgtacactttttaccattatcctatcaaatgcatctctatggtgcaggtgaatctcgctgctgttaggcgtgtctagagcgtcggagttttacgtaacttttgtagtaagatgtttcttcagacgtattagtcttctagttttgagcaaaaaatctcgcattctagttgttgaggtgtgatacacatatagctgcaaaatctctgcaatccttgccggaggagtaaatggtaaagggggaggtgtcctgatgatggggggactctgaaatgcagacacttccgcaaggaactcccaaacagcaaacaatctaacatgtttgtagcaaacgagacaaaataacaccggttcgttgttaactccatgacaacactgtcttttatcatgtggaccaaataaactccaggagcacatcgcacgacgcccgtgatatctgacggccttttctgaaactaaaatgcccggttctcgaagagatcaggctaggagctctggagctgaagtggcgaagacgtgaatcaagtaaactgttctctcttgagataacttctgcatcatggattctgtcagagaaggtaaggacaaatggacaatcactcttgtcactgcccaagtttaacaggttgctccttctgaatgaaacttcgagctaatccatctgaatttgttagtagtaaatactgtagtacaatttactggtgcaagaagtaagagctccatgacacccagctactctgaagaaaatgttcaggtgttcggcaaagttgcattcagatgttaggctactcggctactgtaagtacacatgttagtacattgtatgagtccttgttatatcgagcaactgaggtggtgtttggatccagggacttaactttagtccctgtctttagacactaatttagagtattaaatatagactacttacaaaactaattacataaataaaagctaattcacgagacaatttttttaagcctaattaatccataattagagaatgtttactgtagcgtcacataggctaatcatggattagttaggctcaatagattcgtctcgcgaattagttcaagattatggatgggttttattaatagtctacgtttaatatttataattaatattcaaacatccgatgtgatagggacttaaaagttctagtcccatctaaacagggcctgagcataggggacaaacaaagggcctgttcactttgatgccatttccaaccttaccaaattggggatcctctagagtcgacct

SEQ ID NO: 9369 - DNA, 6456 bp, Oryza sativa
gggcggatatgatggctggatcgatggcgtggcgatcgcccgcccattagcccccccccctcccaaaaaaaaagtcctctcaaatgctttatctacttaaattatgagctactactaatattaacatgggactgtaatgtaaaataataaaactaatttattttttaccaaaagagaaagggtgtaccgaccagggcagcattggcccacgtttgtctctacaagcccaatgatatagcgaggaggatgacatttgaaccttttttggctttagttgtctattttaaatcataaaaataaagaataaaaacgacatcatcataaagtaaaagtagaagacatcaacatcaggaggcgaatgtaaaaaagatactagtttcggtgtaacttacatacatttattttgcatacttttctgctctttcagttctctctctatctctgtcttttgtcctctccaaataaacaggacctaaagcgacatgagccgtgcaataagcaaaaggagtagattacacatcacgccaccccggatttcccttcgaaaccaaccaaaacctcaccaaattaacttgataaaccggcagaaaaaaatgagaggaataggcatcggctggtcaagtaatgtttaatttgagccaccaaaaggtgcacttcctctctcagcaagagtcccgtgctgtctgatggctcgagaacctaagatcgtgaacctacgtactgcaaagagatgatatgattcgggaccaagttaatatcggttcacattttcatgcactcgggaatagattatcttttgccaccaaaaggtacttagatgacataaaggtaggcacactgattaagcaaaagttccggatcacattacattattgattgcctacgaactttttaagatgaagttattcatgcacagactgtgcatgaataactgtgcagcacagtcctctctcttcactgctcactgccccttaggcaggtaacactcctagtgacagcgagcgcgaaatgtgaatcgcttaaatagcctggaataatcaatggtgcgcccattgttattgctcaattagtcattaggcatatcaccaaccttttcttggatcaaattaagttagagttggttatctttgtctgggttttcttcagtcgttcagtgccgttctagtacaattatcaatcttgtgacgcacggtctgctgcttgattgagatccacatcagggagggctaacttttcctgaatcgctgatcagaagaaaatgaccttttccgcaactaccgccgaccacgggctctgatgatctttcgggtgtcctgtctgaagaaggtgcgcctaacaccctcgagacgacgatcatcgtgttgattatacttcttgaattaaactttgttcggtgacctgtttttgtagccccggtgtttattaataggccttggttactgcggttgttattcagtatattcacgcgcttctaattttactcctctaagcgaactgaaagttggttgattgataacccaagatgaactacaggcctatagaattcagccgtcatgattatgcttgctcatccgcttcttgctttaccacccagcaatggctaatgtcatcattagacgagagctctattagaattatgatcactcgtctgcacggtagagctcacccacgcttgcttgcttgcactgtatatgtggtcacgccccatgtaataatcctagtcacagagtgatatcgtaccatcacgcagacaagaacgtaacagttggcatatgctgctacaaaccaaaaattgcatcggcatctcttgggaagaaaacaagtaccagcactatataatcatcatcatgccagtaccgcatatttaggagcaacttgtatataaaaccagcaggaagcatacatgcagcgcagtagtgcacggtacggagtgctcgtttactcctaccaaccaggcaaccggagccggcagtcacggccttgaagacaaaggggacggggacatccccacggcctgggctaggtgcgcgcggtggcagcagaaaccaatgctgcacccggctcacctacctaccgagtaccgacctggcgattccccgtcccactcgccatcggccgcgtcacagtccaaagtccaaacccgtcgcgcggggcgctcacgccatgcatgcatcagcccaccccgcggctccgcgcgcgcgcggggtggcacgcgatttctcgatggccaccgcgagcaaatcgcggaaaaggtggcgaggcgacgcgccccgggttgggttgggtggggtgggttggtggtgcggtgcagcgggcggcagaggtggggacggacgggcgcccgggtccagccttcactggcgagcggtgaatggggtggggtggacaccgagccggttaataattttcgcgccatccgcccgaccacggtggacgcgagcaggaggggtgatgccgttgtggtggtggatgagatcggagcaccggcacggcgcgggaagcgacggcagcgaggcgaggagagcggtgcaagcaacacgggcagcggctccgaggatggggggcggccccgccatgtggcgtccgggaggggtctccacatcagttggctctgctctctgccctgcctcggtctgcaggttacagcgagaggcccaccgggagaggacccacggctcctcgcgctttttccctccttctggagccaaaaaaccccaaaagggaggcacatccctagctccccaagggccacagaccttaacacggcgtacatgttatattagggggcaaaacatgcataccagccctcggttatcctattctgcccgtggaaaaaaaaaacaaaaatggttatgtatattagctcctcggtttgccctattccgcttgtagagaaaaaagagagagagaaggtaaggcgacttaaattggtgtggcagataatattatcacgtcatgaactattggtaaagacacatattagctccttggttatctatttcgctcgcagagacaaggaaaggttcatccaaaacttgccgaaacaagaagttattgtcaagttagattggtgtgaccgggcaatattgtcatgccatgaatcccactctttatatattctgatcatagaaaaaaggagggttcatccaaaacttattgaaatgacaagttataatggtgtggcagaacaatattatcacgccatcagtagtcagagatgcatatcagcccattgatttgcctattctatgagtagaaaaaaaaggaagatacatccaaaacttactaaatgacaagttagaatggcatggcaagacaatattaccacaccatgagccgttggtgtgataacattatctgccacgttaaaatttttgtcatgccatcactttttactggtgtgacaatattgtcattgcacactagtttaagttgcgtggaaaaatgttcaaatttcataagcttttagggctttatttttaaattttaaaagattaaaaaacaatcttaaaaaatcaaggattcacattaatttgccacagccagttcagtttttgcaggagaaagttatttttccccgttctaaacagacctaaattgcaccctagtaagaagtaagaatttctaagtaccatgttgaacataaagaagtactagtactatagtactactacaatggttaagttcattatagcatgtgtttcaaaactccgaaatccaaatacattagtcgtcaacaattcgatttgagcaacttgtgtccttttaaacacaagcaacggttgtcataggttctgatctcttccacggttggacctaagatctaccgcttgatatagacgcagtttataattcaagattccattatgacctatacgtgtcaacgagacatcgactctcctctggtttttttttttttttttttttttttgagaacacgagacatcgactggactgtttgtatttggaaagaagaaaatctcgaagccgtaaaatgtaatatcagagttactggagggtctgagcgcaatcaacggaaagtttttgtgcgcatatgcttttctcttctctctctctctctttcttctgacttcttttgtgcttcttccaagcttccttccagtcctcgctctcgtcctccctccgtcactcgcagcgcagaccaaggaaggcttctcgcctctcgccttcgcctcgcttcgcttccaagtcccaatgccgacgcaacagcttacctcacgcggcgcgccacgcgcttgagaggggccgccaaccgcatggcggcgccgggcctggacgaggtcatggcgttcctcaccgaccacgggttcgcgggcgccgcctccgcgctccgcgacgacgtcctcgcccgcgccgcgtccgccgccggggacgccggctccgattccgatgccgcattagatccccagctcccgcccctccggttgccggcgtccacgtccggaggcggtggggcgccggcggcgccgcctgcaagccctggctccagctctgactcggcgtcgtcctctgccttcgtcagcatgcgctcctcgccctcaggtagttaggggatcagggcacaaggctgaatttttttttttcatcatctctcagcgttaaacccatatcttctcgttttccgaggtcgtcagttatgtcgcgcgaaatctcgatctgtgcgccgatgtttttggcggctatggttggctttgggtccaattcgaacctgctggatcaaagccagcatatctctgtgcatatgttcatggaggaaaattgtgatcttttgatctagtagggtgctggttaaaccccttcccctgggttttgtacaccaatgatactgcttgtcgttaaattctgatttctcagtatattctttttccaagaaggttggctttacgacgaccatctcttccatagcaagtcggagctggacgacgacaatggagaagacaaagaggaggacaagtttgttcttggtgtccacgatggctcagggaggatagagatgggagtgcttagtgccggtgatgaccaccgtcatgaacatgttggcaatgacggctgtgagggatgtgctgaggtgtacacatgttcatcaccgctctgcggatgctgtggtgagggactgaagaacggggggctagaggtggtgaaggattctagctccactgtctatgggaggtaccagatcattgatgacagacagagatacttgatgagtgtggcatggatgggtttcagttgaagcaccctgcggatgttgtgcttgagtgtcatttgccaagagattctggggaaggagatgagcgatcggagctgagtgtagtggagaaggagcttcaaatgctcagttcatttggtactagggttgatgcagatgcttttacaagtaagtacttctgaaatcttaaactttctgcttgatttcacccttcaatattagtactccactaaatacagtatttgtactaattttcaacattaaccctctttgctccgatgaagatattatgaatttatttattgaagtgggagaacagggttgaattacagcattaaagagtttggatactgttaggcaccgtttggatgccagaattgaattgtgtagttatcccaaaaaaaaaaagaattgaattgtgtttgtggaaatggtggtccaattcaaatttcaactataattggtgttgggatccaattcaacttgaattgtgtatgagtggtgcagacaatgctgaatgagagatgttttgttactgttgtaaactgaaatttgctgttaaatatgcacagagctaaaaaaaaatggtgcattttagtggtaacctcttccagaaacattactgctgttatacgattatgcttcacatgggttttctctgtatattagaagaattgaaaattttcttctgctcttcaatataatatgtaacttggttttggtaacactacagaaatgaaatgaatctggatttaaaaatgcacatttgaggagacattttttaacaaagaaaggccaaacctattttattatcagtcttgctgaactgttgtttgtttaccaacgtttgtgtgaatttgcaatttaattccagtcatcttcttatcctgtataaagatcatttgctgcttgcttcattaggtttactgtaaatgtttgttgtctttaggtcctggacttgtacacgatatcacagacaatgccaaactggatgatagcattgaaaagaatatgaaaaacagtagcgacaaatatctgaaggaaggttatagcatagagcctttccctgagagttctgttgatgatacctttgagtttggagatattggaccattgaatactgatgcgcaaaactcaactgctgctaaagctgaggaagaaaatccagagacaaatgttgatctcgctctcgctaatttccatcgagaatatgaggtatttgaact

SEQ ID NO: 9370 - DNA, 677 bp, Oryza sativa
aagtttaaaggatcatacctgaagcagcagcagcagcaactatagatattcaacagaatcaaagaataagcaaatctgtgccaaaaagaaggcatagaataggaaaaaagaaaatcagagtgaaaaatgcaaagaataaaaggcaaatatgagcagaaacaagcttattaattatgtaatcgccaaaggttggtgtatgcgagtatacaacctcgggtctccagatcggctcattgattttaccatagcttcatttttcattactcctaaccccagcagaagcatccttataatattaatccctggtgctactgcagccaggaaaggagcatagcttcctgagctgtataaagcatcaatatgtgagtaccaatatggtgatttatgttgaccagagaaaattagattttcttacctgaaaagaggccaaaagagcaagaataccataccgatagttatatgcacaagttttctattgagtttctgcaggcaaacaaatggaatttatcaatagaaagcatcatcgtattgaagcaaatctcaataagaaaaactactgttaatttgtcagctaattgcatggttcagtttatatgtctatgttatgttgagaacctagctgaatttcatctggtgtcaatgagataatgccagccatcagacatccatctgaaatt

SEQ ID NO: 9371 - DNA, 2652 bp, Oryza sativa
gtacttggcgctgtctccaatactgcatcgtatcttcggctttgggcattaaggtttgctttttattttgttatattgcatactttcatatctgtaggtgctcttcataaatttcatgtctttctttcgtcttatattagtttggcgcattctgagctatcaacagtcttctatgagaaactgctggtacttgcttgggggtaagtattggtttggtctttcagatttcaaccaacttcacttttaatttgtatagcaatgtttttttattcttacgagtgtcttggaatgcatcttttcgtctaatcatggatacctcatgaatatatggtatctaaagactcaaaagtggatagttgcttacttggggtatttatcatattgttcacaggtatgacaatcttgttgtgaagttagtggggcttgtaattttttcttttgctactgcctttatattgctggggatggaatcattgagcgccttccttcatgcacttcgtctacactgggttgagtttatgaacaagttctaccatggggatggctataaattcagacccttttcattcgctctgctagctgatgacgaagactgatgcatacaaaattcagcagataaagagattaagcttgtttcttgccatttttggagcacgtgagtggaattctttcgaccaagatgggtttccccaatacacagcattttgtcagaccgccgggcttcttccgaacgcatgtgtgcagtcctggttgagattgccagcgtggtgggaggagattttgtaagttcacggcaatactgtagagggcaggtttctcgtacagttcctccagtggagaagcagattatagatgctaacaacaaagatagaaatgtagatttgctatgtctacttttagctcttatactttgtccaagtgactgtcccagtatcccttaccacttgaaaatggaagttgcagtcgttttttttaatcattacgtgattaggttgtaacgaagggtgacaattattgaactacaatgtttgtcaattcaaataagaaaagctaaagcatatatggtttcccaagatgttacaaatattgatgaacaatatttatcaatcaatatataatttcgttatctcaactaattgataatactataagctcacgggaattcgccactgtcatcgcttgattgtcttggggcttcctggatgagagaatctacttttgccattgatttagtccaattcaacaatttgctgtttgtattgtcccttgtataatataacgccgagttatcaattgttttgcaatatgttattttgtcagttttttttcccaaaatacacatcaggttaacagttgatttgtcccatcagaagtttaaaaactatgttctttatatagcctctttaaaaaatatgaaattttgtgcatacttttcaagatttttttgcatttatccgttatatactatatagaatacatttttgcgttattttttttaatttaaaacatcttttatatcatacacaaattgtgtcattatcttttgtgtgagtaaattctcttatacgcaaaaattaacttttttttaaaaaaaatgacaataaaaaaaattaaaacttatatgcatgcttcatggttgtgtaagaaggctaaaagtcacttttttaaaaaaataatgggataaaataattgataatcttgttttctataagagtattttgggtatgtttttaaaaaatatacagtctaatgatatattgagaatgatgataaatcgataaattatagaaatagataatattaatagcaaattattaagatgatacaagattttttttagcttatacgatgggtgaagaaaaaaaaggacaaagatagtataccatgtatacttcttatgttaaacatgattctagaaaagtatttatatggtgaaaacagcaatgggaatctagaaagtgagacatggttgttaatactcaaatttagcatctacgtaaaaataggaaaaatatgaatgaatttggaaaggattggtttggtgtgcgatgtcgtctgatcgttgccatagggctggtcaaaccgatggtgtggggctggtctgaccagcggcatttggccggtcagaccgtttgagtccgaccccgactctaatttatcggttctagggtattctttctcgagctgagatttttcgagtactaattggtttatatacctagtaggatttggagagtcctatggaaggtaagaccaattgtctttataagagctatggttggttccattaagacaaacaatttactacaacacaattggctaattgaatcattctttcaatatcgtatctactttttgcctaatttcatctatgttcgtcgtcacgctgtaagccgtccgtcttcaccgcaagagtgcgggtcctctttgtagatatgtcatgaaaaccttccattccgctcatgagacgagtgtttatcctttttgtctaaattagctccactagtcggttttaatcttctaaacacatattgaccaggaggtttcttctagaggtgattagtgactctatatcaccgtaaagctttaggttgataccgatcatgtaggcggcatgaccaaaaactacgccaacaatggtaaccactaagt

SEQ ID NO: 9372 - DNA, 2009 bp, Oryza sativa
ataccatgaccccaatctccaaacatcacagcaaaaagaaatgggaatgtgatgacagaatagacagctggattagcttcctcatatcgagcaatactgcaagaagttcatgattagcacactaccaaagttgcatgactaaaatatcattaaaaagtagggcctaaggattaaaaatagatcacatcataaagcaagtatgtcaaagtatcagacaaccttccaatgtttaatgaatcaatctgttttttatggtcaggttgtctagttacaaaggcaaacagagctagcaaaatgtgcacactaaagaagtcaacattattaattactacctctgtccctaaaactaatattttagctcttgctcaccaacctcaaaatcaaacccaaaagtgaagaacttcaaaatatagcagcaaaatatttgtgtcggatagctgaaacctggatcaagtagctagtagtacacatgatttaacaactgctttgctcaagaaatttaacatttgaaaaacatatacccacgaatactcagttcatgaatcataaaaacagaaagcatatgaatttcatttattcaagttgacacttgcaacaaagtgcatacccatatgcgtcaactatctcctggaaagcgttagtgaacttatcggtttggaaatatgtaggcggtgaatcaatagtgtccatctcatgaaatattattccaacttgtgaattactgtgaagcgttgcacgctgcaaaacatccttgatctgaagtacaaagtagagataagatatatatccttaaaagtatcctaaacagaatgagcacaatgaatagaccttcaaatgaatgtaatatttctgacctgtgatttagcaaatataggacaccatccttccccaacaaggcatttcttcgtgacatcaaaattcagcatgttcaatgtatcatatacagctttctcttttttcacctaacacaaaagggggttatggttcagaaatccatgtatcagaacagacataaataagagattttagggattacaacgcacaaatagaaaatgaaaattttatattacttcattaccatgattgtccacctccataattgtgaacctactgactctagtgctttgtttctgtgctggattccagcatccaaagtggcttccagatcagcaaggcgtccagatacctaacacattttcataaaccgttactactacataatatctcagcagataacatattaacattatgacacaaaataacgagaacaataagtcagataagtataacactcaagcttcttccaataaaattctaacaagcacggtcaaatcaagcagtgaatttgtgtgccaaatatgcaaattaaagtacctcgcgaaaaatctgtctctgcttaaccatctcctcgggaacagggtagcaacttgctccaaatgaaccgcaaatctttaatatttttgctttagcctgatccccagaaaagaaaactacgaaaacagttttctctacctggcaaagtaaaattgaatgttgaaactattgagaaactttaaggcttcaaggtattggatgaaattgtcacatgcaaggttggatttcagtactgcaataagcattaattttgttcataaatccagctttcaaggacaaaaaaacaataagcatataattggagacaaacaatagatttcatttaacacgagaatcaccaagagcaaaccatgacaatcagacctcttcaccagaaatgggatcagtaacaggttcccctgcaggcgcctgattgaaaaacatattcccccttgtagctcggaatagcatcctctcaaaagccattgccttggactttaaaataatcccactaacaaacttcactccagaattctccgaagcccctagatgcacaccctgtgagcattttttttttgtgttacagttttcaatcaaataaggtcaagtgtttaagtacgaaaattaaatataagacctgttcaagggctgcagga

SEQ ID NO: 9373 - DNA, 7140 bp, Oryza sativa
ttcacaaatcgaagcgacacgagatcgagtttgaacacccttactaatgtcacccaacacttggtcaattgggtgatccttggaaagagcggtgtgtattcttggaggcataggtggatcttgtgccttctcctcctccacttcaacttgagcttgacttggcgaagcggaagtagatggctcatcttgagtggaggtggatggcttgtcttccacttcaatagacttgacatctctaatagacatgttcttcatagctctcatcaagccttcatcacctacaacatccaaattctcgtgcccctcttgggagccattagtctcatcaaattgaacatcggcggtttcttccacaatacctttgttcttgttgtagacccggtatgccttgctatttgaggcataacctagaagaaacccttcatcacaccgactttcaaatttggttagtctaacaccatttcggtaaatataacacttgcaaccaaaaactcgaaaataggcgacatttggcttcctcccaacaattagctcatagaaagtctttttcaagagacgatgcaaataaagtctattggttgcatggcaagcggtgtttatggcttccgcccaaaaagaatcggaaacaccatattcatctagcatagttcttgccatctcaatcaatgtacgatttttcctttccactacaccattttgttgaggtgagtaggtagcggaaagttcgtgtttgatatgaagatcatcacaatagtcctcgatattggtattcttaaattcggaaccattgtcacttctaattttcacaagagtgcaactaaattcattttgggccctttttgcaaactttttgaaaaactcggcaacaatagacttatcatgcaaaaagaacacccaagtatagcgagaataatcatcaacaatcacaagacaatgactattaccaccaatgctcttataggttgttgggccaaacaaattcatatgcaagagctccaatggtctagatgtggacatgatactcttagtagaatgagaacctgcaacttgcttgccggcttgacaagcactacaaagcttatctttctcaaacttcagatctttcaagcccacaactagatcacgttttgaaagtttgctcaattgattcatgccaacatgagctagcctcctatgccaaagccaacccaatgaagtttttgcaactaaacaagttttcaaatttgcttcactagaattgaaatcaaccaaataaagatttccatatctaaaacctttgaacacacaagacttgtcaagaaggctagaaacaataacttcttgtgggaagaaggcacatgacaagccaagatcacaaatttgagcaaccgaaagcaaattaaaatttagagatttaacaagagagacattttcatttgacaaatcattggagataacaattttacctaacccaattacctttcctttgctattgtctccaaatgtcactttctcttgttcattctctcctacttcaaatgtggtgaacatagccctatcaccggtcatgtgttgagtgtatccactatcaagcacccaatggctcccaccggtgcggtagttcacctacaaaagaagatcaagctcttttaggtacccaaacttgtttgggtccttggaggttagagaccaaagctttgggcacccaaatggcattctttttaccaccgagtataggggaacccacatatctagcaacaatactaccatcataagccttcctaagcatataatgagaatcgaacatgcatgtcttaggaggcttaccaccggggcaatcactcaccaaatgcccaacctcacaacacttggagcaatacttaccattgctcttgacaaaacgagtggcatggtgagaaggtttcttacccttctttggagtgaatccaagtccctccttgttaaggatgcaccgttgctcactcaaaatcttgtcaagagtgttcttacccttgaagcatctctccaaactcttgttgagcttagccacttgctccttaagctcattgttctcaacaataagtgaggcatcacaaatagaaacacaagagctagagctagagctagggctaggcatatccataagatcatcccaagaggtagaaatgctagatgatgcaatatgagcaatatggcaagtagcactatcatcaagcaaatcacaagatatgccaacatcaatgtgagctccatgttgagtagtggaaaggaggttgtcatgagcttccttaagcttctcatgagaaatggtgagtctctcatgagaggtctttaactcctcatacaagacctccaaagaaacatgatccttctttagggccttgaacttgacaatctccttctcactataagcatggagctcctcaaacatactcacaagctcatcataggaaacatcatcacaatcatcatcactctcactatcactaagggatgttaccttagaggagccctttgccatgagacaaagtggagcgaagagtgatggagcctccttgatgggaacaacggccatcttcttcttcttggagcttgcatcatcaccaccttcttcctcggacccggatgagacggagctctcctcatttgagtcccattccccgatgaaagcctcaatcttcttcccttccttcttaagcttcttcatgagcttgtagcctccagtcttcttcttggatgacttgtctccatcatcatccttggaagggcacttggaagcaaagtgtcccttctcaccacactcaaaacacctcaagttggagagagtcttgttgggtcttctatttcttctcctatttgagttggagccccttcctctctcctttctccttcccaagagatcattgaactttctagcaagaaggatcatctcttcctacaagtcctcattgacttcattcaccttgctcttgctcttgtcttcaactttggcttggagagcaacgcacttcttggagggtgaggcttcctccatctccttcttcaacttgtacatgtcattggtgttgatcttccccaagaggcttgcgggtgtcattcttgacatgtcggagttgatgagcatggtgacaagggtctcatacttctccggtagggctctaagcatcttttgggcaacctcaagatcggtgtagtttgccccaagccccttgagatcattcacaatgacattgagcctcccatacatgtcattcacactctcatgaggcaacatggagaatgtctcatattggatcttgaggaaatgaagcttggcatccttgtactcacttgtaccctcatggatctccgccaacttgttccaaatctcatatgcggtctcaaggttgctcactctatcgaactcctcttggctcaaagagttgaacaaggcattcatggcttgggcattgagttggaggttacggtgatcactctccgtcaagggtgtgccggtgatatcaaagcctacatccacaatactccaaatatggaagctcatagctttgaggtgagtagacattttaattttccaagtggagtagtttgtgccattaaacatggaagccttccctacatggttcacctcgttcgacatcttctctctaggcggtgaagcccaatcaagagagaccaagctctgataccacttgcaggatcgagatgtcgactagaggggggctgaataggcgatttaaagaataaataacacctaatcaaatctaacctaagttgctaggcttggtgagggtgaactctaactaagcaactaatttatgttttgcaaacctagggtgatagtggctcaattatatctctaggaaagtaaattgcacaaatgtaaatgcgacaatcaaatgagacaatgagacaagagatttttcaccgaggttcggaaactcgccggtttcctactccccgttgaggcgagcccaactccaccgctcaaccacgaagccaccgcacgcccccttcgtcaaggggtgggcaaggcgggagccggcccacggagaggactacccaagcctcgatcactcggggtagttcttacttcactccgaaggtggtgaactccaaaccactcacaaaccggcgccgggcctcctccacaatcttctcggagaggtcaccgggcaactcctccacaagccgtctaggagacggcaacctccaggagtaacaagcaatgacccggtgtggagatgatcaagtgccacactagctctacaatggaagcaaatgcacttgactcttggctaaacaaccctctaacacactagatggatgaacacaaagctcaagtgagtgtgagaaaggtgcaaggagtgtatgcaattgaattgggtgccaagagagcccccttgctgctggtggggaagtatttatactcccacccaccaaaactagccgttgggggcgaaatcccccaactctgtgctctgccggtctgaccggaggtatgtggccggtcagaccgtgctactctgcaacggctagaaaactagctgttgtagccctgtcagagggccccatctgcctggccggtcagaccggcatggggtggccggtcagaccggcctcggctcggtctgaccaaatatggctccgtcggctctgtatcggccatcccgagcagcaccatcccggcctccagggggccggtctgaccgcgcaaatgccgccggtcagaccggccttatgctccggtcagaccgccttcttgcggccggtcagaccggccagggcacgccggtcagaccgccactatgtggccggtctgaccgcccctggtcaggccgaacccagtgaatttgcaagtgaatgtgtgtgtgatgaaaaagagagcacaaatgaaaatgcaatgacctaatgtggcaattgtaatcatctctttgctaggtcattacccctcttaatagtacggcgaaactaaaaataaactagcaaatttgatcgccctacaccacgatcaattctaaattaaagcgctagttttaccgtcttctttccctttgctttgcgccgtcaattttaatccatcgataatcatccatgcgcacatatgatgtggacctaacttaaaatgtatagctcaaagacaacggttagtccacaattagcgcttgtcattaattaccaaaattaacaccgggagcctagatgcttcacggcgacgcggcgggcggtgcggcggtggctggcgaggcaacgggccgttcgtcttctttcttttttttttgttgagaatctgtgattcgtgtcacaccctaatctgataccgccgtacaacggcacctgacaggagcgtgtcgtagggaaaacaacgtgaaccgcttcctacgaaaccgcgatctcggtaccagtcccaggacatagtgctggtacccacggtgactcccagagtccagctgcccagcagcacaacaatctgcttccactcgggaagcctaatctatgatgcccgcagacatcccgaatcacacagattcgtttctgaccactcagatcgtccatctgccacataggctgattctggttacgattcccacaccacaacaacttttcacaaagcacaggcaaacaaatctacgcaacgggaaccacctcacatccacccatgaccgtgggcacggctgttcgaacagttagttaacctctgcagagggggtacactttacccacacgacacgaacttactccagacactggccggtgtcagaggttcgcgacaaagcctttcccaagccgacccagggatacctcatgccacatagaaggatcaaatcctcacataaacataggccattttaggcgttcacaattcaaactccaaccacctcgatcggtaattcagcaagcttctcgttcttgcattaccaggaacccggtttggctccaaccgaccccgccccggcgttcccaactattggcatgcgaggttttcctgaaccgactagttacttagccagggtgtcccatttcaccttgtggttgcactttgattatgttcgatgagtttcccacaggaatcggtccttatatgcgaatacgggacagtgccacataggcacaacccccgcatcgcgagttttcaaaattcattttgttttcaaacacaccgacaccacatgtcgggttttgaaggcttcacaaacctatttcccatgttttcgacaaacaacggtgtatgtgggatatttggtatacgcgctcagagagcacgaataccgaggtaccacaagggtggagcgacaaggaatcagggtagtacgacctacggaaattagtgcgactactgggtaggtccgtcggtttggcacgcaaaccgaggccaagcaagttaagtgtgtgattctaataatgcaagttgcaaataaaataataatgacttttcaattataggggcaattgatcaaagggtgacttgccttgctcaaggtcttcacgaagcttcacgaatcttcgggaaaacccgcgatcgacgaaaaaccgataaccgcaactatacgcaacaatcgaaaacctaaacaagagaccaaaagaaagatcctatttagactaattagtagtgccattaaatagatctcaattttatgaaaatactggaagtggaacggagtcaatcggagttgcgaattgggtgatatgaatttttagaagtttaattggagtttctggaataggagaaatggtttatgaaatttataatattctcaagaatattattgacagtcattgtcacgcgggaccaaaggaaatggtttatgggattttggaataaggaattgatttatgggacaaaggaaaaatgatttattaaatccctgaaaaagaaaaggatggagggatgttaattggacttgggccgagcgaagggacgcggcccgaagagatgcgcgggcgcggccgaggcgagcgggccggcgcgcgggagggaggcggcccaaggccgaacgaggcgcggcccacgcgacgcaagccggtggacgcggtccaccgtgccgggcgcaaggtgggacccacaaggcggcgacacggctcacgcgagcggggtgcacgcaaggcggcgcgttggatcggtggaccgggagacctttgaccggtctccgcggggccaggcgg

SEQ ID NO: 9374 - DNA, 2348 bp, Oryza sativa
tggaaaaacgaaaagggtggaaaatatacaaattagaggagacgatagagagagagagaaagaaatacggagtatagaaagtagtagatcaatcatgcattcatgcctgtatgtaagagacaagatttgaatgcattggagcgagcaccatgccggaagagaggacgacgggcgcgtgcgagcaacaggccctgcatgaggtggtcattgactgactgactgactgactgaccgacctgcagagattgagtggcgattgatcgatcgagcgagggagtgagtgcgcagagcggagtacaagcacgcccacacacacgcacactggccagcatgggtcactagttcactggccatgcagacgcgggagggtagctagaccatgaagcaagctgcacctgggaagaagatagaaagagagggcgcggcagcttggctgcgtgacagtgagggagtgtgcacgtgcggtcagagagacagatcacacgggaggtagcgagctagcgctagcgagggcgcctgccctgccatgccacgggcggccgttgctctctcgatccccatccgtagcctacagtaaccaatcgattcattccgccggggaccagtgtgattgctgatcatatatcgatcccctcactctcctcctcctcctccaccccccgctctttactatttaaagccgcccacgacaaacccctcccgccttcatgcctgcctagccctatctctcctcttcttcctcctcctctctctctctgtccactcaccattagaaaagcttcaagaacagatcgatgcctggagactggagcatccgcatttcaagaacagatcgatctctccctgcagatgtggctatgagcctgtgagtggaaacggatcgaaaaaggtgggagcaaaaggtgggagatgggctggccggacggctggggaagaaggccgcagctggccggagtactgtagggagcgtgaggggcttagggccgtgcgggagtacgttggggagcaccgccatcaatgcaggggcctagctagctagcttgtgcctgtgtcgctctcctcctgcacagttcatcctcctaggagagaaaaaggagatatgcaatttcatcggatgctgcaaaaatatgtttttagacaaggagtgttcccgggtcagatgctgcagatattgaagcaacagggacggagccattctattcttggtgtactatttgtgcccctaaatccaagaaaatatcgaggaattgcagatttgcagtggatgcatgtgagtgagagcttgagatcaatcttacggtgcatcgctagtaagttagtgacaaagctttgcgacggtgatgaaaggaaagggctaagctaggaagccattaatattacctggaatctccatttcttatcagaatatgtatgggatcatgagcaaatagtagcagcgacagcgattagtttattttcccctacaattccttgccatgtactaaacctaattaatttgatcaaggaaaaagaggggaaagaagaaaaaatataaagtggaggagatcaacgaaggaacaagcaaattaaactaaaatataccaaaaaaactcagatcttgcgatgttggatgcgataaacaaattaatggacaaggtttgcaggtttactatactgatcaggaggcgcttggtgcagtgccactccctccaggttgagctgtggtagtagcagctgcaccgccaccgctgcccgcgtctccaccaccggcagctgcagctgcagcagaagacgagccggacggctcgacgccggcgggctgcgccgcctgcgagcgcttgcgcttcttcttctcgtacgggatgccgcgcgccttggcctgcgagtcccgcacctcgcggaggtagatccggacggcgcgcgcggcgaacgggttggactcgggcgtgccgccgctctcctcgtacgcggcgcggaggcggccgatgagcgcgtcgagggatccccacgcctgacgcagcgggcacgggcacggccccggcgggctgggctggccgtagaaggcgcaccccgacgcgtgcaccttggtcttcccgaactggtccaggtacctcaggaactcgatcacgtgcgcgccgctgcaccgcgccagcgtcagcggcggccggtggttccgcaggtactgcaggaacgtgttccagtccctccgcttctgcgactcgtacctgctcagctgcgccgcggctgcggcgccgccccacggccggcgcgccgccagccgccgcagaggacggaccggggccagacggatccatatacccaagcaagaaatcaagctagctgatgacggccacagcgacgacgaccaa

SEQ ID NO: 9375 - DNA, 2713 bp, Oryza sativa
cattagggcaagagctgttggaaagagcatcacgcgatttccatcaacaagaagcacatcccaaactcgaaggactgaaatgttcaaatagcaattaagtattaagcatatttcgagataatataatagctagatatattattagatcaagtacaaaaaaaaagagattgtaacatatagtcttgcagttgacaaaaatctttctcagaatgataacatttaaaatagagtaaatttcagaaaaccccatattttatggtcgaagttgcacaaaaccctagatataatgacttgtagtagataacctcaggtactacggtcctatggtttcacaaaaccctaaaccctatttatattccaaacaatataacatattgtcatcttggacacatatttactcaaactttcgtttcagaaagtatctacagaattctgaattatttatttattggttaaggtgattggtttaactcttcattactttgaataatattgtttcagatatgctaaaattaattgagatatgaatgaatgtagggatgtataccacaagccaaaatacccatggttttctacgacttcgaccataaaacctttccgaaattactctttcaaataaagaaaaataagacttaccactttcccatggtagcatgttcatgaatatagatagaaaccatggtccagtaacccatgcaacttgaacgccgaggtaatccaggtgatttactgcaaaaaaccatgcataaaagtagtcaaaattgtcggttaacatatatgccaagtcatgatatacagatattttaatacaaacaagaataatgcgcaaacctagttttggaaatttctcccggactaactcctctaaaacaagctgatcaacctaaagaaaaaacgaagtgtagcttatttaatgatgaatagtgaagtttggagctataagcacataatggcacatgcaaacactaacagaacaaaagataatacttaagaatacctgacattctatcatttcttcagaaaagtagccatcaaaataatcatccataatgcctgtcaatgccctgcgaacagataatagatttaacaaactttttagttcagctctaatacaatgcaacaagagatgtaacttgagagaacacagaaattccatgggtgttcttctgcaaaacctaccaaaatgcattctcctctggcattaggagaagtaacagaccagcaaagaaattcattgcctgcatatccagatgattgatcttagctgagaccagcattagtggcataaagtcaaaatttttggggaccatataattgtgcaaatagaatagtggttattgaataacaagagaagatctctctgtgagtaaattttaccattaaaaagtttttttaaaaaaatacatacatagaaacaatatttgacctctagattcctttttatatgacacttggtgattttcagaaatttacaagatattttgataatatttcaaaaagatttcaactaacatcggggaataaaagtaaaacagcactgagcagtgtgtgcaagtttgggaactgctaatgtcaaatcgtaaaggaagaaggtacaagtcaaataacataatggaccttcaagcggggaataaaaaggaattcagtaaatgaataatgaattcttgatcagcagaagctacactttgaaaagagttggcatgactatgcataatgctccatgagcattggttcgcacctaccatcaataaaaacaactggagtgcaggtatatcaataagcaaaacaactgtagatgtgcattttagttttatctgaagtttctatctactaatagtacactcatgtagcttgcaaattatacaaagggtttatcagtatcatccagtacttcaccttgaaaaagacgttcagaagaatcatatacaaagaagagtacttcctctgtttcacaatataagtcattttagcatttcccacattcatattgatgttaatgaatctagataaatatatatgtctagattcattaatattaatatgaatgtgggaaatgctaaaatgacttgcattgtgaaacggagggagtaagaaatactatgctcagaacttcagttttatggtgaaataagaaatatgtgttttggtgttgccctgttggtgcatgttttcagtcttatcaatattcaaatagccagcattcaccaaggcgctagttgtgtggcagattgttacctagctgcacctaatcgctgattaggccggctaaaaggtgcccatcggttggcttgttggaggaataagccaaacagcatatttgcaaacgaaaaataatttgtgaacaaaacttttatatatgtgttcttagtgatctaaaagcaaaggctgaaaaataaacttcgatgaaaaaacttcaaattcaaggttgaaaattcaaattttggctgataagcataagcataagcgaaaagatgaggctacatcttgggcaacagtgcaaacagaattacatgtgcaacagattggtcttgcaatatgcaaggtttcccaaagaagctacatcaatccagtgacaagaaaagtgacatgagtcagaagtaagggaaagccatacctgacagtaaccaactgatgggttatgtctcgcataagctgtgagcaagcgtcttaaagcatttctgccatcctcatctagtgcgggatgacctgggaa

SEQ ID NO: 9376 - DNA, 19901 bp, Oryza sativa
cagtatataacatatattaatctatagctggttgaccatggtctatttcatggcaattcctagcagattctggttcatgtgtaagtagttcattatatctaaaagaaaaagtgaaaacagttatgatttgtcctataggtggcccaaaaactcactcaatcttttatggtttcttgagaaggaaatagttgatcctatatatcaactatgagtgtactcaaggtggtcgaaattacacaaattatccgctgaaaaccctaattttgaccgggccatgaacctgtgacctttggtttataaaagttgtgctgaactcctcagccaatgaacgatgtgactggttgaccaattgtattttcaggtgtacttaggtggtattctcatgttcccatttttatgttgccaagcaaatacttagtattagctgctggaaattcacaaacaaatgctaccattgagggtttgctaaattgttcttgcatcttctcatccaaatccagggctgatgaattagagacagcgctgatggagatggttaagcaggataataggcgggaattaagcgcaaaggttagcattgaactactgttttctatggcagttgcattttttattccatcacctgttattatttagctctattttgttgcctctactgttgaattcatattgctgcgatcttgtgttttaacccaaaaattgtgaaataatatctcctttccttttgataaccaatttatcaactaggaaactcatatatatcattggtccacctcactgaatggacatttattgttttcctggaggcttggggcatggttgttctcatacttgcatttccatttttataggtcgagcaattggaacagaagttatctgatctaaggcaagctctattagacaagcaggaacaggagcaagcaatgcttcaggtgtagtagctaccaatatgttgctctgaataaaccttgtcactactacatcatgccttttactactggtttatctagttataaactaactaggtaatgcatgtaggtcctgatgcgtgtagagcaagaacagaaagtcactgaggatgcgcgcatattcgctgagcaagatgctgctgctcagaaatatgctgcacatgtgctccaggttagtttaatttcatcgattatctatgtactgtatttttttctgttctaatgcttatgtcatgttgaaacatgaaatggtcattcttttcttgattgcacctggaggacagcactgtttctaataatttcctctgcaatggattagccaactagatatgtttgtgtaactatatgcttcattagtctatacattatttgaactctgtaatgcttttattcatggaatggactccattttgctgtcattttttttgacatataatctagcaaatacatgcctgttcaatataatgattctcttgttataacatttgactttgtatgcaggaaaagtatgaggaagctatggcttcactagcacaaatggagaacagagcagtcatggcagaaactatgctggaagcaacactgcagtatcaatcaagccagcaaaaggcacaattgccatccccttcaccttctccaaggtattatggtattatagcattctacacacactggcatggaaagttggaaactgataaattaatttattgaatgcaataatatatcctttctttttatggtatggaagtgttggtatgctattacataaatgcaataatattcaatactggcaaaatgttctgtgaaaaattccagtcatttgctttataccaattgtccctgtgtgtaacctttttatttttaggacaccaacaagggatgcatcacctggccaagtgaaccaagattcatcacaggagtttcaacctagaagaataagtttgcttgctccgttttcccttggctggcgtgacaagaacaaggtaatttttattggaaagtggattactggattcctttcctgtgtagtgacaataaatctctttctagtctaaaaaaactcatagtccagcatgaggaccattgcaattatttatatagcagactgcaaagatggtgaaatattttgatgtcttttacctttatgattgtgatcaagcagtgtgatccatgaaatgtccttctatgctaattgttactaatggtcgttatattccgaacaataatccacatcatagttaaatttagtttaccatatcacttaaacttcttatctattgatttgcatcaacttgaccattatccagatatcatagttaaatttagttgctgatttaaactatagtaccaaggtaggctagagttttcccctttttttttgggaactgacttcacttgctattgtttcttaacaaacatgttgaatgtaacctggtttgtgacttatatctggaaataacattacttgtttacaaaccctctcaggcataatattgatcgacgcatttctctcgtcttagaagtatatggctttaaacaatgagatatgaattgctatgccctttattatttcgtgatatcaatcttttttttgacacgttgtgatatcaatctggcgccgttgattctttacagggcaaacagaatatctccgacgagtcaacaaacggcaatcttaatagcaatactgagcaaatggttgacacacccaagaaggatgatgaaaagcaaggagactctccacaggagggtgaacaaagagtggatacacccagaagagatagtgagcacagattagacacgccggagaccacaataaagttggaagaacagttggaagaaataaagttggattgataatcacaagcccacccatcggcgaatttttaccaatatggttaactactgccgtggtattaaagggtagttcaagccacaatctacggccaatataaaagtatgtgttgtatttattctttttatttattttctcctactcccttttccttcttaattttgtctttgttttgcaaccattttttcctaggtttatagatttaatctttttagccacgggttgatgggagagaataaattgtgtttattcattcaatcaggatgagttgtaagttatcgataggcacatgaaaaatgtatgaaatgaatgaatctaccagcaatttatgaaagagaacgtcactattggcatcaacatcaccgagaattactgttgctgttgcattttctggttgcctttcttatttgctacttcgtactcctgtattttttacatactgacacgtgacatgtaaaaaagactttacatttttcccatttaatacggagtatttgaaaggcgaggtcgtccacaagcatggacgttagtactttatccagtatggtcatgtgtggtgatgcagatgcaagttttagtgctactgtgctgtatatggctgtggaagctggaagcatggaatgaccttggcaattttcagcagatggtccagatattactatggagccaggatcaaaatgatcttttgataacaggaaaatatagagacttgctattggtcagttcattgaaaataaggaaaacattttaatggccaggatcgcttcaagattctctcctcactcctgcgttcggaagacagtcttcccaacccatggtgcgcacacagaaaacggagctgtccattagcacgtgattaattaagtatttgctattttttttcaaaaataaattaatatgattttttaagcaactttcgtataatttttttttaaaaaaaacacactgtttagcagtttgaaaagcatgtgcacagaaaacgagggggagaggataggaactggcaatgccgaacacagtctcgtggtgccacttgtgtactgcggaccggaatgaaataacgagaagcccaccggtcactcctttcctctcgttaacaacatcctcaagaagtttaagcaggagaatggaggaggaagacgacgacatttttacccaaaaaatttgtagaatgccttgaaggggtacatagtggcatatatcaaataagaaaaattataataacatgtttacaaattgatgaatagtaatgatatattttaaaaccgtgaaaattataatggcatggacccaattaacctaatattgtttgccatagaaagatgattttgtttactgatccgattgaatgatagcaacgcggccgcggctttaggtgcggggctcacgcactgcacgtgcacggtggtggtttgagtggcatagtgcagccatcagcacatcagtgtcccttccccacagcagaggccaccgcaaaaggagccccaccaatcaccaccatctatcgatgcaccaaccgctcctcctaaaacacgcccaattttgccatgtgatccatgctttcccccacccccatctgctcccgcatgtgggccaacaaaatgtaaagtagccctacgaatctataagtatcacgtgacacggtctggagtgcaataatttggagtcctctctctaacagcttctgtcacagacagatgggtcagtgagtgactttacgtttctcctaccgttcatgtaatcatgtttagcacttagtactctgatgctaaacaaattttcttagattcttcgatcctcagctgtagtgcctaacagcgcaattcaattaattaactcaaaatctaatgagcacttagtgtaattaattaattcaaaatctagtgagcacttagatcttgtttgttttttcaactccagactttagttttcttatttttcattagtacgttttttaaattgttaatgatgcattttaaaaaattctatataaatgttgtttttaaaaaaatcaaataaattatctttttaagtttataatagttaatatttaattaatcatgtgctaataaactttcttctttcgcatgcaccgaatatctttcttcaaactcatctaacgaacgaaacccaagcatctagcatctctgcctacatatcaataaactaattgtcaatttgccatgaggtttaaacttcttaagtggtctaatcaccacggggttaaccaaacctaatcatggaggctttaaagatgacccctttcccccccaaaagaaagcggcaaaatggtgaggagtgagacttgtgacaaagttgtgagttgtgactcagctcacactctcaacagaagcgcaaacaaacacatgactaaaaacaaaagtgaaattattgcgggaccccaactgacagaacatgtgagtaatcaaggataaatgaaaaacgcgcaaaccaacgccacatggctaaaaacttccgctataaatcagtggtgccttgcacttgcacactccatctccaactctccaagccagcccagcagcactctccttctccaggctccagcaaacacacaaaccacggaaccaccaccaccaccagcagcagcaacagcagcagctcagaggagaggagaagagcaagttaaaacaacttacaagcaatggagtacagctatccctgcaacagctgcagctgcaacaaggagaagaggcctccgctgaagagggggcagctcaagctgcagatcgccaaggccctgggcagcctcgtggtgcccggaaagaacagggatcacagcttcaggagatgagcgtcgtggtgccccggaggcaagaactgggagccacagctcaacacttgagcagcagcgcctgcaaactgatggaagttctggtgtactacggtggtgggcataggaattgtgcatagttgttggtgtgtagttttcccccctttccgccccgtagcgtatggcttgagacttcgagagtatctcgcttcctcggcaattgctttgttcttgagtgaagaaatagttagggagagactcggaggtgtgttcctggcagtctcatgtctggtttggtaatgtactgatgtgcagcataattttgatggtaatgagagtgttattagtacttccttacactgttactagtacgtcgagatgcagctgcattcgtatacgtacccaaagtctccgtctccagcctccaggggctccatgttccgtagccatcggtctaaagcccctccgctccgccaccgcttccgctatcagcccatctgccgagcgctaactgccatgatagatcgccagatccttcgagttacccggtccccgctggccgctgcgccttccctgacgaaggcaccgcgccggcgggttgccttcattctccgattcgctggttcgctgcacggatttgctggtgtgctggttcgtgcgtgcgcgccgctgccatgaccacggtccatgaatccacggggaccacggggtacgcggacgcaagtagcacgtgacagcctcacaaccgattgccatcaggcggtgatgtgcacggcaccgtgcgacgagtcgggattgggaagacccacatgtcagttagcgcagtactgcagggcattttataattggaaccaatgaatgaaccgcggagtgaagtgatacgaccgggtgtcgctacgctagcgggtgatcccataagtcgtcccaacgtcgccctccacgccatcgctagtttggccgtttgccctcgtccgtggtatctctaccggacactggatactcctctgcattttttaggcatccataatctgagacactcttagagtaaagtactcgcccttacaatacagggtagctcaataagtgtcccaacccaaaaaaacatatttctctcttcttcctctctttcctattctacccctctcttccccctcctctctctatttctccatcgcacgcacgcgagagcgcaccgagtcaccgtcgccgctctctctcccaccgctctctccctctctctctctctctcgtggaaggtagcggcggtgaccccggaggcagcagatccggtgccgccgaagccggatctagccccccggcagatggagcagcaccggccacgccacatcgaggtggcggacggcaaactcgaggcggcagacgacgagcgcgcggcgagctcgaggcggacgaggcggcggccggacgaagcttcgtcggcgagggcgacgagagtagcctactccgccgcggatctgtcgcctccgccacccccgccgcggatctgacatcccggcgccgtcctaggtcgtcgccgcctcttgactctccctctctttctccagccgcgcctccctctccttctcgccactgccgccggcgccacgcctctctccttctctctcccatcgccggcggccgtgactgagtgcgatgaggagctccatcggtgtcgccgaggagctcgaggagaggggagaggggtggaagaggaaatcctcgctcttggggcgtcgcctcaagcacccgtacccacgcaacgggttccttccaccggcgcctgggcgaaaaggagctgggggagcgggggggggggagggggcacatctcccagctaagggacgcgctctcaccaggggacggcgccgatggaaaaggggacggccgtcgctaggggcacgggctgaagcaccgcattggtgatagccttatctacagtcaaaagttactttgccacagcagaataataacaacaataagaagaaagcgtgtttcaataatggcgctaatctatggattagttacagtattaatcccgcggacgaatcactatgctggatcggtacgagatttatcatagatctccactgcgcgagaaaattccctcaaatccggtccagatttgcttaatgcaacactcagccagtcaattgtgctgggtgactggatcattccagaactaaacaaaaccatagcacactgacctcccggctgttcttatcagggaggataaccagcttctctgaacagtgaacgcacaagcacaaggagctaatgatatgatgagatggatgattatattagacagaaaaaaagtgtcacttaatcattggacatcatacacgttagctagctaactcatagtatgtccgtatcacatcgccacataggaataccactcagactatgtagcacgatgctagggaacttgcagttaataaaacgataactaatcttgggaatgatgtgcgcaattattaggatccgcaagttaggcgtaagtaaccaagtgtgatatactctactccctccgttacagaatatagcaacctaatatcggatgggacgtattctagtactacgaatctgacggagggagtaccagttaggctcagaaacagtgtgccgtacctgacgccttctgctgttgctgttgctttcaatagttttcagcccctcagtgctcaggtaaatatgtgatttcgatcggattaagaacagctagtcctaactacgactgcaattttagggttacaagtatctgcaaccattcattttgatgatcaaccatccgcatttatagctatactgatcaaaccaagaaccataaacaatattttattctacaacacttttgttatagtgctctgactaattggtgtcgtttgattcagatcaaatgtactctaaggatagtcccaacccatagtgtccataaacagtatctatgtgccatgtcaataagacatcataatagaaactacactttacaacccatggtttcttaaagtgggccattaataaatacatcatctctcttctctaccaatcatatttgttcttcatttattatgaagacattattctctcccaatgcaaaacttgacagtgtctagtgcataggttctcgtgttgaagccagttttttgcatgagacccagtttcttcctctcttcactctctcttaattaatatagtgccacataagcttaaatttatacatggcaatatagttaatacaatagacatcattctaggtggagggttggaactgccctaagcagctatgcctacataagttgcagttagtactacaactgctgttgctgatccaaatcctttgagtttatcagttaggtctagcggcggacacatgaatttaagactggtcattcacttaataattgcagacgcccttcttacaagtacttggtagtcaggactatggaatttatagaaattggttaatggtctagaagtagtgtgagccaagagcatggaggaatggatttattgaggaaaaccgagtaaagtatgaagcgtatactccctccgttctaaaatatagggcataactactttttaaaggtgtttcataatataaggcgtgcatgcatgcatggcaattaattagcatctattctctcctaaattattattttttaaaccatacactcataagatgtttaattctattgggtgcatgtattgtattagttggattgattcaaacaaagagatgatggtaattgtttcttggtttttgagttaaaagtggttatgtcttatattttggaatggaggaagtatatatatgtatgtatatatgacacgggtcacatggccagtgatggtggtggtgggctggtggcatgaaaatcaccaccactactatcttttagaagtattctctccacctaaaaaaattcaacctaaaaagtgacgtgacctctcctagtataataaatctggacatactagaaggggccacaccctatcctaggttcagtttttattttacggagggaatagtatagattataaacttaaaaagtatatatatttgatatttttataacaacttctatctagaaagtttttgcacaaaacacaccgtttagcagtgtaaaatatgtggtaataaaaccgataaaaaaatctgcatcttaaaagtatttttgcgaacatattttgactgacatcaaaatattcagactgacccagtctgaaataaatcaggaggtcagatccaaaacagtttcccaaactcaccgatgagaatggagaaccaactttttttttcggcgtctccgcttggcagtatcgatgacgcggcatcgatcgatcgtgacgtcctctcggtgatgtcatgcatgcccttcggttcttctctcatgatcggctgatcggctcagctcagctgctgctgctcctcgctccagctttcggttcttctctcatgatcggctgatcgcctttcggttattccctaatgatcgcgcttctatcccatactagaacagaatcgatgattatatcctaagcagaatggattatgagcagaatgtgcagcttagattcgtacacatccagttgggagctacgaacatgttctgttcagtgttcacttgtgatgcagcctattccctaactctttaagaaaaccaaactagaattgagggcctatttgaatcgcaggattgagaaaacgtaagattttgatagtaacgtaagtgtaaaacagagcattgcaaaacgcaggaaaaacacaggaattaccgtttgattgaacctcagaaaaaacgcaggaattggatgagagagactcaaaggaaagttaccaagagattaagctcttgctaaatttcctccaaaatctctataggattgtccattccatacgaatttcaaaggattcgatagaattcaatcatttgtttcaaagggtttcatagaaaatttttctataggattgaaattctacaaaattcctatatttttcctctaaattaaaaggccctgaataggatgtaacctaatacaacgaatttagaggagcttatgttgctctcgatagatgtgcgtgcatgcacgagtcagcagtgcgtcaaccgcgggtggccgggcccggtccgtcgctgaatgctgatgccgtcaagctagcggcagccggcggccagtcgtagctgcgcgacgacgacgacgaacccggacgcgcgcggtcgccgctacgatccgcccaaatctacgggaatctcgggcaaattaaagcggatcggggccaccgagaacaaccgcctcgcgcgcgcaccccaccggcctttccaccgtcctgcactccacagtattccacttccactggcctcttccggactcggcttgactgcagcaggttggttagcttcgcctctccaccctctccgacaagatacggtccaagtcagcccggtactcctagtgcagtcttttgcatcaccatcctcggctgtttggcacggtgggggcatcaccgaatcgatggaatgcacccattctgcttgcacgtcgtactatgccaccttggttcgctgttcaccatctccctatttatacgcggttgttgccggatcagtctcaccaacaccaacactacaaaagtacaaagcacgaagaactacattgtctgctctgctcacttgctcagtggtcgatcgaagcgggagagagtgtgtgcatcatcgatggcaacgagcagccacgctccggtgaagcgctgcctgagcaaggcgccgtcggggaacccgctgccacggaggggccaggtcaaggagagcatgggaaagcaaatcgtggcggccgcggcagccgtggccaccgcggcggcgcttgcctgcgagaagacgggcggcggtggcgctggctctggcgacaagaaaggcagtggcaggccggcccccgtggtcggcgccaagaagaaatgaccagcgagctcactaattaaagcatagtgcacggcagagtgaaagcagagtgcatgtttggttaaaaaaaaaaagcagcatagtgcatgttgcacgtacttgctccgtccaaaaaaaaaaaaaaaaaactcaacctcatacgtgttagtgtccgatagtacttaccatgatgcgaattacgtgcatggccctttttcggtgcaccagagggacctgcagctatcatgctcggtttctctgtgtagcgtgtgtcgtctacgaggcttttaaatcttccttgttttgtttggtgtcagtatgtagtagtagtaattgatatgggttttacaggggtttgtatgtagaatcttggatcttgtcacatgcatgcagactgcatacgtttggtgtttctacttcttatcttacataaaaaaaatctcgcggtactacctcaaacttgtttgagtactgattataagccgtaacagtttattaatagttaaaaattaatttataagtaaaatttttatggtaaattttggtacatgatactcaaattttgtataatttgctgataaacatcgagaaaacgtgtcacagcttaaaaacattagtaaaaaactgataatttgatagaagacactttcggcttaattggattgataatttctttaaaaagacgagaatgaccctaataccacgcccttcaaacatgacattaaagtaaaagattagaaattatgcaaatctaaatttaccgtcaccctaaatacaccactagcatacattatactccatctttgctacagtcttagctcaaaagcttttgaccttagggtattcttctctttttgaagaatttctctccccaattgagtccaaaatgttctctagcaaattaccagttttttaaagtgtcttttggccgtgacacatttttacgatgtctaccaacaaattacacaaattttgactttcccgtagcaaattttgccaatttttatatatgtttgtagaaatttaaaaataaacactgaaaaataaactacaatgaaaaaacatcaaaatcaactctaaaatttaatttttggttatgtttataagctgaatgattaacgatgggactgtgattgagctattatgaacgaacaaagattctttattaagatatctatattttgtcatcgataaacgattgattataaaaattgttgaagccatcgataaattatgtgagtatgacaaatcgtggttagccttccattaaccccatgcaacaagtacattttgcctctacacgctaagctagggtagagtgcatttgacagaaagctgacaacgatggcataatgaaagaaaaagcattttgaaatgaaattttgtagaactcgcatttatcaaagaaatttgaacaataaaaaaatctcctttttcaaggacataaattttctctttaaataattacttcaaaaatataaaacggtatgcttagatttgtcttgaaaattaattttgcaatctcataaactaattatattttttatagcattgaaaggtcattttttttttgtaatatcgaaagttacccattcattttgatagcacagttaccttccgtttcctttttaactcttcggtcaatttcctgtcgctttgttgtcaaaagtttcctctctctcgagatcgaatagtaggttgcaccgtagcaacatcgtcctgccgtcctgctgctatcggaagaagggacggcacggcgcgtgctctgccgctgccccatcgtctggagaatttttccttcttcttttttaacctttttaatttttaattttaaaaataaacccttccacaatcttttttttaaaatctaaattatttgatcacaccaattcatctggtatggtaaaacaacattaacacacaacctataacagacacaattgtattgttttgccatgctaataagagcggtatggtcaactaatgttgccacgccaatgagatcggcatggtcaaataatgttgtcataccagcgagatcggtatggtagtattgttcgtcgcgtgttgacgtaccaaatttggttgttaacatcgcgccagttcggctagcatgagtaaaagattcagatattgaaaataagtttgagaagtgtttatttaaaagtaaaaaatttaaaaaggttaaaaaaaataaaaaacattctcgcctggatcgccactcacccttgcagccttgctcgaccgattgcttgctgcgacggccagtttcatcagctctttggtggtgtggttccgtctccagcaacctcacatccatagccggtaccattaatcccatcaatccccaatcctgctaacaggagtcatcccataagggcactcacaatacgtcactaaattttgaggagccaaaactgccacgtagactaaaaacttcataagcaacaaccttcgctcagtgcatgtggtctatttagtgggtcccacgaataccaactttatcactttactagcttttcctttatcctcctctctcactccttttccccaccccatagcgccgagtcgggccgagctcctccgctgccgacggcaggggtgccgcgcttggcgctcgccggcgcaccaccctcccccccccctcgccgaaacaacggcgaggtcagcacgcggaagcgggcggcggaggattcggcggcgggggagctcggcgttggctagcgagggcgccgtcgcttcaccacctccgcgggcgagctcctctcgtcgccgccggatgggatggcgaactcggtgtggatctggctcggatttggcgcccctactcctctccctctccggcgagcttcttcactctctctctcctgctctgtggcatgtgtttttctctaacaatttgctgaggttctcggagccaaaactagccacgcgaagctggtaaaaacgcgcgcctcacctccttctctcctccacgtatgcattgggccgacgtggatagagattgccacacgctacctcaccgcactgtgaatggtctaaaaaactaacctggtactagatgtgacacatactagtactataaatctagacatataaatgttcagattcatcgtaatagaatatgtcatatccgattctacattcgttttttatagacaaaagggagtacagcacaagaacctcaccggcagaacgcaaccaaggcgggcagggctccacgcctccacaactctatctcgcggcgttgtgattccttacgaatgcaaatatttccggtgaatcaagaagccatcatttccttctttcttgtcgtgcacatgtacagccagattagattatactccaattagtttcctatagagagagtatcaaattatcttttggttgttgcctcggcggctcggcgtatttttttcgaaaggctgagccaataccagccaaccttgacttcaaacagagaacgttgacataagggaggtaacatcatgatgctactaaagtgaaaacgtaactttcagtgctataaaatcaggatcaattttgcctcgactagatatgcacatttaagattgctctatgtgatttatccaaggatgattcaacagatcggcagcaaaggggcaaactaacagaaggacgattcaacagataggcagcaacaaacctcgcaaaggggcaaactaaaagaatttcatcaaaggataaagactaacctgatgaacttatggcaatgtttcacatcaaaaatcggttatagtgtgcacgaggccaaaaagtagtcatgttattcacaagtagcaacgtaactcccgcaaagataatataaagggcagatgcgtcaaaaaatcaattgtcatgtcataacagcactgagcatcattcactaatcatggatagatgatcagtctggttgaaacaaattgcacttgcatctatgctccaccttccaccttttttgtttctaaagcaagtaggcaatttaaggcgcaaaaatggtgttctacttctcaatggccttccagtccagagtgttactgctcaagatgatgttccctcgccaggttctcgaatctgaatggaagttcttgacaggcttgcttcaagctcgtttaactcatcaatgtccaggtcatcatcaatatttatatcttcatcatcggactcttccacctccttgccattagaagttgatgaacttggcccctcatcctggtttttattgctctgcaacatggaaataaaaatatatgtaacacattcattgaattgccacagagcagcctgcacttatctactatctgccaaaatccctttcaagcggaaaatataaaggaacaaaattattttggggggttgaaggaaccaaagttgttaggattaggatcataggtagggtcgcttttctccaagcaaaatcggaccataggattgggatcctatgagatgtcttttgtttcaatttgaatttaatattggtattcagttatatgtagttatattggtattcaatttgcatgatactacaatccgcatcgcgataccaagtttactgaaaacaatgagttgaactgaacataacaacgtgacatggatacatgatatgtgtatttcatgttgaccattctatccaggcatacctattcaacttcaacgcatacaggtgtttcaggcacaataaatacattcaaataagctaagaaaataatctcactacgaagtgtcacgccaacaaataaacctaagtacattcatggaagaagaaaaaatcagtttggcataagattcagattacttctttattggaagtttgtcctattcatttaatttctcaggaggcgatcgagcatagatacagttaccgccttctgtaaaagtgcctaaaaagatgtttcatttttccatagacttgatttcagatatgtgaaggacaacagcccaacatatgttctgattgggtatctacaacccacttgtgattcaggcatgtcaatagtcttgaaaataacaaagggaatacaaaaggagtgctccccaaataattttaagttcaaggtgtatctgccaaaactgatagttccattatataactttagaatctttgggggagggtatctgggccttttctgctccctcaaacaattagtactttcaatctttagttgtaacattaatcaaacaatttgttaggagcaaatattatagcacatgaatgaaaatttaccggttcttcattagcctctgattcttcctgtctttcatatacatcatatgcttcagcatcatcaacgaacacacttgaatcagccatgaacagctcacggccactggacacaatagcaaatactatcacagtaagtacctcaagcctcgagagctcaaaacgataaactaataggagcaaatactacctcatgcgatcattcttagccctctctgccctcaaggcagccagaccagcttctctttcttctgccttcttccttttccattccatgaataaatctgtggtcataggagttgttgtttttacctttttacgctgttagatggacatggcaacagatcgtcataatagtgaacaagtggaaagaagacaacaaaattcaatattccagacagaacaattttgactgttgatcgtaattctacctgatcttcaatctcatcttcgatagcaatcttttcactctcttcctccaataaggccttcatttgggacttcagtacatagccaggtggaagtgcatgcctgtagtggcaatctttgcccccatttgggcaaacccaaaaccaaccgtactgtttcttctccacggcatcaagaaagtacttgcaaacctacaagacaaaagaattaccaaatcaacatcatgtttgaagacaacatctttcagcttgcaaaacaaaaggagttcttatggtttcactgctacataaattcatcttccaggagagagagagagagagagagagagtaaagaaggcaatacaagttacaaatgcaacagatacagcataaagaaacagaaaactgattttgtaaatcgtagcagcaatgcaatgaagacaataaatatgacttgttagaacagatgcaaatgcatcagagcataatcatagcttgttaatttactatattttcaaactgtgcatcatcaaacttccctcactgccaatatattggcattcaataggttaggctagcattttgtaaggaatgaaataatcaacaaacatttattagactagaatcttaatggcttctataacttataggtgaaagctattacttaaaaatgatgttgcatcatgcacattgcgaaactatgtacatagccaaattgccacacagaatcctagtaagtaaagagcaatggtggaatgacagtaagactacttaggctgtgttcggcagcttactttcccaactcatctccctcattttccgtgcgcacacttttcaaactgttaaacgatgtgtttttttacaaaaatatttctatacgaaagttgctttaaaaaatcatattattccattttttaaaaaaaactaataattaattatgcactaatgagtcactccgttttccgtgcgtgggagattagttcccaaatgcaaggaacaaacgcagcaattcatcataccatatcatgagctgcaactaagaaagagtcccaccatgccaattcatcacaccatatcatgttaaccactgttgcaacatgacatatgtcagattttcctctagttgttccaggtgcattcagaactaaaatcaacacaggtggcttgctaacgatatgaccaagaggacaccctaataactgctgtatgcaacatatattcagaggataaaatgatgctaaccataagatggtctgtgtaaattgtaaaacataactgtttcatggtcagatttgagtatccaattatcatgcattagaagacacaacacaagaagcaaaagcaaatatagaagcagtgaagcactgcctagcacaaatatttacaaaaaagaagcaaaatactagaacctttaattcattcataacaagttggaaaatgacatgccacacattcacacaatggggatgacttaaaatgattggatcacaggcaatatgttgagtagggcatacaatatcagtaggtttattctgctggtactctgctccttttgacgcaacaaccttctcaagagtctcctggtcccagtcttccatggtttctgccatgaaaaagcatatgagaatcttcacagatgaactgacgaattatggacaaatagtacaaaaatagcaattaaaacccatatcagtgtattttacctgcatcacgcttgtcagtgtaaatatcaatcttttcaccctttctttggacattaaggtcatgtgagaacttgcacttaaaacccttctggcactggccaaccttaaagaattcacacactatggacttgggatcgacacctgcataataaaatgtatgtcatcatcatcgtaaccagcatatgagttgcaacatcttacaaaaataccaagctgtgctcatcctagtgaagctatgcttcctctacgtacagcttgttttagccccaatgtgctcacaatgtacagctttgaacaaatcaatcaaaccttagcagcattagcatcaatcagcaccaatacaattagaaacactaccataccacaactgttatcctatcgaatagagattatatggacatatactccttttttccatattgacctgatgagattcacccaatacagcacatcaatcacatacaaactcactgattcacattaagtacatgagcataacaaatacaactcagtgcgcctaaatctatttgctcaaccctaaatcgagggagacatacacacataaagactgggtgatgacaaggtggagaggaggccataccaactgggaccttgggctggctgacggcgaccttgaatagatcattgagttccttctcgcgcgccttctcctcctccttcttcttctgcgcatccacatccacagcaaacagaaaaaaaaaacaacgaacatcagagaagcaaagcaatcgaaaaatagggtaagaagagcttcgatctgagcatcctgcgtgccttggcggcggtcttggtcgggtcgggcttgggctggacggcctgatgcagggactggacgtacttctggacgttcttgctcttgttcttgttcttgagcccgaacgtcttgtcctccacgaccttctgcttcttggccaggtccgccttcgatggcgctgccttcttcggcggcatcctcccttcttcttcttcttcttcttcttcttcttcttcttctt

SEQ ID NO: 9377 - DNA, 18797 bp, Oryza sativa
ggccgtgaagcaaatgagtaaggcggttgtcgggacttctagaaagtaaaaaaaacaaaccccatattcaatttttaaaatctcaatgacaataaaaaggagaagcagcgggcgaggtgtataagagtataattgcagagccgccgacggttgacgggacttctagaaaataaaaatgaatttcaacgatagttatgttcgatttttagaatcacaatgacaataaagagttagcggcggacgggctgtagaggggcatagtggcatcgtttgatgggacttctaaaaattataaaaaataaaactacaagtccatttttttaaggtttggaacttctaaaaagtaaaaaaaaaacaatgataatcatgttcgattttaaaaatctcaatgacaataaagaagggaggcagcgggcgagccgtagaggagtataatggcaaagccgctgatggtttggtgggacttctagaaaataaaaaatgaacccaaacgataattgtgttcgatttttaaaatttcaatgacaacaaagagaagagacagtggacgggccgtagaggagtataatggcaacgtttgacgggacatctagaaattattaaaagaaacccaacgtgataataaactctaaaaactacaaaatccaatttttaaaggttccaaaaaaatgaatagaaattgtggtagatcaagcaagcaaataaagaaggagatgacataaggggtagtaactggtgtgacttttaaaaactacgtaattagaaacacgagaatgataaggtttggtctttcaaagtcttaggacaatgagatagctaaatagctatttaataaattttaagtaaaatcatactaaaaaaatatatgattttgtttgggtgctagacgcgcaattgcgcgggccacccagcttgttctactaatatttggctttatattggtattaaaccaaacatagagtagctaactttgtcctaccaaaaaaattggtagcgccaaaatttacctagattataggccctggatgcacatctcttcacgcctcgctcgtcgttcgtattccgcttcgttcttcctcttgggaatagccgaacatacaggcaagtcatattagcattggcaaaagtttacaaaagtgcaacttagacacaaacagcacgcatggcagcccgtttgccacgataatgatttcatgcatgccacatgcattgcctgcctgcgcctacgtccagatcttacaaattctggacagggagaaatttgggtggtagtgagtgttccagaaactgtagtcgttagcaccaaaacaacggtaaagatccagaaccaagaataatgaaggcaagccaatcctactttttctcaaaaccagataaatccgtttccctccagcaaatggaggcaactgaaaagaggtcaaaacaggcggttgcccctggttaagtccgtctccattacgagaagacacaacaacagcaaacggcaaaggataggatgaactcttcgtatttttatattccattcttaaaaaacaattctgtaacactccagtaaaaagcataactttggggtaacattttacagtgtaaaggaaaaacagcatgcattacgtataccacatatttatccacgtcgggacaactcactgagcaagctatctaagcttggcagaaaatcagaagctcctatgtactgcaaatgtgcgcaattacttgactggaacaaactaactttaatttgcgcgtcaaaccacttggtagttataagtaaccaatcgattcctctgagaaaactttggtgggctaccttccctcagcggacggatggcggtcacctgaaacaagaatttgcaacgcaagaacataaattcaactagaaaaacaccaaatatagaaagttggactgactaagccaaagaggaacggcatgctatgttcctgactgttttctccgggctaacagtgtcataatgcaatcagttcaaaaaaacattcgaaagcccataaataaatttcagcattagaactgctataaattttcaatgattattctatagggaaaaaaactgctaatttttcaggattagaactgctgttccttaaaagtcagttttagaataacattctactatagaatggtggagaactggagatatccagagttagatatcgctgaacttttgtatctttaaatgcatgtataccattttcctaaaaaaccaggaaaggacacccccactacttggtgtaaaatgctaagtgggtggccatgcaaccttcccagagcaaattaggcgtcaagtggctaaaagacttgatgcatggaaaggagtttaatctacagaccatgggtcgagattctcagatctgatcgcacaaggggtagtgttctaaagaaagttggatgaggttgggaaggtcaaacaacaaacatacaaagttttcagcagaaagttcattgactaagaatcattattaattcaaaacagaatacacacaaccatcaccatgaaagatgccatgaaagcttcatgaacaatggtagctgtaaagtcaactaatttcaactcagcgaaaggctagtaaaaatgatgtgatacagcaaaatgcccatgaaaaattcaatcctccaagatattttgaagtgcctgattgtgtcaaattgctctgtatgcatgtaagtatggtccgctcaataatcaggcaactatggtaaagaaggaaaatcagaaagtatgcatgtatgacacagtgggatataataaccaaccttcaaatcactaaatgtatttgatgcagaaaacccaacagatatcgggaagaatgttgatggatcagctgcagggacagtgaactccaaagaaccacttcaaatgaaaaaataaagttagcatggacaccgtggagggaaaactgtgcgatactagaaaagaggataatgttgagaaaacatatacttcttgtacctgcggtttgattgatcaacaagaataatggaccactccaacactgaatttcttgagtcatacctggatgtaaagacaagaaatgaataaatgaatgaaagtaatgaagctatgcagctaaagatcagcttggcaggtgatcagaagaaacttccataaaaaaatcattttcaaacaaaaacatgagccacatcacaaattattctaaagctctaattatactataatgcaatgtataacacgagaaagcaaagccaggctagatatttatttgcatttactatttgttaacataaacaccaagacttttgtcaacgtgcagttaatgtccaatactccaaatagttctttggcagcaaaaagtatttgttaacgagctccacctttcactagtaacctaaactttaaatgctcaatgaaaacttttgcacgatcttttctttccatttaggtgcaatgttaaacttcaaaattaacagttaatagcattagagcagtcccaacccatagtgtccataaacagtgtctatgatgtcatatcaataagacatcacaatagaaactacactccacaacccatgatttcttaaagtgggccattaataaatgtatcatctctcttctctaccaatcatatttattcttcatctattatgaaaacactattctgtcccaatgcaaaacttgatagtgtctagtgcataggttctcatgttgaagctgtgtcttgcatgagacctagtttcttcctctctttactctctcttaattaatatagtgccacataagctaaaagtcctatatggcaatgtagttaatgccatagacaccatcctaggtggagggttgggactgcccttatgcatggtaccagacaattaagacaagacatgggccaagaaacattacctccattctccgtctatctgcctaacacctggagcctccctaagtgcggggagagggatagagatgacaacattgtgcaaatcaaacatctctgaagcttcatattcaatgttcacataggtttcatttccggacaccgaaggccaacagttcactgcaattggcaaaaccaggttatacatgtgcaacttagcaaacaactttaagcaaacagttctttttacctgccaatggaagagatgactcattcaactcctggattctccatttcaccaacggtgtttcattttgaccactggggaaaggcctgtttggatcttttgcccccacaatttgttgactgttgaataactctttgttgatattggggtgtgtcttgaagttaaggccaggtacatcttggttctcaatctgtcgagcacaccaaatatttgaagatttagtaactcctgattaaaactaaatttagataataccattagtcaaaagagttttgcaggtaagtgattcaggtaaatattaacttgccgatgtcaggaaatccctgagttctatagcaacttgtataatctaattaggaacaaacaagaatttaacaattaatttgtgatgaatgcaattgttcagaccaaaagagcttggttctcaaaggtctgatttatggaaagcggtgcagaacaacaattctcaaagaagcttggttctcatggcctacgaattatctgaagatattcaaaacagtagtaatttcaacaaatattcagaaatggggtttgagttgtataaagctgtgcaattagttaatagatgcaagcagaagcttcatgcaaattctcattaaaaacaaactaatagattgtgttgattccaaacaagggcataatcagactaaaagatccagacaccatatatagaaaataacctgtaactgaataaaaccatcagtgtcattcagaatttggagagccagggttccttgaatatcaaaattgctaactcccccatcccttttaacagtgacattgagcttctcttcaattgtcactgtgataggatcgcttggtgggatatatgatgaccttgattgagttgcacttggttgagtgtcctccaaaatgacttctccttcagctttcaaagactcaaggaactggtttgtcttctgtgctttgcttaatttcataccaccaggaactttagtagaagcagatgcaggagcaggagcagatgggcggcctgtacatatgccagccgtcaagataaaacagcatctagatagtcataacaccaccaaccaaaattaaccatcctatatccactagccacaccattaccctagagaatcgactttactcaagtcaaaagaggtctcaataaattgagttaaaatacatgtggaattgtggatgcaggtatttctttcttgaaccactagccatttcgttggtacttttgttgtggcagaacccatcactactttcgaacaaatcaacaaactattgcacaattaagtgattttatttatgagctacggtgttagatgaacaatgtgtaagatgcacatttgccctgcaatttggcaaatagttatgtgtattactttctggcatgtcacaactgacaaacttaaaaagcacattagtacaagtacaatattgtttgtctcacataagaaagaaaggttgtctaactcagtatcaagatcctgggtagaacctaatccaaatcataggagcacggaaatataatttaaaataactggttgaaatcctatcttatgctgcatggatgattctctccctaaatcattaggtgtatgtatgaacaggctaaaagaactgccataaaatatttactactagttttggttaccaatgctcaggaaaatttattgttacaggaatattacaagtctagtcagcttccttgataggactccaaaaggaaatgctaaataatatttccatttccacatgtaaggcatttgtttgagtacaaacctttggccttgtgggtgaacgagtccatatcaccaaatataggatcgccccctggaccaccacctctaatgcccatgtcactgaagctgtttggagttctcaaggatccaaatcctcccttgtcaggcttccctctatcagtctgcatatttcaacagattttaccaacttatataaagatgaaaaataaagctatgcagttactggttcactacgccttcaacattaatttttagcatatatttcctatgtgttcgtagatacagtttgcaacatttaagatctaaggttccatgtgatactgagatgtaactacactgaaccagataactacatgctctatatttgagtataggtagcacaaaccttgcttttctcaatctcagtgactttcctcctcatgacatccttagtttcatttattttgctttgcataaccagcttgtgcagcttttcttcatggctctccatttcacagtattgtttaacttgtgcaacagttacgttctctttgtttccaagagaaatggcttcaataaaggcaaacagaagctcgaatgctgccttacagacaccctcttcatccaaagagggagcatattcaggtatctttgtagacgttcaaggaaatcactgcattgaattggtatgcacaaaaggcaaatactaactatgtcgtcagcaacaagaaatagggtttatcaggttagtggtgactactctgttgatctttgttccaaagtgaagttgttctgcagttacacttaatactgcccttttctccttgccaaaaagaatataagttcgaatttttcattgtgataaaactattgaatgcggagctacagccttttttttaatctttctgaaatagctacatttttttaaagaaataatttagcgtttgagaatagaaatatagcacaactgatggtaggatacaagcttggagagtagccttaaagtatccagatcttcaagaatgttactttgcttatttgtgatgagaagcaaatacagtgcttcaattggttgatagacataacgaacattttcagtctcaacataagtatgttgctttccacttccgaccagcttcggaaatgctgcaagcagcccatcgatccttatccgggacatgtcaacaaattgtctcgaaacaagagctgaaatcaaaaaatgacaaatttcttgttcataacattataagtgtagacataaacagactacaaaatgcaaaaattctaaagaccaaaacttgtgcatataaaagccattttagtgttgttacttggatagaattggtgtacttgcgtataagaaaaggatgttaattgctattgttagcaaaattgtattgccccttttttgggctgcaagagctaatataagaggacatcccattagagaattgtgaatccaacaagtcaattgttcgagaaagttgtgaatccaataaataaatcaataacaaaagatactgtgaattggaaattttcaacaaactcaccttttccagacttcgatataatagaagctgcaagaaccacctgtatgtgtataaaagaaacaatcactcttcttaatagagcaaaaaaatgcaacagtttaaaatgaaacaaggataatgctcattcctttgctgtgatgcccttactaaatgtcctttcctgaatcaatttacaacacagtaacattgcaaatgagcaattcgaataaaccagccataccattttgaatggcctttttagttccagggattaccaaatccaagttgacaagatatagaactgcaagacggaaagtaatgagttccaaagcaatcgatccatgcgagacaactgaacaaaataaatttgtcaacactgcagatgcataaccacagaaaacataaataatgagtttgtcaataagtacaatgtttcttatgcttttgcgtcacatgtccaacaggatttaacaaactttattaatgaccagagaatactgccgctgttgtgatgcataaactaaataaaaaccagcacacttgaattgcatcaaaagttcaagatccaattgaggccaatcaaagttactaaaacacaataacaaggaaaaactgcatgaagttaagtgaccatcgtgaacacagatgaaatcagacatatttgggaatattggttattaggaatttatatagcataaattgctgatgatggataggcatcaatcagcataccactagacgttactacatccgatgtatgaaaaaaatacaaactttcatagatttataacaaccatgttaaaaaaaatcacataatacaaacccacgtaacagaaaaaatatgatatcaatgcctaattgaaacaacgtaaggctcaagctagttttcctaattaagcaacgtccaactagtgcagaaattctaagcataacgtgcgtatatccagagatccagactcacaaagtactgaatcacaggaagaaaatctcacaaccaaactgcttggcatgcaacactcctcgcaaaaacgcacactatcggacgatcctcatactgcacacgtaaaccgaccatccagacaaacggaacgccccggtggcgcacaaactaaattttctaagcaattaagagacgctacgaagaactcgtgcaaaccccaccggcactcccaacacgagcctggactccaacccgagagattccgacaggcaaacgcacccagcgaaatgaatcaacaaggccagcgccctgcggatccggcctccgggtggcgcgaccgaccaggcggctccgtcactgcggcgcgtcgatggcggaaggcacgagtcccgatcagatcctcgcgccccgcaccgcaggcagcacccgcgcgcgggcggagaaaaccaacccgaatcaaaccctagggctcccagggagaatccggaatggagagaaggcgaacgcgacggggagaagggaggaggtcgggtgcgcgcgtacctcagatccgcgagggaagggaggagccgagccgaggacgacgacgcaggcaacagtgagctcgctcgctcgcctcgctcgctcgcgcggtcgcgggtcgggccatttatcggtgggtggtgaactggttgggccgtacaagcacgggctaattgggcccaaaggcctagcaaataggctgattgagcccagggcctagttctgtggaagttaggcccaatattgggcattgagctatatctatgggcagagtttatgctatgtttttgttttgttagagagcatcagcatccaatgctcttgctagttattttgtgtcaaaaagaaaagtatcattggtttatgctggtttcagaaggggaagggaattccaatcctgcaaccaaaatgaagaaaaactgagagcaagtacaatagcaagctacaagcttgcttacttttttttttcttctcaaatatggagaagagagacgagaaaaagagagagcatgcttttatgcaagagtcaatcttgcaggcgatccaaaagaggtgaatgaaatagaggaactgaagaaagagaggggaggataaaaattggagacagctttgtagacaaactattgtactcctagatgttagctgcagtatactacgtgtaagagcttatagacaatagttaactctgctattaaacttacttggagaagaatggtgctttcagcgaagcaaaagacttttctttcgacaaatgattagtaagtgccttgtgcatgtttctagtttaagtcggccaccgatactactaccaaccaaataatcggcgtacctgaatacattgatatgggtatggagatgttcaggtaccaaaaccagcagaatctaccaagaacgatagacaagtactagtgtcctatataggacaagcatctagctgaactgttacgacgtgtgtaagcaatgcgtctgtcggctgagttatttggagtactagccaagcaagcatgattgcaagagcatgcgcatgcggcgtgctgatcgttgggaatacagcattctgaaatcctgatcgtttgcccttgtcgtttgttaacagtgttaccaaagcattgtgccttttgtcgtttcacagagacagccaatacagtagataagataactggcattactctgcattacctggatttctcttcttctttgaatgcaagttagaaatactgtcctgttctttctttttctgcacaatgagtccctcttaattaatttgcctgctgcaactcacagattcccagtccaccatggagtataatcttgtaataatgctaggtactagtacatgtacaaaccccaaacaaaattgtcagttggcgcaaactcacagtccacaagtacagtgcaattaagatcttatgttctctggatacaaataaaaggtggtagcaagcattcatcatccatacgacatatatatttggcactatcacattcagcaatcgcatttttggtatatgagtatgcatcaagtgaagatgtcaatgttacataatctcgctgcactgctagcagcactatcacattcaacaatcgcatttttggtatatgggcatgcatcaagtgaagatgtcaatgttacataatctcgctgcactgctagcatgtaaacctttttagcataaactcttaagtcactgaaaaaagaactggaatcacagttccatagtttccatagccaactgggtcagcacatcgggcacacatatttcataaccagaaaaacccatgtcttacaattaataggtcaacccatagttcatggagtattgtacattggaagagaagcacacacaatattagaacacaccaccatttttttccaccgcttcattttctttttcttactcttcacacacaacaatcatcaggaaaaaaactgcctgtaaacagttagaattgtctcaaatcaaccctgacaaatcatacattttcacggagggttcaacctcgactctcgagaatgcaatctaaattagaaaatacacaaaggaagaaaagcaacctaacaataataagctctgataatatgactgaattatgaaaccggaacatccttcagtgaggcaggatccaccttaggagggtctgaatgacgcctccctctttccatcagcttatctgcatgctcaccatttggtttgtctgcgactgggaaggataagcgcttctttattgaagaatggaccaggggtactctctcaggaacctcaaacctgtcagtcaatagactgcggtaccgagacttcgcccttgcagactctgtggactgcatgtagctggggagagctggtgtgcttgttaggctcgcatcatcccgaacagaggcaccacctgtgctctgcctccttgggcgttcagagcgtatgcttgtgatgctcctcaagtcatcctccttatatagccagctatcccgtggacttgctggtctgatctttccggtaactgaggggacccttgacgggggagttgatggcgattgccgacttggtggacggcttgacttgtttggtgttgcaggtctctggattgagattgcgcggggtacataagtacgagaagcgctagtgctgggattctttgttgaataatggtccttaggatccttatctgatatcactcggctctcccaaggccttgatgtcatccagcgttccatccagctccatccccagttaggattcccttgatccgtgaaggtaggtgttatagttcggccagaattcttccactgcaggagtcaaaacagagaaggggctttttttagtaacgagatatacaattacatctatcgagatatcacttaaagctacaataggtaagaataaggaggaaaataacaagaaaagtgagtaattcaaagaggaaacttgcctggtgagaaaatgcataggcaagagctctttcccgccttagcgcagcttcttgtttcatcattaggctggtctcaacctgctccttggactgatggctatgatcccaatcttcatcaatctgtcaatgaaataaaatagcatagtattgttagaaacctgctatatatcagaatcagctcattctattatagcagaacttttaaggttacataaaactctactatcatgcaacagtaatttttgctatggtttatgtttcttctattccataaataaaagtatagaatatggaatggctcaagtaggctccataagtgatttatgcttgtagactgtaaagaagaaaaaataccgataaaagaatctataggatcttggaaggattacggagtgcttaccttcattttctcaagttccctctgatgctttaattgtagctgcctttgaagagcctgtttttcctcctccatcttcacccttctagagtatatttgagtttgaactctggtcatggtttgtgtgcaatgcaaggtgtgcgcagtttgtcgtttgacggcgtttccatcaaccagcgacttcaatctaactagccctctaagtgctcgcagcgctcttcttgcctgaaataatattagttctgtaaaataagtagccacttaatgtcacataaataaaacagaacttaacaaagatttaaagctcatcaagtcccaatggaagtatcttgtcttgcttcactttgatttttatagctattatatcaacaccaacatattgtgatgtgtaacaacactggagtctggaaacatcaaacgtcagactaatgtatgtttcattttgaccagcagaacacaatattgacggtgttaccaaaatggacaaagcagaaaatgatgcatctgacagcaattttctaccaaccaaattagatatcttacaaacacttaatattagcaggctgttagctaaagtgcatgctcaggaatgaaaaataaatgcccaagacagtgacccgcacaaataacaagatataatcattttttgggtgtattcttagtgaaaagacgtaaacatgggtgacaaggacgaacacaattatactacaagtgcagttggttaccagataacccctgaaggcagtctgaatcttgatagcggcaagctcatcctttgaactaacaggcgatttcggcacagccgtggtggctgttgtgaggcggaccacctcagcagcggcctgggcagcgacggcagcagcttctgcagcaacagcagaggcaagtgcaacagagtacgcatgcttgttctgttcactgtcagtttcaacagccttgacatctttgatctcctcaggctgtggctggatagggtgtgttggcggtggcggtggcggctgtggaggcggtgctgtagaggtaggcactgccactgttgaggtccaaggatcagacttcttagactttccaaatggccatttcctcctggatctcgacttgtccgccttctcgatcttcatggtaatcaaaagatatatattgaagcaaggagaatttttatgacaagtatagcgatttattgaggaagcagataagttttggcataccttagcttccctcccatctggatcggatgagctgaagactttcttgacagcactgaaccaatttcctttcttacccatttttttggtgttcctttattgtgtcttcagctaaagcctgaaagcatcagagcagacaccaaaggttcaggacacgaatggctgtaaaagatcagctgaaatcatataaccaccagtaaaatctatggttttctgcagaattaaaaagttcgacatggtcgcgcacagaaaagagggtttttagtaagatgtgttaaagatcagaagttctgccagtattatgatactgcctcaaacccaaccggtcaagtatccccactcgtaaaatcaaagatttaattttaccagaaaatcagcatggccaccaaaaattgacaaaaaaggagcacgcaaaagccttaaaccgatcagagtaaaaaaagaagcaaggaaccgaactccatggtttggagctagacgattaacgtcagtcgccaaactccaccacaacttactacctttctcacaaaaaagggcaaaactttgaccactaaattatcctagttccgcgtgttctccttcctcgctcgatcaatctggcagcggcaaaacctctcaaaccaaaaggatcaaacaccaacccagactgacaaaatcccccacccccgaaacaaaccctcgccacctgcggccaaatcccatcacaaatgcgcagcgaaattaaccctggattcacctggagcggagccacggaaagcgcgcagccaggaagaacgccaaaaccgggggacgcaacgcaaaaccccaaaagaaagatgccgttttttacagtgagaaaaggcgagagagctttcacctcaaagcaaccaaccaccgaaagccgctcaccttcctcgcccaactgaagccgccaagaaacctaactcgagccgccccgcccctgcctccctcccaagccaccgcccaccgtccctccccctgcttctactacgggtcagatcaaatcaacgaccccagccatcttaagcggaagagacggaaaagaaaaaagaaatctcaacactcacagaggcggaaatggtggataacccaacctgtttttttttcttctctcctttttttttttttactttcctcgccccgtcgaaaggcgccgccgctttggcttttatcggcagcacgcagaattgattcgctctcgcggtcgcggccaccaccaccccggacgacgacgaccccgccctcctcctcctcctcctcaccaccaccagccgttacgtgggcccccccgcgcccccctctgaccgcgtggggaccaccgcgagcagcagcagcagcagcagcaccgggccccacgacgacgacgagccgttcgttccctcctcttcctctagtacgattctacgaactcctcctctctctctctctctccgtcgccgcggtcaccggctcaccgcaccgtgacagcggagaggcgtgtcgctgtcgcctcttatggaggcggaaggcgagcgaatccccccagctgctgctggtccatgacaggtgggccccacctcgccgtgggcgggacgggacgggacggcgcggtggtggcccacacgtcagcggcgggttttttttttccgttgcttgtacgacccgggacggcgccgtgcgggccgtgcatgcctaaccggtggcaggtacgagtacgactacaccggctcgtacacaagccgtgacacgacacctgtagacctgacctcccccaagtatacgtggtccacatgtaaaatatagataggagtctagtcctttgggtctgttacgtgggggggcggggctggtagtataccctacttgccgttaatgccgtgttaaatgaggcgtttaagcctttgattaagtgcgagtgtacccgtagatgcaaaaacgtttgtggtcttgcagagctggaaaaaaggcgatgctcggcggtttttacagagcagggacaaagctgatgagcaaccgcaaactgctctcgtcgtttgtaggagtaactttttgcaggtttttgccacccatgttccggtcgaagggggagcggtataaaacaagctgcaaatgggtggcgatggcacatcaatattcaatcatgcgattaaaatagcgttggtgtcagtgacagtgcaaagccgccaacgagatgagatccgttacttggatcgagttctttcggggttttttttttcttttttactcctctactcctactattcctgtgtctgtgtgcatgccagcctttgtgcggtgtcttggatcttgggtggggagcggccatggcctatttggcctcggttcttggtgcccttgcacgtgccgagtgccagtttgggcagccgtctccggccgccttttcaccccggcgcgccgctgccttttcacccgtacgcgagcgaaaggctctgcctttgcctgcaacctgcagctttgttgattgccacagtgagattgagggcgcgatggattgatagtgccatctgtaaactctcaccgcgccgccgcggtgaaaggttcatgagaacgtgctgatcaccgagcgccgaggcgagagctttttctgtccagtcaaataccgtatgttcagctgtgctcacatgtcatcttgaacactgctactattatgtttttgtgtttgtgtagtcacatgcactaacccaggtggctaatcattgggggtagaatggtagattatggcctctccgcgtagaatcttggccatacatactttccaccttgcactttgcagcggagtgagtagtacattaatctgctactactagttgtatatttgtatgtattcattgatatatgtacaatgtacttatcacgacactgaggtactgcgtggtggtttgatcctttcattattgtgagactacacatctctaatcaccaagacaccaatgctctcatgattgcttgttgatgcatggtcagtgacttggtacgggtgccgggcgtcgcttttccgatcagaaattattgtaccgtggtaagacctttagatgggactaaaacttttaactccctatcacatcggatgtttggatataaattataaatattaaacgtggactattaataaaacccatctataatcttggactaattcgcgagacgaatctattgagtctaattaatctatgattagcctatgtgatgctacagtaaatattctctaattatggattaattaggcttaaaaaatttatctcgcaaattagctttcatttatataattagtttggtaaatagtatatatttaatactttaaattagtgtctaaatatagagactaaaattaagtcataacatccaaacaccacctaagaatgaactgcgcagacttgaagtgggtgagcaaccgaacgtcgcacgatcgtaagtgcaatcgattttgtaacaacaaaagaataaaagagatggtagtagtagtattgattattgaagagacgagggttggttgtccatgactccacgggcaaggccacagggatcctctgtacgatcaactatacacagagagctacagtgtttgtgccatagaactctttggaccgttggatcagactttgcatgattgggactgggtctactgggagcctgggatgctacagtatgctttatgcagtagcatggctggaaaaatgtactctagactatacggctagacacacaatgccaagagacttctgaacaatagtttatacgcaaaggcaactcaatagtattaggcccctttagggcccctttgatttgtaggaaaaatgtaggaattttggaggatttcaatcctatggaaaaaaaatcttatgaaggcctttgagacaaaggattgaatcctatccaatcctttaaaattcctatggaatgggtaatcctatgcacattttggaggaaagttagcaagaggtctaacctcttggaacatttcctctgagtctatctctctcatctgattcctgcgtttttcctgtggtccaatcaaacggccattcctgtgtttttcctgtgttttgcaatcctctgttttacaattgtattcctgtcagaatcctgtgtttttcctattcctctgttttttcattcctacgattcaaaggggcccttaatatgtagaaaaagtataagaattttggaggattttaatcctataaaaacttcttgtgaagacctttaaaacattggattgaatcatatcatatcttttgaaatttctatagaatgaatgatcctatagaaattttggaggaaaattagtaagatattcaacatcttgaaaaatttcctttaaatatatctttctcatctgattttggtgtatttcctgcggtcaacattgtcattcctatgttttacagtgttttgtatttgcattcctgttaaggacccctttaaaacgcatgattgagaaaacacaggaataggaaaaacgtaggaatataatgtcatacttattggattcctatgatactttgaaacacaggaaagtcaccaaccgtcgttttattagcacacagaaaaaacacaggaatttttagacacacgaagaaaaataaacatgatgtgagatctcatgcttattttcctccaaaattactcaaacaatgtctattccatagtaatttcaaaagaattggtaggaaataatcctttatttctaaggactctgtagaattatttttcatagaataaaatcctacgttttttctattttttttcattcatgtgattcaaatgggtcctagcgtgcgatattacacgcaaacttttttttagaacttaccacacactaacgaaataatgccagctcttttcagcacagaaatatagttgattagtcaatgatcttaaggaaaaagatgggtttttatgggtttgatgtgcttaaccgttcacctttgcttagtaagatatcagcttacttaattttccgatgtattttttgttatacaaatttatgctgggatatcagcttacttaatttatgctgggatatacaaatttgttaacacagaaaaaacggatgaatttaagtagactagaaaaaagcagttaaaatgcactatcattttagtgtttcgtgcattaccatttaccagcatccgattatttagtaaagggagatatatttactacttcatgaaatacactttactacgctgggatgagagtgagacactaccatcacccttagcactgattatcagtttggagaagttcccagcttctccccggaaaacggagggattaattaatcatcacatgattaaatggttattaactaaaatagcttaaaatgattaatgtaatttttaaagcaacttttatgtagactttttttcaaaaaatacaccgtttatcagtttgaaaaacctgcgcgtaaaatacgaaagatgaagttgggaactcacacc

SEQ ID NO: 9378 - DNA, 3965 bp, Oryza sativa
cacaaaggcagcaatcttcttcccattcttcacaagctgcacacgagcacacttacggatggcagagttgggctgcttggcctcaataccactgcaatagagccatcaaatttctcacattagcataaactcacaaggcaaagggtgacaaaaccatattatagtttctacatacatcttctccagaacgatgcccttggcatgagatgacccagcaaagggtttcttccactcattacccaagtggctcttcttgtaggccttgtctgcccatctctggttcctgcggtgggtcttgagcttgcgcccagctcccataccacgtgtcttcctgcattttgaagaattcatggtcaatgcaactatattaaaacaatattatgatctacaattcgatggttgacatataacatagtgctagaaaagaacgcgtgcacaatgtaaagggatgaaatgaataattgaaaggggtatgccatccagattcagactattagcaagcataagaaacagtgttctttgatgaacataatatgtaataaatttgccatcagaagtcgatagttgtttgcaaagtcaggcttaagatttgacagctaaacaaatggcgattcctttaaacaataaaaatgataacagtgtatgctaccatgcataacctcccagatccaagtaaattgatccaagaaattctgattaaacagcagcaacggattgatatcgcttatgaatatgtttagtgctgacggtttataatctgatcagcactggaccgtcaataagcttagttccatcacacgcaaatttaccaatttacaagtattgcgcatacaaaactcaagtggtatattcaagcatccagctacgagggaactcgactaagccattccagatcgctaaacctatacagacgaaatccatcgcaggagagtgacggggagcttaccccatgttggcggaagggcagcgaagatctccgaggaggcgaggcggcggcggcggcggcggcgaggggagcacgagctgggagcggcggcggcggcaatagaggagagggatagggggaagggcagcgaagctatttatttgcggtggcgttgctgtctagggtttgctaatgggccttcctgcttcaagatccgtgctggatggacgacggcccagatgttgagaagtggatcgcgggagtttctgggcctcacatttttcgcttttgcttatacttatcagttaaaatttaaatttcgaagtttattttttagtatttgtttttaaattgctaagaacacgtatataaatattttatacacaaattatttttcatttaagaattatgagtcctttttttgtagcattagttgtgcacgttaaatatttaaatgcctaattactagtcgctttgtttcaactacgactatctctcgtatataatattactagatgactacccgccgtgtgctgcggaaaattaagttgcataatatgtacaaataagacgtaatttgattatcaaaactaaaataatttgatataattttgagactaaaaataattgatattgcatatttttaagagagaagaaagaagagacaatttaaaccatagatctatcatccaaaggctataaattattggggtgatgtggcttaatgagagaagagagaagtagcattatctacacttagtggggatgaactaggattcttggtttgtatctaagtgcatctaattttgaacgtagttatcgttattttttgcttgttaaaactgtttgcatgcctttcattaaactatagttgtgaaaagttttgacgaaaatcaatgcaatgtggaactggcgcctaactttagatcaagcattaaggcgcatgatccttatagttctatcagaggtgtggttccttattgtacagggatgcgcacctatgctccctataatagaaatatttgttagtggtcaatttagttcgaacaagaaagtgagtgtcagtgatatgggcccagggtaccccccatacaaagggaggaagccgcctcaaacccacgtgccgccccccccccccctccgggagggggggtgttgaagtggtggctgtttccgagttgggaccccctcctcgctctgattcgtgattcgtgtgtgcgccctgggcaggcgttcccagcgcccaactactgtgtttaatgaggtcctgtcggccgtggcacgctgtatttaatgtggcgagcatgcacactgacaggccactagcagcaggaatgacggatgtgacggcggacaggcataggacagggcgctgtctgcacatgcctactgctagcaggggacatggcctacgtctaccctgtcccgtcgccattgatgaggttttttttcctctcacttggactcggtccagcttttctctgcacaggtccgttcaagagatctctaccccttggtggggctggacgcccaaaagtcgtcgatagttaagaaggaatgacatgggcatccacccgtactgctcagcatgatgggatggggcccatgtcgtggtaaggtgcgcatggcttcacacgtcgggaggacgagagacacattaattacctatagagaatgttttcctttcccttgaagctaagtcttgggccttttgtggtaaccccttaagatataaaaggagatccatgcctgaggggaaggagaggccgaagaaaagaaagcacttgtattctcctagcataatcaaccacacataggagtagggtattacatttccacaacgcccggaacctgtataaaccgattccgtccccattgcccccgaggggcccgaatcctctctgaatcgccttcccttcatttctcaaaccttcacccgtattcctggtctgaaccataaaggggacccccacagtccttgcttgaggagtttaccctccaacagtgagcaaatgaacttatggttttgaactttagtgggagaaaccaaccactgtaccaactctaggatttttgtcttttaacagagccattagtcttttgagtagagttatgggtttcatttaccagccacctcttagtccacacccaacttgaaaagtgttatcgatacataagtcgcctttgccatcataatattttcattttttctcctttttctaccaaaccatcaaacttttattacattcaaatacaaatagtttgctgaaaaaaatacactatattcctggaaaagcaatacaaataatctgttttaccaaatcaaaagcatcttgtttttgttagtggagtgtggagaagagaccatgggcataaccaaaccaaaaaaccaaaacaaaaccgtttgtcacaaaaaaaaaacaattaccagacgccacaaaggccacggcctacagccttttcagcccacgacccaaagacattagccggaggcccagccaagttcccctatcaccatccaactcgtttccccacgaaaccagtccaccaccatctctagaactttccatctcgcctccgcctccgcctccgcctccccccacctcctaagctccaaacccaagaaaccctcctcctccgccgcccgccgcccaatccgacccgccggagcgcgaagggagaaacagggcagccagaagaagaagaagaagaagaagaagaagaagaagaagaagaagaagggaggatgccgccgaagaaggcagcgccatcgaaggcggacctggccaagaagcagaaggtcgtggaggacaagacgttcgggctcaagaacaagaacaagagcaagaacgtccagaagtacgtccagtccctgcatcaggccgtccagcccaagcccgacccgaccaagaccgccgccaaggcacgcaggatgctcagatcgaagctcttcttaccctatttttcgattgctttgcttctctgatgttcgttgttttttttttctgtttgctgtggatgtggatgcgcagaagaagaa

SEQ ID NO: 9379 - DNA, 13805 bp, Oryza sativa
cttggactttaaaataatcccactaacaaacttcactccagaattctccgaagcccctagatgcacaccctgtgagcattttttttttgtgttacagttttcaatcaaataaggtcaagtgtttaagtacgaaaattaaatataagacctgttcaagtaaataggcatttccatcatccatttccttgtcatatatgtgttcatctagctcccgctcagctggagcagcatgattgtgagaagaagcaagaataccacctgcctgcaagaagttatttgaggaaaatatgggaggaagcaaacaaaggaggaagttgagcacaatcgatattactagactggcacagatagcagctacaataaaaacttgtgattgctgagcagggttactgttcacaatttaaaccaaataaagtgactactcatcagttacaagcagcatgctcttgtcaaattctatgttttttataaagaaagttccatatgcctatcatcaaaaggtgtcatgtactggtgctgatttttttagttccatcttaacagtcaaagaataactggaagaattaattctatgttttcaaagaattgagatacaacctttgacaagaccatcttgaattcaagaagctcattgtatgtttgtagtagtttctcactatttgtattcatctcaagcagatcattctcatgctcgcgcaattttgcctgaaaggaaaaaaggcaagtccttaacaaattattcattttttccttcaaaatagctattagcttcagaaataacagaattgaacggtaataaagacatgagtaatgcacctctagctcctccaaatctatatctggttgcattgcaggtcgaacagaggactttacacctgccttgttgatctgatcattgaaaaatcttagtttgcgtgacatttcagagcatcgctttacctgtaggagaattgaaccatacttaacaacatcaaactacgtaaaagttattcagcagaaaattctctgcgtcaggcgggaaacacaggtgtcaatgtgcatctgtgcatgcacagaagtgacagttgacagaaaaaatatcacaattacagcatcaatctattatattctggtggaacataaataaataaaagcaaggaaccagttatatatattatgaaataatctctccttttttttaatatatgacaccgtttactttttaagatacatttgaccattcattttatttaaaatatatatatatatttattattgattttattgtctcttgatttatcgtcaaatgttctataagcatgacttaaaaaaaattacatttgcataaaaattttgaataagacgaatggtcaaacgtgtgtcaaaaagttaacagtgtcatatattaaaaaaacagaggtagtaacttgattggatcacgattcaaggtatcgatgaatatagtctgacataagaagtaagttcctccaaaatatttctcaacatgataatccccgctgcatgcttcctaaagctaaacaaggtaaccgcctgacttgtccattcactagtcccaagtaaacaatggtggtactccctcatcaaaatataaggcatactgttttctctgagttctattaaaatatagagcttgcatgcaaatttattgatgctttaccttattttccccgatgtatactttgaatgctcactaatcattttctctataattcattaattccctaggcattttaggtaaacaaaaatggcatgctcattttcagttatgttctcttgattttataatcatcgtaatatttctgcacacacaaaatccaccttaaattttcaggagagtatatgagtaccacatggacatgatattcaaacaaatatcttgggtacgagcaggccaagtgaagtaaaaaataatgggcgccacagaacaatagtatccaggtagaaatcagcatagtggaataaaacaaggttcatgcaaaatgatgtgattcacaaaaaaagatagatcgaagataaaaggttggaatacctgattgacaaatatacgctgaaaaggactcttatcctcattcaactgcatataaagaggaataaagttaaaaagagagataagcaattgggccttttttttgcaaatctcaattaaaccattatagcaggaagcacaaccaataaaaaagaacaagttcaaacataactatgtaagcattctctaagttctctgctaggatgatgccatgctcacaaagttctgtagtacacaactataacgatgacggtcaacatttagtctccctctcatgattttctttcatattgtcccaagatttcagcggcatctatgggataaagtgaacagagtacgcaaccccgtttttgcaatcaaactaagagttcataagctttttctaaacatacaggtactggtgtactttaagacccaactcacaaaaatacggtgtctattccattaactgattcatcaaataaatcttgctgaatagcaaggcatgtaactgtccacgaatgataccccatagcaaataatatgtttggcataaaatggtacaaattacaaggcaaagattcatgcatagaccgcaaaacaatgagacctgctaggatcagctaagcacataaatgtatttaaaccatcaccgctccaactcatgcttagagcaagtttaatagtatagctaactattggctattagctcatactaaactaacatgtatagactctattttttgtgttgctagctcttgcatgagagccaacacttctcatttctctctctctctctctctctctctctcttccacataagcttatagttagcttatagcgcactattgtccttgctcttatcataggataatctcgcgcaatagcacattgtttgattcgctccctaacctaatgcatttatatgaacaccgcattcattccctctgatctaaaacaaccccgccacccactatccaatcaacgtagcagcccaaaccagctcagacgacagaaacacgcgagccgtcgcgatccagtgacaccaggcaaaaaaaactagtcctccgatctgagcaccgccaaaaaccagatccaacatgagcggatagcacgacgcgcataagcgagcgcggtagagatcacgattcacgaggctagatcacacagatccgggagggagagaggggcctctgatgcgggcagcgactggcgccgagagcgagagatagagagagagagactcacgtccttgaactggaggagcccgagctcgccgaggtaggtgacggcgaggcgcgcgctctcggcggggatgatgagctgcacgaagcacatcttctcggaccgcaggcggtccatcggcggcagccggtcgaacacccccatctccccggagcagccgccgcctccgcctccggaagcttccaggaggttcgcgaaggccccgcgcgcgcgaggagggagagggagcccggtggcttgtctcagatctgaggccgcgggttcggtctccgaacaattctatttttctcccttctctgaaattctatagcgctagtgcgcaactgccaataccgcacggaagagagaggagaggaggcgcgcggggggggggagggaagcggctcggaaggcggccggtggcagtggctggcatgtgggcccatgcctccctggccctgggtggtgggcgcggatcggtcgcagtttcggtcgcctgcaactccagtccctctgggcgcctcgcgtttcgaggttttcacgcgggtgtagtggtgtaccgaggccaccgaccctgtcggttccgcgtggccgtgttggttgggttgggtccttaatttggggtccctccagagtccagcctgagtgcctgacgagtgtgaccggtggcagtggcagtggcagtggtgggctggtggcttgatcgacgtgggcttcccgtcacctcatggccagaatatacgggccgtatcagatttcagatggaataagttcaattcgtgactcttaaaagtaagtgatcaaaatctaatccatggtcctaaaccacaaaaccggatatatttaccccaaactcttaaaaccggtgcaatttgacttcctaggtggttttagagaacggtttcgctgacgtggcacatacgtgacagtattaactcggtcttctttccacgcggtgttgacgtgacgcttaggtagcattagaaataaaaaatatgtatgggatccattagtcattcacacacaaaataaaaaattgtggggcccactgacatgtgggccccacatgtcatcccctctctctccctttcttcttcctcccttctctctttctctctttctcttctctccccttcggctggccacggggagcacgagcggctggagctggagcggcggcgggcggggccagagcagcggcggcggtagcctctccatcggcctcgccaagtggagagaggagatgagaggagagcaggtgagggaggaacgaaggtggtgggttacacgagaggcggcggtggcgcttgagggccggaagggagaggggagaagcggagccgctgagctcgtgttgtcgccgccggtgcctcctcccgcactcgcgctcgcccgcacgtcgccggagccgttgctcgacccgctcgatgcctccgccgtcgacgtctcgcgcccgctgccgccgtcgacgtcccgcgcgatgcgaggattgatgcggggaggtggtggaggacggcgacgaggagctctaatcccagggatgcggatggatccgaaaccgtagccggctcgtagaccaccgtccccccgctcgatctcgttggcgtcggcgctgccgtcctctctcgcgtcagctctagtccgccgccgcttcagctctcgccgaccgccaccaatccggcccacgcctccctcccccgctgccagctccagcctatcaccgtcgccgctccagctagctcccgctggccgcgtcgcttcagaccccgcccaccgccgctcgctccccgcagacggccgaagtggagagggagaacagaaagagtgaagggaggaggggaggtccgggaggaagaagaaagggaagagatgacaggtggggcccacatgtcagtgggccccacaatcttgtgtgtgtgaatgacaaggaaaaagtacgaaatacccccctgaactatcgcggccgtccgaattaccccctgaaccacaaaactggacattcttcacccccaactacgtaaaccggaagaattacccccctcgacccaatccgcggtggttttggtctacgtggcatacacatggcagtccagtcagcattttagtttttttaatggtgggacccacatgtcagactccactttctctcttcctctatctctctctttctctctctctctctcttcatcggtcagcggcagcgccgcgcacgccggcggccggcatgcatggcgcggcgcggggaagggcgatgggcagcaacgcgggggcaggctggcggtcgatgcgcacgcggtgcgcggggaggtggaggggatgggggagagacgggcgccggcggccatggcggagaggcgagccatggccggaagcgtcggggggaggacgggggatggcggacaaaggcgcgcgtcgggagctggagcggcgtcgggatgaggacggggaggagcaagagaggcggaagagggagacagcggcggcggaggaggaggccgttcccgcgaccgccgctcgccatttcctccgcgcccaccttctgtcccggcggcctcccgcctcagcgtcacgcccgtcacagcctaccggttgcctgctgcacagaggggcgggcggcaaacggtggacgacgccgcgtgggagcgggcggtgggcgtcggacggcgatgcgcgggggcgggcggtcccgcgccttgagacgctcaaccaggacgtccaccacgtccccgatgctaaccacctgctggtgcctagcggcggtgccgccattgttggcatggtggagcagctgcgtgggcgacgcgaacgccgccatcaccggggaggcggcgactgggaacggcgtggcgctcgctgatggcgacggcgaggcagcggcgcaggaagagcgtggcgagcaggtggtgttaagtttggcatgcatttcttttttgtgagatttggttattttctcgatcgtggtctgatactaacactaacaaattcctttccttttgttagttccccgtgaagatgacgacgctcttgcacctggagaagaagaccggggagcagcaaacgtaggtggtctctacgagctgtacgcggcgttgccgccatgcggagaaggaggagggggctggagtgggccttcttcttcatatgctgtagctggatgagcggtattggtcgatgcagtcctccgagtcgtaggcgagctcgcggagctgcttcatccactccaggacgaagtggtccacggtgccgtcgtcggcctcggattgcatgcggtggagggtgttcatggtggccagctcagcgacctcgctaccgacgccattgagctgccggtattcctcggtcagcaactgaccaacgttgcttacgaggttctaagctgcgttctccatgcttcgatctctctagcttggttggctggaagctagtttggcgaccgtggcggagatgtggacggtggccggaggcggcggcgaggcggggccgtggcagagaggcaggcggcgaggcacgccaacccagctccggccacgggagccgccgtccgcgccgactaccaccggagccgaccgagctcgtcgacccgccgccgcctcccaccacccgcccccgcgcggcgccgtgcgcgccgaccgccctgagccctacagcgcgagagatagggggagagaaacatgagatagataaagtatatatatgacaggtgggccccacaataaaatgctgactggattgccacgtgtacgccacgtagaccaaaaccaccgcggattgggttgaggggggtaatttgtccggtttgcatagttgggggtgaagaatatctggttttgtagtttagggggtaattcggacgaccgcgatagttcaggggggtaattcgtactttttccgaatgacaaatgggtcccacatatatgtttttaattgaaatgccacctcagcgccacaccagcacacaaactaggtcaacaccaccacaacagcgccacgtcagcgaaaccgccctccaaaaccaccaagggagtcaaattgcatcggtttcaatagtttggggggagtgaagatatccggttttacactttaaggtcatggattagattcgtgtcactttgagggtcatgaagtgaacttattctatttcagatccatttgcaactgggtgtcagcccaacttgtgcatcgtggaagggccgaactgcaatgaacaaggtattcctttttttaataagtctattttatgtccctcgtaggctcattattgaatcacatctctaagtacaaaaccgggtataacgtctacaccaacttttaaaaccggagcaaatagactagttcgatggttcaggattaggtttggctaatatgacacgttaaacacggtcagacttcctgagtcagaatgggctatgtatggttctacatcatgacgactttcgcgctccacctagcgaagtcgatagcaaaggggaataagaacctcgtcttctagtgaacgtcgtcatgctgcatacatagtccatgttggctcagcaaatttaaccatggttaacccgtcactttggtaaaaaccgattcccaaacaataatcgaagttttatacttgcacctgttttaaaagttgaggtagatcaaagagaaaagatgaggaaagcaaaatatacttgttctctctctctctcttgtcgaagtccctcttacagcttgactacgagtttcacaaggggctcagtagcaaagctccgatcagtccaagtctgcgcatttttaaagacctatttgctctttgattactactcgtatgggttgattaagttcatggtaatggtcacgtttcaaaaaaaaaaaaaccatggtgagttcaggctttacaggcccagcatttcatttgtttccgcgaggccgatttcgagttttgacttttaaccacaaaatacattatgcatgttctttaatttcgcgtccataaactggaaacgtatcgtggtcaagtgggaaagctcaggattattggatgcgatggaaccgtcaggagttggcctatccagttcagcgaccgtgatcatcggcccacgaaaaggacgcgccatttaatttgcttcgaccgactgcagttagaggcacagttctgtcgagagccattagcaacggaaaagatgaactttcgataagcaaaagagacaatgaggttgagtgcgatgcgacgctgctgctacagccatacaggcacagcagagcacgcagcttagctcgaccgagtgataatgatgcaacagcgaagccgaagctccctgacgtcgacgcggtacgtgataaagccgaataaatacgccatatctccctctggtagttacgagcgatcgcggcacgagcgggtgtgcgtgcgtgcgtgtacgtacattgaatgcatgcgcgagagcggccggtggacggcgacggagctagtactacgagctggccgtagttgtcaacggagcagtggatacaacggcaagcaagcgagagccgagaaccaacgcaagtacgaataatcacggattcacggtacctgccccccgcgcgactggccgcctggatcttctcctgcaaatctgcttgagaaaaccgtgaattgttctgcgtggccgctgtaatctctcgcatccgcatctgtcaaaacgtgaccccgcgccgtgtgccacagtggtagatttcgcttcagacgatcagacgagacgacggggtttcacatgcggcgcgcacgccgggcgcccggcacgcggcttcaccgccccccccccccaccccaacccacccacacacacgcacacggcacacacgcacacacctcgcgcgcagcgcacgcggcgtggcatgtcgcgggcgcgagattaggaccaaagcaacggcggctacgcgggggcgcccgggggggggggggggcatcgcggccatggagctcaaaggtaaaaaaaacctcctgctacatgtcgcccgcgcgtgtgaccggtttcgtacccccaacactgggggctcctccgtatgcacggggctacctttacaaaggcacagacctgccagtctcgcggtaaaatgttacaaacaggattcaccgctttgctagattgcctcgtgattttagttttcagcttggcacgtagtactagcaaagctgtgctagtgcagtagtatttgcagaagccatccaaaagcaaggaagcgctaggagcacagcacgctttgttctgcagaagctttttacctttgatcgagctaaacatgatggtactctgcgtgcaagtgctgctgcaatacgtacgtttctactttctactactactttcttttttttttcagtcgtactaaaaacagagcagcgtactcaaattgccaacgaggatcgatcattatccgagatcaacaaccttgagcgcgtggcgtcgagcgcgacggcagcatcagtatcagagaactgttcaaaacctcaccaaaatatcgtagtaaacaaaaccgagcactgattgtgcagattttgttcgcattgatttcgtccacgggaggccaaaacaccgaaatgattgttcttcctcttgcgtttctgctcgctgcaggccttttttcctcaattctgaaatcctcaagatctgtcacaccttcccgccttatttataaagagcaggacatcctacttgcctagaacaaagctctgcttcaccttggggcaatggcttctcaaggcatggtatattgataggaaggccaatccaggcagagaagaggagagaagaaaggcatctcccagcccattgtgggttctagttgaggtgaggcttcttcattcagtttcgtttgctcctttttctgaacatcctacatcgtaggggtggttacatcaatgcattatgcatggctccaatcagccaaaaatgttttgccgcctctttactgggattggttgctgccacttctcatgcatttctgatttcctcattgaagtaatctccaattttgcccttttctctcgcatatgttctgatgcccaagcctagcacctacctgccttgtttagctaacaagcttgcttctttatccagatacaagctgtaaagctctgtttgagttttgtctcatcgccatcagtcttatgaagaccagctcacatgcatacgtggctatctaaattagttattccggagtttaaaccagtgataaagcaagtgtctttttgtttttgctaatgaaaggtgtgtttatttgggtttgcagctgtcattttggctaggtcctgcaactacttttgcaccatcgccatgcatgattcagctgagtattagggtgtggacgccattgctgctttttttgtggggagttgagtaaggcgaaagagagagcaaacaaaaggggaagccttggggtggtggattcttgcttgcttcaggcctacctttctgcagccttaagtttggtggttgtagtggtgtgtgtataatgtgttatcttccaagggaccatgtaggcctctagtagtgatcatgagagccatcaccgcccgtggcaaagcttaaagaatcggattgctcaccccccttcttctctgtctcaccatgaccatgtgtcatctcccagtttaaggttggccataagtattaaaagccagactgcttgtccttgtggttggctaagtggttggagtactagtcagtgccagattagtcgggcaagcaagcaggaaatgatgctgcctcgcattgccattatctagctgcgttgttcatgtgaagatatacagtgtgttgttcatcttgtagctaggtctctgtgcctctcattcatctctaaatttgttgatgaaagagagggagctgaccactcatattttctttccattttttgtctcgttgcagctttcttgtaggagaccttggtgtttgccgtggctctgaattctgaagtaaagatatagccatgcaggcagccaagataaggtttgtttccattcatttcatccccttccatgctacattccatgtgccatttggtgattgctgcaaacatgatttttttaaatctccctatgatcacgctatgtgatgttagattcccttctccatcttcagccgttgaatcaggtttaattagtcaatgtgcatgcatcggttttgttaatgcaaatgttctctgatccggtcttcagttgggctaccagcccatgttacaagtcctatcttctacgagcaatacgagcaccgcagaaaagttcagaggcaagaagctcctcacatggaagtagttcattactgctcactctctcttgctcaggggagttcaaacagagactcactggtcactacagttgcagatatggcaccgatccgtgatgatatgggtaatttgtgattgggctgctgtaaactacaatttcctccttatcacgtcctgcctgtcacccgtttaaaatttgagaaatttttactactggagccaaagaagagaacaagttttcaaatcaggggcgcatgtgaccgtgactgcgcgcagatagctccattcgcgttgcacaatgcgtgtcttgttcttgagctcggcgccaagggggggcggtggtccacttgtcgctaaccacatctgtaaagctccgcccttttgatcccgtgcttgcacaccgggagattaacttaatgctgccgctgctcctttttcttggttcctgcctctccctctctccgctcggtttgctcccctcctccacttcttgtcggcctctctgctcctttcggcctcggattctctctgtgtttttctacccccattgcatccggtttaagctgaaatcttgagccattttgggattcattcagaaggaatccacagtttggattggttcactactcgatttggttgaagtttctttcttttgcggtcgttttagcatgaggaggggaactgaaatctcctgcttattgtgacaatgctatctctgaacaaaatgcattttctcaagttatattccagcagtacgagcgggaggtaacgcgcttcagttgtgaaccctgcatgccttgtgattcttgcggttttttttttctgaatcttacttgatgtgttcttttctggcatgaaggaatggctccttggaacaccctacccggacgtcttcccagggagctaccaagacgagccggacggcgaggccggccgggccggactccgccgccgacaggccgtcgacgaagtcgccgcccgccgggaggagccccaaggtggagcgccgcatgacgatgagcgcggagagagaggtatctgatctgaacgcaaagcctctactgttcagtacactcttgttgagcagttccatttcgaagtagagttctcttcagtagtactagtactgtggtttggaacaagtacaactgcaaatggcatgtggatgggaaatttgtcagattccaatccgtagttcgttggagtacaagtgcttcaacgatccgctggctgttcataaatgccagagattttttattttcgtttttgtccctgataggtaagtgttctatgtggacactttggacacattctcaattagtagttgttggctggctcttggtcagtctctctcttgatggagcacactgtcaattacaccgaagcagacagaaggtgttccatagcttaattaagtggtccgggatattgaatgattagggaatttaggctatatattgaagcccctgtcagaattaggaatcaggtggatttgagatagctaacaattttcgcagaaaccgtgtactgtatgtgggagcaaccagtgagtgagtgcaggttaggtagaattagcaaacgctgaggaaattgttgatttggacagggaaactgtaattggcaccaccaattgttttttgtattgattatgttattgactgataccaaaagattgacaagctgatttagcacgtttttatgagcgcagatatcaattctgtttgttgcactgttcttttcttccagtagtcacataatccttgcagaaagaaatatccactggactggatagctcgatcactgcaaatattttactactagcattttagcaaatggtagtaaataggaatgtttggaaggtggaattttaagcttcaaaatttccagtgatgcatcagaatgttcgccaaaaccatcttgtcgtgtacttaaaattcgagctactaatatcgttaatcatgccgttgtggaaagtgatgggtttttatgagcactaatattgtcggcatttcgtgtttgcgatgaatatatgaccagaaaaggaggccaccgacgaagctatcggagctagagtcccagctctcgcagctgcaagacgagctcaagaaagccaaggagcagctgctctccaccgagcactccaagcggcgcgccctgcaggaggccgaggacgccagggcgcaggcggcggcggcgtccgcgcaggtcagggactccgaggcgcagctcgccgagctctcctccgccgaggagagccgcctcctcgagcttcgccggctgtcccaggagcgcgaccgctcgtggcagtcggagctcgaggccatgcagaagcagcacg

SEQ ID NO: 9380 - DNA, 3630 bp, Oryza sativa
cctgtttgttagctacactgcaacatacactaatacgctaagatatatagattgattctgttcatggtcaactctatgctaagtgtactagtttaattggtacagtactaagtaaacactgaatccactactctactattataaaattgaagatgttttgccggtattttagtacgttatccgtgtatgagtctgtttttaagttcgtttgcttttggaaatatatatctgtatttgagtcggcttttaagatcgttcagttttggtaatacagaatgaatcatataagaaatctgtttaaaaaaactcgcatgctaacttgagacgatcggactcctaactgtagcccatgattttctaaaaatatatatatctaatcgaactcccatagtgaatttcatcataactaaaccatataacaatagtaagattaaaatagacttcacccattgcaacgcacggatattttttctagtctttacatatatttaagctagcaattttgatgagaacatatcgctcttctttgcacacacataatactcaaattactatgcaagatccaatcactagagttcgcgtccggcaattaaatttacaagtgagtttgtttctaagtatttctttatatgattttgaggatatattgctacctaataatttaattatgattagaaactatggaaagaaccatagagcacttgaaaagaggcaaggagatgaacaagattgtcatgagccttcaagccaaaatgtaggcccaattcatatatcaatttcgagttcaccttggactctatgagtagcccacactaaaatcatcggtcagattgcatttggacttcgatttcaacgttctacatacgtatgtaaagctaacggaaccacatttccaatggatctggtccacgtcaaaattccttccaagttgacaggaatagttgaaacaagaaggcgttcaaattctgtctagatgttgcgtcactggctttgggcccgttgagccgtgtattgtgtcagagttcaatagggacgcgtccaggggtctaatgtcgaccctaaaacctatatattcagtagtcatcgttaatttagtgttgggtttagcttagattacttctgccattgcagtttctcctatagttcagtttaattgtaaaataccaactttgatatcttaatcattcatcagtaaattgagttgcaatatactttgtttttacttttgttatttgattcgcataaagagattagccttctcgcacgacagtggaccaaaactcaataaagcaaaattgaatgaaaattgcaaggctcaaaactaatgtttggtaaaggaaaaagtggtgcggctgtatagtgaatgatgggaaaaaattacaaaactaaaatcctcaccaggcaactgaagctctgataccaactgatgacgctctctctcgtggcccgatcttctggtgaggagataactctcgctttgatcgagtgcgacgtttgcgacgtggctaccaaccagaacaagtccaggacgccatgcaatcgctacaccacaaacgatgtcgtaccaaccgtgacgagtggttgatgatccctgcaatgcaaatgagagaacactgcaagaacaagataagatgcaatctaaatattgcgaataggtaattaagcacaaaggaatagttgcgattgaagtggtagatctaatcgacccggcaaatcaacacaccaactattgggggctctgaatcaatagttgccgactaatcgagcgaggactagagacaaggtgaatggcacttggcaaaattcaactaaacaaaacccaattattttttaggatgtacaaagctatttgtagaggaaaacaaagctagggttaagtgctaattcgtggaggtggagggaggcacttccgagatgggcctagtctattacaaggcccaaggcccaagttcggtttcagcaacaacactgtcttattttggcgattcccgttgacttgagatgaattggacatgagactggatgcgtttgaaaggtagcgagataagctttccacgaagtccaagatcacccaaatcggagttggcatgaagacgctaggtccatttgaagtcagtactgtctccgaaggccgaactggacttggacttggaattatcattggaacatgtgaagttatgagcgtatccgacaaagtgatgtcctcatcaattggaaaccggatcatgtatatcaagtttccaccaaattgagagttatcagtgcctattgaaagatcggacctatagttcatcatcaaatttaaatatttaatactacgaacactgatagatgctctgatcgataaaagattaattagctagtatgcgagtattattgattcttgtaaggcggatatcaacgaaagttgttaagtttagcactacagggttctcccctattttagttaactgttgtatgttatattgattattggtttatatttgggatacctaattaaatcaagtttctcgaacatttacacacgtacagtcgggtatgattgagttgcatgatatgtccaatgcgtcgaaagaaaacaaatttcagagatatttagctttttatatataaacatttttgctttgacagaaaaaaatgtttaaaacgaaaatttggtattgggctagcagtgctacaaagatttcttacacttgcggacctgccttaattgagggccgaaatgtaggcccaacatgtacaccgggccgaacacagcgagttgccgtctcacccgcatgcttcctgggccaaaaggtgatctggtaatcttcactttgcaggtgtcttcaaatgctgtcccaaaaaagcggaaatcctaatcggcgatcgatcgcctgggacgggggtagcgatcaattcccctcccccctccctccctctactggtttccttttttggcaccgcattactttcctattttagtaaatttatgtacctaaagtttatacacctcaagtttacacatctaaagtttagagacccaaagtttgcacatataaagttagagaccaaaagtttatatatccgattcaaatttgaatttgaattcaatattttttatatatagtatttctgtacatctaaagtttatagacctaaagtttatagatccaaagtttataagttaaaagtttacatacccgattcaaatttgaatttgaattatatctgattcaaatttgaatttgaattcaaatattttctatatatagtatttttatgcatctaaagtttatacacctaaagtttatagacctaaagtttataagtcaaaagtttacatacccgattcaaatttaaatttgaattatatccgattcaaatttgaatttaaattcaaatattttctatatatagtatttatatacatctaaagtttatacatctaaaatttatagacccaaagtttataagtcaaaagtttacatacccgattcaaattttttgtatatagtatttctatacataaatttttgtaactctttgtttttttaaaaaaaaattgtgtggtatactgtagtaggaagagaagaaggggagaagaaaggggggagaggagggaggaatgtatcgagtatagggggaggg

SEQ ID NO: 9381 - DNA, 12858 bp, Oryza sativa
  unsure (1)..(12858): unsure at all n locations
accaatgcacttgttatcggatggcatgtaattgttgtctccctcttacatttttcatgcatttgttgtttaacactataagtctaaaaacattctttctttgctgagaaaaaaaaaactatgcttgaactgcatgtgtatcaactattatgcatggtcttttaattttaaaggtttatccaaggttaaatggtgatgcacacgctcatttctttgtccgctggacggtaagacaccttaattgtatgctttagtgactgcattaccctagtatgtttaattttaaataatctacagttatattgtagattgatggatatcggaagacaggctgctacaatttagactgccctggttatgtacctgaagcaggtataagtatagttccaggagttgccattgatacagtctcagagcctggaggaataaaacatattatcatcttcaaaattttcaaggtaatacaagattatgttttttaagagctaaaatagtaagtatgttcaaaattgtaagacatgtactcctctaatctcctcttctgattttgaacaaatctaggatggtgccggagattggttactacactgcggatgggactcagaaccatacctaattgggcgttttcctgcatccttattcaccaccctacgtaacaaagctaattacatgaaggtcgctggttatgcggtggctcgaacgacccatttggctccaatgggaagtgggtatcttccaaataatccaaaagctgcatcattcagcaacgtgcaacttattgatcaagatggccaaacatccaagattccacaagatctacctgccactcagactttcccatccatctattctgtatctccaatcaattttgagggtaaattcacatatggtgggccgttagaataagaaacaatcggtgcagcttttctatataatagaaataatcattgttaattttgattatgaacttgtcatttgtagagaaggtttaaattttttttatctgatgtgttgttgcatatttgtatttttaaatttctaagccatccatattccaatgcaaaggcaatataacttgggtcgcacgccatgcacaatcccaatttgtatatatacgtataaactttatatgcgtgtatataaagtttatatatatgtatatatacatacgtatatactaatgggactagaggggtatgacttttttttaacgaatcgacgagaccaccaattttattaaatagagaaggagaaaactgtacaaaaggaattttacaaaagcacaaacaggactacgagtctacgaccctgacaaaaaggctaattacaacgccaaccagacagcgaggcttctcgcacctgcaaggctccacgtttttgcttcctcttttatcttggatagcaggtttgatgccggcaacttcttgggttggaaagtcctccggctcttttcatcctagatctcccaggccactagcaaagttaacgtgcgtagtgtcctttttggtgcttctctggtactcatgatggcctcccaccactcgtgtaccatagaagttgctagccagcgatgagtgctttgatggccattgccagtccaaagcgctatttgcagcctcgcgcggctggtcgccaatcaggcatccccacgatatggtctagccatccaagtcgtagatggaatggtgtttaacccttccctgaatacgaatatcctggctaccatgagtctctttccaaatacggtttatggtgtacggtatccatggggagagttccattatctgaggggtatcccatatttgctcccttgacacttcatatttgctggagtaataatacaaaagtactgttttaaattttccttttgtctacactgaaaacttgtacgttctctagataaaagctccagttttatgcatgacctgtaatggaatgtggaatgtgtcagggtatatgtactccgttcgtgctgttcagtactagtgagtgttttactcccgaaacatactccaggagattagtggtatggagtagttgatcgagtagaaaatttagccacttcaggagactagcaggatggagtagtatgtgagagaacattgctgaatgcttctcagtattgtactccacacaataatatgtgcttgcaaagttagagatggcaaccaagaatcggagattcaaaataaaacttacagagcttttgggtcaggctctttcagttttttgtttcgcttatctcagctagagaaaatgagatgaactaatgtcaagagcagatggtgttcataacatgcagacaatgagacgttttgttcagcaaattaacatcatcatcatgccatgatcgcacaagaaaaaatgtgagatctctagtaatttcgttgtttcaggatatcgacagccattacaaccagtttgccaagatgtcttacagacctgtacttcagaacctatatgttttaacctgtaaattaagtgaattaagaaaagacgccattccttttaacctgtactccaattgacattcaggacctgtatgtgtaaacctgtgtcattcagacaactccccaaacatacttgtaaccatataacatttttcatagttttttttcttcttcagaacaaagaaaacgtaggattacccaaacagacatttacttcaatcgacattagtatgggcattatcggattgacatcacatacacaattcttatttgtcacactgacagtactcaaattcagattgcatacatacccaattcacatcacatttgatcagtactctaaactacttctaatcagatcagcgttccagtagaagagaaaaaaaaaagaacatctaactgaattactccaatcatcaatgcagtaaatgaagttagcttccaaaacctggtccaatctgaaaacatttgcaaatacctagtctaatatgaaactaaggtattaaaacctagtccaatctgaaaacatttgcaaatacctagtctaatatgaaactaaggtaataaaacctagtcctaagtgcaattcactcattaaaaaaaggtgtttctgaattgaacgaagggagtatttggtacattcttgagatacctaaatattgaatgccccctctagaacacatgccattgcccatacggcaagcatcacagtcgaaacaatacggacgttacagaattatatgttaaccagcattattcaatgctagggtacttgcaatagatttgtgccacctgatacatgtatgggaatgcaaaagattgcagaactaccaatatgtgaaaattgctctgaatatacaggcaaaaacaagcattaaaccacttatgaagcaatttacatctgtgaagcaatcgccacagccaactgttaacaccctttctaaaccaacacccttcaagtgctttagtcttctactaataaatatggccctaatgtgggttcttccttaacagatggataataactgcagcaaaagggagtattgtgtcagaactagaagagcgcgaaaaagtataaaagcactcggagaatttttcacatgtgcagctcaacatctccagagttcacatgtaaaaagaataaaaaaatacagatgtagtatatgtgaaccttgagacagaacgggcaatttttagtgaaaaaaacatctaactgaaaactgccccaaggatggcaaatgatttctgtacaaaagatcttacctcacagaggacaccagttactgaaaattttcactgtcctcatctttaggtgtccccattatgatactgcacgtgtaatggcataaacagtgtcagctagaaaaaaaaagttgaatgtgcattattactttatatcttgtttagcttcaaggatgaaccatagcattgtgctgacaaatgatactatgctagtgctaggttacctgaggttgcatataacccatcccttgggtgtaagccccaaccatctaaaaatattatcagtatgtcagtgttttcaaacatcagaaagaacaaagcagtacaagttactgataccaaccccttgcgcacttgagctactagcgccactgtgcggaccaattgtatccttctttactgaaccatcaccagcctttgaggacagcttactatcaccctaccaagaataaggaatagtggtatggttagaactcaatacatcttgaatcttgatgcacaaaaatagatcttttactaaggcacaaatatagatcttagagtattactaaggcacaaatatatatttccaggcaaattgaacagtgacatactaaatggatgcggttagctttccttcaatgtatatgaagcagaggaatgaaagaatgattcaggtgttaaccttacagttcagagtaggatatgtacatttcatgttgagcaccaactatctctaatcaaagggcataattgcatatcaattttttgtgggattgttctaaaagcaggattacaagagtgacacatttttgcgttgacaaaaaaaaaattcacatgaaaccatagcatattgttggggaaaaaaggggattttgaggagggtagaatggtagatggtgtacctccatctgcagttaacagtgcacatccccacgtattgcaaatttgccaggaggacagaagagacatcagatattcatacaacaacgaaaggtttaacatttatactggcagagagtacgaagcgcacaattacctctctgtacttgtgtaaatagatcttcaacggatcaacgtactcctcaaagccaagcgtacccatcgcaaagaggagatcttccccgttgatggtcttgcgcttctccttctgacatttgtcgctcgccctgtcccatcccgcaccaccgcccaaaccacaaagcaaagcaaaatcacaccctaaaccaaccatcacaaaagaaggtgtggggagggcaggatcacggtaccgagcccgcgcagactcactcgctggtgacgaaggagatgaactccgagacgcactcctgcagggtctccttggcgtccttggcgatcttgccgttcgccgggacggccttcttcatgatgcggctgatgttggcgatgggcaggaacctgtcctgctccctcaccccgccgctcctcggcgggctcccgctctcgtcgtgccccgcgtccgccatccccgcgccgccctccaaaaaccctagatccatcatcatcatcacagcaacaaaccatcagagatggtggtggggagaggagcagccgagcagcgtcgttggatccgtaccttacgaaaaaaaaaaaacgcgcgcgcgcgggggtggagggagtcgcggagaggagaggagagagaggggggaaggcgagagtggggggaggaggagacggcggttggtgaatggtgcggtgaggaagggtggggaataggagatcggacgctggagaagggagaagcggcttgggccggtgcgatgggggcagccggggtatccgggccgttcgagaccctgggtgctgaccggtggacccgggagcacttgctgtttgggctttatttggtttgctctcttttaattattattagagtatattacactttggtctaccttttattacccaagtttcaatttgaactacccttaaacctatcttttcaatttggaccgggtaaatttatcattgttgcagtttggactaccgtaaacaatttttctcgtcatgcctaacttccctttcaacaaacatatgaaccatacatataggagtttggccgtatattaaagttgatgtgtttaagattgttaattgtactgaaaaaaatcgttcgtggtggtccaaattgcaacaatagcaaatttataatgtggcccaaagcgtaattcactcttattattatattgtatctactatagatgaaaatatatattagcttatatctagtaatcgcagaacaaataatttgaactggactggggaatttcttacgcattgatctggattgggaaatttcacatcatgttcaaatttacttgtagaatacttctccgtttcatcatattgtaagttgttttaaattttttaagtcaaacttcttaaaattttaaccaagtttatggtaaaatataacaacacttgtagcattccatttacatctaatattgaacatgttttgatatatttttttctttgtatgaaaaatattgttatatttttatataaacttcggcagtacatcatatagcgttggacgggacaatttatttttaccaatattgtagtatatctgaaaggcttagagtagtaagaaaatacataattcacatcatcaatataattgaagatcactcgttttagtttttttaccaattgatctgaagaagagctgtcatcaataaaattgaagatcactcgttttagtttttttaccaattgttctgaagaagagctgtttttagagttgtaaatgtttaggggtgaaatgcaagccccggcaaaacgatgaatttcaaaaaattcagcacaaatcggatggtttggccgtttgggagatgaatcaaagggatgaatccaagcaaatgcaaaacataagcgcaggtatcatattagagtcacagtaaatatgtgcatgtgactagcagtaagccagtaaatcaaagggacgccgacgaagataaccggaaaccatacgagcatataaaaatcaatagctaaacgatgcttcaggctcaaacaaagaacagatgaacgaaacgagctggagtcatcaaagaaacaaacaaaacattggcgcctcaaaatcggagaaaatagctcagcacagtactttccccttaacagaagcaaaaatctgacaaggcatggtttttaccaacacaatcttaagttaacaatataaagagcgcactttaaacatagcaaggaaccatcttcttgagcatctaaagccttcattcttgagcatctaaagcctttcattctgtctattccatgcttgccaaccaagatgtaccagtaatctaagacctcggcttctccttcttctccttgaagagagcaagcagagacacaccagagaccttgacgaccttgaaccggacaccaggaatatctcccacagcatggcccttacgaccaaatccagcaatcaacacctcgtcctggataatgacatgagaaataagtacaggtgacacagcaaacattcaagaagttcaggataaagaatgtacattttcctcaatgaagttcaggcaaccgtcattgggcacaaaggcagcaatcttcttcccattcttcacaagctgcacacgagcacacttacggatggcagagttgggctgcttggcctcaataccactgcaatagagccatcaaatttctcacattagcataaactcacaaggcaaagggtgacaaaaccatattatagtttctacatacatcttctccagaacgatgcccttggcatgagatgacccagcaaagggtttcttccactcattacccaagtggctcttcttgtaggccttgtctgcccatctctggttcctgcggtgggtcttgagcttgcgcccagctcccataccacgtgtcttcctgcattttgaagaattcatggttcatgcaactatattaaaacaagattatggtgtacaattcgacggtttgacatatagtgcggtgctagaaaagaacgtgtgcagaatgaaaagggatgaaatgaacaattgaaagagacatgacatccaaatacagactaatagcaaaagcataagaaagtgttctttgatgaccataatatgtaaatttgccatcagaagtcgatagttgtttgcaaagtgatgggcttagcataaaccacaaaaagatttgacagctaagctaagggcgattcctttaaacaacaaaaatgataacagtgtgtatgctaacatgcataacctcccagatccaagtaaattgatataagaaattctgattacacagcagcaacggattgatatcgcttatgaatatgtttagtgttgacggtttataatctgatcagcactggaccgtcaataagctgagttccatcatcacacgcaaatttaccaaaatacaagtatgacgcatacaaaaatcaagtggtatattcaagcatccagctacgagggaactcgactaaaccattccagatcgctaaacctatacagacaaaatccaccgcaggagagtgacagcgagcttaccccatgttgacggaagggcagcgaagatctccgaggaggcgaggcggcggcggctgcggcggcgaggggagcgcgagctgggagcggcggcggctgcaatagaggagagagataacggaaagggcagagaagctatttatttgcggcggcgtagctgtctagggtttgctaatgggccttcctgcttcaagatccgtgctggatggacgacggcccagatgttgagaagtggatcgcgggaagtgatagaatccgacggtggacctggcatgccacgtggagaatggacgtatagcacgattttttcctttatttgatagtaatatgttcatgctaaatgttaaggtgcaatattatttgttaacaaatatatttttcaaaccggagatggtctggtatgaatgaatgaatatataaaagaaaggctatatccagagctcagtggattttttatgtgcagatctctcaattataactcatgtcatgcacggattttttttttgagcttgtgataaaatattttattttaggataatgtcacatatctctattattgtttgccacacatttgataaatattttattttagaattagtttgtattcatattgaagccgcccattctaaagcactacagtgtgatttatgtcacatggccctttttttgcgtggtgtgataaaatagtttattttgggatcatgtcacacttttgtatgggtgcgttcaataattagtctattttaggatatttttttaattcctattgaaatgggtagtctaatttaattttgttatgtgtataagcataatgtatattgagacatgtaggtagtatatattatcgtgggagatgcagcgacgtgcgcgcattcactctccaaagtcgtgcatggtcgcgtgagaaattaaaaggttggaggttttaaaagttgaattgaaaatttcaatttgttgtgtacaattttgaaaacgagaccatagaatttttaacttaatactggagtaaaaaatgtcaagttaatagttttcacaatgtataacaattgtttgtcgtcttgttaacgtcttctttcaagatctacatggcttgactactattttttgtcgatggcaaaattagatactgagagagacacgtgttatatagtcatgtgatcagcgacacatgtagtacgagatgatcgggagaagataatcacannnnnnnnnnnnnnnnnnnnnatgatatgctggacaaaacaagagtacgttatagagtaacattccgatcaacaatttacaatgttgttcatattaccttctaagatggctatgtggtattgcacattaggaaacttaaatgagtggttttgaataattaatatagcatgtttacatattgttaatcattggtgatcaatttatactatagataccataatggtattatatatacaccaattgtaggtgagagcaaaaaatggggcaaaagcaaaaaaaaaaaaggaggaaattttaacatatatgtgcagcatatacatcatatggtcaaacttattcaacttatatgcaaattagataaatccactttataaaaccatcttatggtgttatattaacggtatcatatagtttgggaggtcggatgtccaatttcaaagtgcaggtgtttggtaaacttttaatcaaaattcaagggggggtttagacttaccgaaaactatcaatttacattaactaatgtcataaaggggacatgaaagatcactgtttatatctttaccaattgatctgaaagcagcgtttgcgatctttgtttcggatattttcaattgatctgaaagccgcgtttgtaatcttgttttggtgaggtaagcacccggaagatgactaatgtcacataataacccggtggtttgagagagcctctaaatttaggcaacaaaattccaattttcgtcgaccaaattcgatgatatgcaaacgaacccaagtaaatgacatgcgttcattctgatgattcctgcagcaccacttctatctgtactctagagtaccacatagttggcctaaatatgtattagccacagggaactccaaagagtagcaattcgcagtgaacagagctaagccgaacaatacctcaagggtcaaggatcctcaaacacaaacacagataaacattggcaactaagataaaaactcagcatagtactttccctcgacagaagcaaaatctgatgacaaggcatggtttttaccaacacaatcttaagttaacaatatagagagtgcactttaaacatagcaaggaaccatcttcttgagcatctaaagccttcattctgtctattccatgcttgccaaccaagatgtaccagtaatctaagacctgggcttctccttcttctccttgaagagagcaaggagagacacaccagagaccttgacgaccttgaatcggacaccaggaatatctcccacagcatggcccttacgaccaaatccagcaatcaacacctcatcctggataatgacatgagaagtaagtacaggtgacagagcaaacattcgagaaagtgcaggatgaagaatgtacattttcctcaatgaagttcaggcaaccgtcattgggcacaaaggcagcaatcttcttcccattcttcacaagctgcacacgagcacacttacggatggcagagttgggctgcttggcctcaataccactgcaatagagccatcaaatttctcacattagcataaactcacaaggcaaagggtgacaaaaccatattatagtttctacatacatcttctccagaacgatgcccttggcatgagatgacccagcaaagggtttcttccactcattacccaagtggctcttcttgtaggccttgtctgcccatctctggttcctgcggtgggtcttgagcttgcgcccagctcccataccacgtgtcttcctgcattttgaagaattcatggttcatgcaactatattaaaacaagattatggtgtacaattcgacggtttgacatatagtgcggtgctagaaaagaacgtgtgcagaatgaaaagggatgaaatgaacaattgaaagagacatgacatccaaatacagactaatagcaaaagcataagaaagtgttctttgatgaccataatatgtaaatttgccatcagaagtcgatagttgtttgcaaagtgatgggcttagcataaaccacaaaaagatttgacagctaagctaagggcgattcctttaaacaacaaaaatgataacagtgtgtatgctaacatgcataacctcccagatccaagtaaattgatataagaaattctgattacacagcagcaacggattgatatcgcttatgaatatgtttagtgttgacggtttataatctgatcagcactggaccgtcaataagctgagttccatcatcacacgcaaatttaccaaaatacaagtatgacgcatacaaaaatcaagtggtatattcaagcatccagctacgagggaactcgactaaaccattccagatcgctaaacctatacagacaaaatccaccgcaggagagtgacagcgagcttaccccatgttgacggaagggcagcgaagatctccgaggaggcgaggcggcggcggctgcggcggcgaggggagcgcgagctgggagcggcggcggctgcaatagaggagagagataacggaaagggcagagaagctatttatttgcggcggcgtagctgtctagggtttgctaatgggccttcctgcttcaagatccgtgctggatggacgacggcccagatgttgagaagtggatcgcgggaagtgatagaatccgacggtggacctggcatgccacgtggagaatggacgtatagcacgattttttcctttatttgatagtaatatgttcatgctaaatgttaaggtgcaatattatttgttaacaaatatatttttcaaaccggagatggtctggtatgaatgaatgaatatataaaagaaaggctatatccagagctcagtggattttttatgtgcagatctctcaattataactcatgtcatgcacggattttttttttgagcttgtgataaaatattttattttaggataatgtcacatatctctattattgtttgccacacatttgataaatattttattttagaattagtttgtattcatattgaagccgcccattctaaagcactacagtgtgatttatgtcacatggccctttttttgcgtggtgtgataaaatagtttattttgggatcatgtcacacttttgtatgggtgcgttcaataattagtctattttaggatatttttttaattcctattgaaatgggtagtctaatttaattttgttatgtgtataagcataatgtatattgagacatgtaggtagtatatattatcgtgggagatgcagcgacgtgcgcgcattcactctccaaagtcgtgcatggtcgcgtgagaaattaaaaggttggaggttttaaaagttgaattgaaaatttcaatttgttgtgtacaattttgaaaacgagaccatagaatttttaacttaatactggagtaaaaaatgtcaagttaatagttttcacaatgtataacaattgtttgtcgtcttgttaacgtc

SEQ ID NO: 9382 - DNA, 17503 bp, Oryza sativa
aggggagctgaatgttagtcagtgaagtggagcggagggggtgtgaggttgatggcaattggcagcagctacactggcgggccacccggcccattcacgtggttgccggccggcgcatccggaggtgtacgttatgtatatacgtgcgcgccatacatacgtacttatgaaaaccacgtagagattgcacgtagagagtacgtacataatgcaatgcatacagtacatctcccagttgtggttgtactgtacagtgttgtgtacactgtacagttatacgtgtgctgtgcgcaccctgtgatatatatatatagagagagagagattctgtttatatatggtttctttttatttatgcttggatttctaatatgattttttggatttttacggtttataggttgatggttttttaactttattactcccccgtcctattttaagcgcaaccatgagtttccgtgtctaacttgaatcgtacatcttatttgaaattttttattattagtatttttattattattagatgataaaatatgaatagtattttatgcgtgacttatgttctttattttttttcaagaattaagacagattatcaaaggttgaacacataaactcatggttgtgcttaaaatgtacggaagtagcaagtttaaaggtgaattaactaactccaatcctcatagaccggaaaatttactcaaacctggcttttgacttaatacagtaagagtgccttattgctttacaaaagtctaattaaatagaatcatctacgaaaatataatcattatgaaatttggatatgctgttcatctcatgctcttggcaaagtataaaattaactctcgtgttgaaaaatgcattgtacagccctcctagcagaacatggtctttttacatgggttaacagagtgaaatgaatagaaccccgacagtgatgatatctttgggataagttatgatatctctgggataagttggctcgtataatagaatttcttggaagttgcattcgtcgatgaaacgatgattttttgaaatgaggtatttgtcaatagtatttgttagattttatttttttatatatatacttctaatttatttatgaaataggagtagtgatattaaaacgatgcaaagtaaaagttagcaagcactgaagcaccgtcaaaagtgaattggtgggagtactacagaaggattaacagtgcccttcatacaagtaaattggcgatttgattttaaaaaggttcgtcggcaatttcacaagtaatcacaaaggcagtacccaaatgcatagggaacaacccatccttttcaattttcttctttgtcagttacttccagactttttctgcttacaatacagattcaacagttcagatgtcactttctcatctcgatcttttctaattctaaccttctagtactatctacataaactacggaaagaagctagagttctactccctgaccctttctaggttgagttttttttggatggaatgagtacaaattaatgctaattaataattcatatacactccacgtttgagcagaaaattaaactgccaaaaaatacaagtaattgcaattgagcatatgttcggatgattaatatatttcataatccattgtatccagcgccatcatcaatagctgacacagtgatacgtgtgatcggtaagtgatcgtcggtcggctgctgtactgacggtaggcgtaatcctccagggacatggatcgtcgacagtactgcggagaagcactatagctgtgcccaccacagtttgtttaatgcagtgaatattgagaaaacaccgtagctatagtgtgttgatctcttagtttttttctgttattgttttacattcactgtagtgcagaggatggctaatagatagttacatactattccctgcatctcaaaataaacgaatttattataggatctactacgggatgtaatatgtattaatacttatgttcagattttcagtagtatcacatctatagctgtttggtacggcagatgctccctgttccatcctccacgaatttcctttgcctttgaaattctaattttttgaataggggaatactagtacgcaaacacccgtattcgtcctctacgtactggtgagcgccttaaattcgccgccgaatcgatcgcgattagccatccgttttaatcaagcttccatcgtctaacgcaccggccgttcttcgccggtggagggacagacaggggatgcggctgcgctacctgcaccgatcgcgttaagtgggacaagcaagagcgcaaagacaagagcgcagcacggtgcgggagcccggtggatcagagctagtactagtatatactccagtttgacggacccagtgccggccgggcgacgcgcgcctgacgcccgcggatcgatcgatcgccgccgcgcgcctggacgagcccaggtgcgctgccctgacacgccacgcgcgtgttcatcgacagcgcctcctccgcacggaggaaaatgacgtcgacagcgcctggctagcaccgtcattacgtcaaccgctgacgtcaggtagttgggcttggtctcaagttcccgactgggagcacatgcattgggccggataccaacaccaccaggagaagaggaatcccggcccgatagcacatatcacacggatttgtgcccaaatttgtaataagaccaatgtagtgggccgactagtagcccgtagctcggtagatgcagtgatgcaccaattcggatagggcaggaaagaacggtgaaagacgagcgccgcgcgaaggccggtgaacttcgtcgccgtgatgcttcgtcttcccactctcctccccctaaaaccctcgcctcccaccaccggcttaaaccccatccacggccgccgccatggccaccaccccagccgcctcctcgcctcctccgccccgccgccgccaccaccacggcctcccaagcccgagccccgtaccagccacgagaacctaggcgacgacacccccgatttccccacaaccaagccccgcaagccgcgccgcgggcgccggagcgaggcggcggcggtggaggacttcgtgcgtggccgcctcgagcaggtcttcgcttccatccgggagcgcgaccccgaagtcctcgaaggcaagggcgacatcttgaagcgaaaggaggagctctccgacgaggagggaaaagaggggactggtgaggaagagggggagctgaaggctgtggttgaggaggaggatccctcctggcctctggacgccgacatcgggtgggggattcgggcgtcggagtactttgacaagcattccatcaagaatgtgacggtggatggtgtggagatcgattgggagagggaggtcgaggagggatgggtcaaagagatcaactgcttggagtgggagagcttcgccttccaccctagccccctcatcgttcttgtcttcgagcgctacaacaggtataaatcactattctacccagactctattcatgtgaacccatagtacctatatgttaggaccaaagtgataaacttcataaacttcaagcttctcactttatattgtcatatctgataattttgaatccattgaatcaaaagttcagaactacccctgaagtaatgcataaaaatgtaaaaatgtactatcgttttgagttgcctcagaaaattaggtgttctacttccatgacaggatgatatgtacgcgtaatgttttgcctttgtttatagggcagctgacaattggaagtttcttcaagaattggaaaaggcggctaaagtttactggaatagtaaagatcggctacctcctcgggtcagtgtgaatcatatttatagttaatacttgatgtattacggtaaggttattgaggtggttggtcatatgctaaatttaattgagttccagacagtgaaggttgatatgaatattgagagagacctggcatttgcacttcaagtaaaagaatgcccacaattattattcctcaggggaaacaagatattatacagggaaaaaggtgagtagttagttccatttttatggtaaatcctgttcacatagttaacaaattgaatggaactttgaattattaaattccttgattgctaatatgcactttcatgttaggcccacctttttcaatggtcaaaattgccactctgacaacacctgattgcctcatttgcttgtttacagaactaagaactgccgacgaactagttcaaatgattgcccatttctactacaatgcaaagagaccatcttgtgttaatcctgaagctattgcacctccgtgctaatctcctgcatttcagcgcttatgtattgagacagtgccttaattctcaactcttggtgagtgtacactgtggtaagcttttcatccaatgataacctgttccccgttagaaaactgtattctatactggtcattgttctctttaatgtcctttctctgtattagtacctggttcaggggagaatattattaattttgctaactttatttgccaggaaaatagtctaaatagaccagtgtggttatgatgcttgtatctgtaataaatgtatcacttgaagaggaaggagagaaacctcttactggctcatctcaagttgggagggggtcaggtatcaactatgtcatatattttggtatgctcatgtttttagctgtacactttcacctttgtactgtactctaacaaaacatacagttcatcaaatttctagatagaacaggagggaatgctagcttaattatctgcgtggccatcctgttaaggaggttgtaaagtcgattgtaaacttttgaggcgtagtgtaatgtcatttcacgccatagatgcaaaatgaaggcaggggggtcaacccatttgtcatcttataactcctctgattatttttcagtgacgtaattgaatttgttggatggagaacgatacaagacataccatacatgcattatagggtcattttggtagaacaatctcatcttgtggaactgctttcagatactcttttctttggttagcccccctttttttatcttgggtggcaaagggggtatagttgtgctccaaattcccatgagaatgggatggcaatgcttcccccggtctcaaaaacaagtcgcttgagaatgcgtccagtcagcataagttaagtttggctataaaataaattaaagtatatgttttgggtgtttccatctataaaaataacttgaactataggttttgggtatatgaaaatgatatatttaagtttgtcataacaagagctttaatagtagactgtccgcataagagagatcatgaacaatctgccactggttttgagtgctccaaaaggaatgcaaaatgcaatttctgatcaaaggtactagtacgaaatggaacacgcgtcatgtcagcctatgaaatcaacaattattaattgttccccatatcgaactataaagaaaggaatccgatgcaaacattcactttgcttaacaagagttactgacaaaaacagaacaatcacctctgtaaactataaaactatacagtacaatactgtcacctagactcctggtacaaattacaaagtataaacaacaactctggattgagcagtggacacaacgaatctacgcacacgatatcgaggaggaagacgaggacgcgatgcacaacgccggcgcggccgcctcgtcggcgccacggcctcgcagcagcagcgcgatggcctcgtaccccatcgtcacggccatctggagcggcgtcgcgccccgcctggtggcggcgtgcacttcggcgcccatgtcgagcagcagctcgacggcctcggcgctgccgccttcgacggcgaggtgcagcgggcggtgcccttccacgtcctcgcactcgatgtccatgcagcctgacccggcgagcagcgcgatcacgtcgcagtgccctttgatggcagcaaggtggagcgccgtcaggccgtactggtcacgtccccggacgccggcgcgcttgctgaggagggactcgaggctctggaggtcgcctcgcctcgccgccgtcatgaccagttcccaccgttccaggacgtccaccacttcttgctacacccaccgaacaacatcgtaactacaccagtataacttaatttgtaataaaaacgcgctgcttagagtacacttcttgcaaaacaatactgataatgctgctcttgaaaagtaacagaagtactgttcaaccatgtcatttcgcagacagaaagtcccatgctggccatttatgcatttctggtggacaataatggaattgcactactgtagcgtcgtcctactcctatcatgattcacgagcgcatcgacaggtcacataagccaagctacctacgtacatcctccagctggtccatgatcctccccgtcggttctgtaacttttgtacgaccagtgatgctttacaagtctacaactaaatcaatgttttcctaatttgacacaaacgtttttacgacctgctagtgcatttaggaccacacagattatggttcacattcacacatggttgcacggttagttaccaggaggaatctttgtcgagttgcaattaaaaagcagcatccgaattccctgagcttaggtacacgacagtaagaaggacagacaggtagattctagtaggagtaaacttacatagcccttctcgcgcgcgacgtccagtggagtcctcccgcgcgcgtcggtcgccgcggcgtcggcgcccatgtccaccagcgccgccgccgcctccgcctccccggccgcggcggcaacgtggagggcggtcctcccctcacggtcgcgcgctcccatcgagtccggccccaggcgcctcacctccccggtgtcccccctcgcggccaccgcgtgcagtggcgcccactgctcggcgccgtcgggcaccgccgcctcgggctccaggagcggcaggaggtgcggctgccggcgcaggatgaggcgcacggccgcggcgtccccggcttccgccgcgaggcggagcaggtacggcccgccgaagaacacgcggaggcggatggcggtggtgccgccggtagcggcgctggaggaggcggaggagtcgaggtgcgcggcggagagggaggagagcacgaggaagcggtcgcctcgggagcgcgggaaggacgcgggagcgtgctgctgcgggcggagcacgacgcggagggaggccgacgagagcggctgcacggcgccgcgcggggggctgacgaggaacttgagaggggaggaggtctggaccttgaaggcgacggggagggacgggtgcagcgagcggaggcggaggtcagcgcggcacttggcgttgggcttgaagtcgatgacgacctcgtcctccgccacctccaggagctgctcgaccgccggcttgtccgcggctgctgcggtattggcggccgggacgacggcggtgctcggcggcggcgagggagaggctggcttcgcggtggccatttcttggaaggcagagagactggtagtagcagggggtggaatcggcaggggaaggcatggaatggtggctggcttcctaggacgccgcttttgatgtcacgctggatgggcatgatgggaatgttgatcgtttgtgcatacggtgtcttgtgtggagtagtttggctttttgatggtttggcctctacatttctacaacttgtccgccacttgatgagtaatgtacaagtgaacagcacacgctgccaaattaacacagccggggtgtattgccgagtatgtaacgttatacaagcagtattacaaccaagtggccgatcgaacatactcactgactatatacaaacaaaagggtgggttttttaaaattttaaaataaatggtagggagtatttagctttggttaggaattttacggagtatttaggctagcatgttcatacacttctcaacaaaagggtgaaattgaaaccactcgtcatgaggtagtacatactcatgctcatacgtccacacacttcttaacaaaatgtagagttgaataagacgataggaagggagagcaacatgggtttatccaaaatgtttatacggtaatagagtaaatacctcaccaatatcctacttccttcatcccaaatgataagttgtaaagttgcatagataaaaatcaagttgcttttacggaaggaatacttccaacgttacaaaaatattgataacaccaaagaattcatctcacattggtacaataatcttgatataagaaaaaaaaacgaccatttctggaaacctctttgtcataagtttctagtagtttgaaagtcagtttcggggaaaagtggttcaaacaattcttttatttgattgaataggtttcctctccttgttggaaaggtatatatgtccctactatttgaggataaattttttaattcggttgaactaattagaacaaatatatgcaggtgaaaatgcaaagatttttctgaacattaagagataatagataaaaaatgcccatgcattgcaacgggtgaaagctattctaataatattattattgttatatagtttagttaaggtaaaattcactgtggaaatcagcttggatatatatatagaaaatcattagctataattaggagtccgatcatctcaagttagcaagcgagttttttaagagatttcttatatgactccttctgtgtttctaaaaacgaacgaacttaaaacccgtctcaaatacagatatgtatttattaaagtgaacgaacttaaaaaccgactcatacacgatggcataccaaagtatcggtaaaaacatctttaatttttataatagtagagattaataaaaggtacataataagctaacacgatgagttttatcttatctttttctgaacggttttctttaattattaagaggataagatattatcctcttaacaattgaagaaaaaacattgaggacaaaatataaaggaattcctcgttttgctcttacttaattatgagattaattttggaactcactccatggagaggtatagtaatataatatatgtacctatagttaattcaccaacagattttagtgctaggtagcattacaaacattttaaatttctttattatagaagttacagttggagcgcgcaatctagctcatcaaccatgggccatctctaccacatgctaattgatggatgtggactgccctcaacttttaatactgatgtggactaaactcaccagttacgaacttacagtaaagtaggagatgtgcatgcaccaaatgatacttattttaccaaaatttaccaataacaaaattgaaaattttgacatagtagcagtagataatcagaccaacctaacttaactgggaccactcagggattcatagcgttcagacctataccgttttgcgcagcgaaaacggtgaattcatcctggaagtggatcgagttcaattgccccccaacccagaccgtagatggccacaccatcgccggcaggccgtaccgaccccggcggatccgactgccactcgatcgcatttatctgctgggacctgcaaagaatgatggagccaggctacgatccatccagcacgcacgtcccatcagaacgggtggcaatcggcaaatcacgccgagcaagcgagcgcgctacagttccctcgtgaaggacttcagacgagcacagcctcgcacgcgcgcgacgagaatacggccccggtcgcttggtgaaggtgagaaccccctcaatttcgttggattctagcctgcatgtgcccggctgccctctcctcttccccccatttcccttgccgtttctcgcgcacgaatctgaacaataccggggcttggccgcgtgccccgcggctcggcggcacgcggccgcaaggagacccagtggagtagtagaatactcggcttcaggggatgctgccgctacccaacaattccgtcgccctggacttatcacgcgccgtaggtcatgtgtaagtagtagtacaatcctggtaggtttaaagtttaaacccagacgttgagttccaggtcgatccaccgggcatgctcggatggatggatggccggaataattcacataacctcacgtgatgcgagggaaaggggaatatttagaaatgctaagcctgttgtacacgggaaaatccatagattctaaaagggaaaatttcaagaaccagttactatatcagcctaaagaccagttgccttagcgaattattgtctataaactagttgaatcacgcaactccaataggaccgatcgcatgatacgtgctgtatccaggacatcaattaaacatgtaacttattgttaagttttgaattactgctatcaaagcgtttgtagtccaacggttaggataattgccttccaagcaatagacccgggttcgactcccggcaaacgcatgttttttaattttttgcttataaatttcttgggctcgcgtggatagagactctctttcaccttcctgttgggcccattaggcggtctccaatgggcctaaattacatggacacttccttgccttctcatcgagtttaattagaatccttataccacaatactagacatcttcacccttacctagttataatgtggcatcctagatagtaataaaataaaaaacatgtggggccccactctcacctctcttcctaagtagctcgctagtggggagaggggcgtggctgatgagcccatccacaggaggtgacaacggtggtgggacgctcacctcccttgcacgcagccggacggcgggtggcgctacttcgtcgaggactcaaggtgaacagtaacatctgcagccacgaactcgtttctattgttgtgccacctcgtacgcatgtgctatggagagacgccaggcgccgccattgccgccttccttctcgtgagcgcagggccgagctcaaccttgtgcgaggctcacacggctcacacaaccacaatagcagttgccgccgacgcttcctttctcacgggtgaactcacgctacaccgctttcttcacaactagctctctgctcaatatatcttgagctcgagctccttcatcttctaccgcagcgtagatccggaacaatctcgtagccgccgagagtaggaggccacctgccaccagttgcatccctctttatgcttgcgcgcgaaattcgccgtagccggccatctgtgatcaaaccccgcatcctgggcaccgctccctaacgaatgcagggctggctactttggggatggatgactcaacgtggacggtgacctcctgccaccgccctcagacgacggtggtaccggggtggcaagaccacccaaggcggatggcggcgacgcggaggggactacgagggtagacactaacaagggaggggatgctaagggcatggtttgctagcatgctggaggagggcggtggcttcgatggtgcggatggggatgacacggattgggtggtcggtggcagcttgtctgcatgtaggagtagatgggaagaggtgagaagtattagaaggagaggtggccatttacatgtgggctccacatgttctttaatctttttttctgactaggatgccacattagcgaaaaacaaacacccatattattatgggacctgatttggaccgttttgctaagataatgggtggagatttctagtattgcggtttatggatgttaattagacttgagtactcgacgtaaagatgaggggcagcaagtggacttattccaatggcataaatacagcttaacctggctttcacacctctgaaaagggctagttttgaactggcgcttggcccaatagcaggtgatcaagcgatccctatctaggaattgctatttagcacaactacgttctcaatatgcattttttacttttgtttgcaaaacttttagtagtgcctgcaaacttccatttgtaagtctttcactagaaactttgttgtgggccttatggaccaaaaggctaaaacatgtgtgcaactgtgctaattagccttcgtgcctctcttactaaaattgctcaatattatttgaacataaataaatatatatttgtgttttttttcacgctgataaaaatatagttgtgttaagaggtacatctcctaagggagaccggctctagagaaaaaaatatgtgaagactggctcgaaaggaagcctgtgcttatctacttccaatacatggtatatgtttttagtcagtgagatccagggcgtgatgaaggaggccagggatatgaagctgaagaaggcgaacagggactgcaatcgtattagccatattttagctaataaagcccggtgtaagtcccctacgaacttttggccggacggaagttgtaattttatttcccaccttgtgtgctatggctaagtaataaagttcatgtttttccccgaaaaaaaagaataaactaaacaaacctatagccttatttctatctatctatggtaaatctatggtaagaaaatctagtggagtttccaataattctaacaccaatggtgaaggctcgagcccccgtcatctcatggttgatgcgcccctgcacaacatgtgtccatccataggatccaccggctttaaaggtggacgacggaagcgacgaaggtgtattttttccatatcctacggtcataagatcccatcaccctcatgtaccgagaaaaagcaaagcctagtcagcatttcgctttgtagcgatactcctacactcgcaaatagcaaactacagtactaaacggtgcgtttcgctttacactcatgaagatataaattttatctcggtttccgttagcacgcttttcaaactactaaacggtactccctccattccaaaatatagggcataaccacccttgacccaaagaccaagaaacaattattatcacctatttgtcaatccaactaatacaatacatgcacccaatagaattaagcatcttgtgagtgtatgatttaaataataataatttaggagagaagagatgctaattaattgccatacatgtatgcacgccttatattatgaaacaactttaaaaagtagttgtgccctatattttggaatggagggagtatattccatgcgaaaactttttatatataagttactttaaaataccaaatatgttcatttatcagatttataataattgaaacttaattaatcatgtgctaatagctttctcgttttacgtacatcaacttaatatttatcttcatgagtttcaaacatcaccataatgtaatcaagggaatgattatggaaggttatccaaagtttgagaaaaaaaaaacatcattggacgagaacactcctttatcctttcttggagtagttttttgatatctcattagcattctaagatttcgggatcgttcaaggtaaccgtggttagccaggtccgtgacagttgctaagggtaaccgtggacgtcacatggcatcgccaggtttagtaggtctgcagaatcagagatagatcgcgagtcaacctctccacttctccaactctcgccgcatggttccggtaccaaaataaaacttcagcccatctgatggtgacggggccgtgccacatgcatgctaggggtcgaagcagaggcatttggctgtgtttagtttcttctaaagttagaagtttaggttaaaattgatacgatgtgactgaatgtgtgtgtatgacaggttgatgtgatggaaaaagttgaaagtttggatccaaaatttagatgtaaacacagcctttgaaatgcggcatttccactgtccttgaagctttcgcagcctttcgctctcttccccggcacccaccacccgtcacgtgaacggagcacgccgcgggcatattctcgacccctcgatgcgttggtgaattggtggtgttgctgatggcgctaggttatctaattctctgagtaccgagtgataccgctggactgctggcaggtacagtacaatatattttccgaacatcagtcggtggtcaatgcagcttactcctaaaccgagctgtcagcactactttccacctgctaattaaaacttgtatcccgagacagagcagtcaagattcttgtatgattattttaggaagcaagaatgtaaaacctgtctccaagttgtatttactctgtaactaaaggagtactagtactacttttgtatgtgcaacactagaaatacagtaacaactttagagcgaagctttgctgagaaagagggcaatacagttaggccattcacagtgcaccctgctggtattcagcccgagcggtccacataggcgagccgccaaaaatcgccgccacgtcctagcgttggcccacaaatcgcgagcgcgtgtgaccaaacttggtcacccgttcttcggcgctatcgaggcggggcagcgtggagaaacaagggcatggcgcattgctgaggcgtggctttgccgcgcggttcctcccggcgcgcttcatccccaaatcgccctccctgcgcgcgcgtttcttctcctcccgcgctcgcctgaatcaagcacaagacatgaacagctgcattagtcattgactgattgacatactgcactgatcgactgttcatctattggaaaatcaacatccaactactgaaatttcataatcacaaagaccaaaaaaaactaaaccaattcaaagcatgaacccagatgagaacctggaacaggttagcacacactgaactgattgatggcttcaacacctgaagcgtatacatgaacacaagaccaatctagaatcgatgctttagtactaatcaataaaaaagacatcgagaacaaacaacaaatcacgctggaaagaacttgccttcctcaacagaaaaccgatctaaaaaattctatctgaaagagcagtccaagaagaaagaaaaaacaggagatcagtctctgcaacaaagcaacccaagaaactaacctcccagagatcgcggctcgtcgcgccgacgacggggagggaggggcgccggcgacgttgatggggatgggaaggaggggcgccagcgacagggatagggatgggagagagggcgccgacgatggggagggaggggcgccggcgatggggatggggatgggacgcggtgagggggagaagaagtggcagctccagccttatctgattggggagaaatctatacgtattatctgacttttggggtgcaaagtgtaaaatttggatttctttgttaatagaaagatagcaagggactgaaatagaaaatacgaggggctgaaacgaaaaaaccaaagctacgcatgaagacccttgcactgtgggagagaaatttttttagggcgtggtttcagcgcacatggcagctgtggctcctcaaaactgttgggcgcattgtaaatgccgttatggtggcatcccctgcaacgcacgagcctgatgttggttatcactcactcacctgtcaatatgccattgctttgaagcacggttttccaatactggcactccgagaggcaggttcggtagttgccaggtgacagtcgttgcctgagacagtttgggggtgcagaggaggagtactagcagaaagaaggcatccattttgttgtgaaagatctttacatttccttgttgcttcaccgaccgtgctacaggagggaaaagccggcatgcaataattcgacgtcgcaaaccaaactgcaatgcttgcagataaagccaatcgtatcagttaccgtcatactcctactgttcttgagtaccctgcctggacaagcatactatcatggtactcgtgcatggtacatgggcctttcattagctttacacaacgggattatatagtctgttatcttcttatgatactactaatgcattatttttagaaactctcatagtgtcatctcctgaacaatattaatttcttcatagttttgatctttgatccactgggcaggagtgtactgacatgcagataagtggcccactgggcagtgttgtggggttgggttcaataatgaaggataggaggaggtgagaaaagctaagctcatagtatagtcacatgtttgtcattaagtaacagaaggggcacaggaagaaacataaacaagagaaaaaagacacccacacgttgggccatccattttccacaaatcagcaccggccaccgcgtcctcttgcattaaggctaaataaaccatccattgactgctaggaaaaaccctccatttcaaccaaattgaacattttccataatgttactgtgcggagatatgatcaccggtctttaccattacatagtttttgtccattatataaacatggcagttctttgtgctggtcagaaaacgccatgcagtttttccatccccttctcactgtaactaagttaatcaaagagtacatcgacatcactagggccattttcggtgaaatgactctatgggagaaaacgacgtcttgcaaccttcacgtgccatgacaccaacaactcaaaatcctggctccgcccgtgtttgtgtgtctttctcaattgcaaactatcgtatataggggaacatgatagattcatgttgctgagttcttcttcttcttcttcttcttcttcttcttcttcttcttcttccgtaactgtgtgaattcctacttagtatataagtgggttgtttacattatttaatgaaacattatgttacctaaaaacataaataacatatgactatctttcttgagaaaatcctactagtctagtactgataatcgaaaaaagacattttttagaaagttctctctccatctcaaaataaaccaatctaagatgtaatgggacatcacccaatatgataaatctggatagagacatgtctaaattcgttatactaggtgacatctcatctaatatttgtttattttggaacgaaggggtacttcggtacataagaaaacacaccctacaaactttgaggggcgtttttctgaaggatcaaacttttaagggctagaaaggaaaagaagagcgctcctcttcgaggcttcaaaccccaaccaaacctaacaacttcgaaaacttgaacccaaaaccaaaacgaaagcgagccaaaaaagctgtagtaggcctaccataacacaaaagcccaaaacacacgcttccccgcaactccaaaaccggaaaacgaacaaatcccctcgcctcctcccccctcccatctccgcccccgtcttcccctcgcctcatccatctcccccatgtggctgccctgggtgaagacgcgcccctcctccccttcctccgccgccgactccccctcgccctccaccgcgctcgccgccgccggcgcctctgctcgcttgtccttctcctctccctccctcaaggacctccaggctctcctcctctccgaccactcgccctccccgacgcc

SEQ ID NO: 9383 - DNA, 39982 bp, Oryza sativa
tcctctcagagccattggcaacccatcacggactaggcattccaattcttccttccaaggataatgcccttcttgattcgcatcaacattcatgcctgaatcagcatcagcactatcagctacaggcccttcttggttgggatcaactttctctacatcatagaactcatcatcggagtcctctgagggtttgatttcttcattatttgcagattggagttcattcgctgcattctccttatctgcagaagattgcttcttcttgacacgcaagctcatcatctccccaatgtggcctaaggagggccttatttccgaccatatctgaatcttatgtggtctctgctgtttcactttctgttcgtctgacaatttggacctgccatcctcagctttcttgccagcttcttcatcctcagcggatggtgaaaccttggcatcctgatcctctccggatgattcatcgtactcagcttggctatccagaaaattcttccatctctcagatctctcctcttcctcctcctggagattatgcaatgcaactcagcgagatggaacaagaaggtaccaaatggaggcatcaccaggtgcagcttttctaccttgtagatgtttgcatactctctgtaccgttgcaagtgttgtggccgcacagcgaatccatatgcatccctgcaccatccacaatagcatcagaaacagaaaggagaatgccgctaatactgaaccgttggtactcgagttatgtaccacaagaccggaaccaatccaaattcatactctagtgagtttattaaaaagaaccaaaaattccaactaaaatttggtcctatcatgtttacaatgtctgcctcgtaaaaaatcgagttaatttgcttcgattgtagcggacatccacacaaactccgatccttccatggatcagagaagctaacacgattcaaacactcctttctgagggagcaaaaaaaaaaaaactaatcacatcgtacacacggagatctaggactgcattgcccaaatttggccccaacatctcgcatcagatcgagatccccgcgcaaaatatcaccacgagaagaaaaaaaaagcaagtaaactacacgcaagcggaagtttcgtgcagcagaaacttcaaaaaacctccggcgaaaaacttccgaagaaacacatcagaaacagcaaacaccggcacgaacgccgagatgcgcgcgcgcgcccgcggcggcgggagacgaaacgaaccgcttgtgctccgaggcgatgaacgggaggctcttcgccttcatctccacccgcgccgccgccgccactgactccgcgccaccaccaccaccaccaactcctcctcctcctcttccttcccttcgctcgccggtggcgaggcgtgcagtgcagcggcgccgccgacgcaacgcgacgcgacgcggacggcgaagcgtgagcgagtgaagtggagtgtgaatgaatttagcttatcggcggtttggagggggggggtcacggctcggggaggcagcagcgccgatgattcgattcgatccgatcgccgtttactactactccgactcctccatcctacgagtcgtaggatttcgagatttgatctgtgtgcgtggaagcgtgaagctgcgaggtgacagattggggagttgggaaattggaggacaagtcttcacaactcgttgaatttttctttcgaccggttggttatttttttgtcatggagattggagagatggccagatggggactcgggaatgaccacccctcgtgggtttctcctcgtcgacatggacttggcgctgggcggggttcggccacaccgagatctcgattatccgtgccaagtggagctgtgttcgtttgtgtgctgtggactgtggagtgtagaggggcctgtggtgggtttttgtagagatcatttttaagttgggtattgatttttcttatatggatttgttgttggcgcatcgacatctggggaacacataaaatccatcattaagcttgtcttatttctatctttggcatactcactaataaagtatagctagtctttattgtggcatagtattaggagacaacctttaatagattctccatttgacatgtgatattgtaatgattttgtatcacctaacttttattgtttgatgaaaaatcttggatgacaaaaatgttgctgtgttaggatatatttgttgataaatgactaatttggaatataaatagtcaaatagaaaaatatcaaatgacaaattgacataaatgctacggatgtgcaccaacaaaagcaaataatacttcctccatctcatatagtgcgttattgttttatggaaagtttgacatttgtaaaacctaagatttatttaaatggggctgtctattgcaaaatttgacagagaactttagattttcctcgagttgcatcaagattcatacataaaaagtaacattatcctttctcattttcttcttctctcctacatcgctcgacaatacaagaggagtaagctctccaacgttgcttgcatcggcccatcgtccccgcctcaatgctcgcccaccatcctcctctattcccactgtttcggtaacactgtcttgttgttcgcccatgtacatcgctcaccgctacttcgctagcccttcactatccatggctatcattctaagccctagaaaaaaaaaccccttccccactctcactgtctcacaccctaaaccctaactagtcgagggtccgccgcctcgctgaagttacactactcattggagctggatgaagagatcaatgtgaatcatggcacggatctgatggtttaaaaatcgatagaactctccactaaatttctgtcacatggatgttagcaattccgttttaaaattttactcttaaaatttgatctccgccgatgcaagccagctgagcgctcaccaaatggtgcaggtgctgcacgccacaaaggatccatggtgtacagattatatttcggacgaaatgatgggtacgtgcctcctgcatgaagcggtgcgatgcatcaggcgagatagtagtaggaccaggcgcttcagcacagccagtgcagcagccttctgcaacgcttcagcgaaatgggatcgattaccctgcccgcctgccggctctctccggccggctttgcgtttttcccctctttggtactagaagtagtgagtactcatcacctcaaacttttacccgggcggctccagttattactgtaacagcaaccggatccataaatgtgtgtacgcttcgtccatttatactccgggccgtgctgcttgtcctctctgaattgaaccctctgtctcctctccctttgcatcatttcccaaagtacagcctggatgtgagtatgtgatgtgcatcgctcgttccggttggcatcaaccgtatccgtcctgatgttactccgatttggcaaccggaacaaactctagctgtcgacccgtcctctcgcgctcagctactttcatcggatcggaccaagctatctcgcgattcaccgatgaagacaggtaggagcagagcaatagaaggaagtgaaaagaattgatgagatggtgatcgactggcctcccaacaaacaggagacagggtacctgcagacctgcagccgtcctgacaagaaagtgagcacctaggcacgccggtctcctccttccttggtttcatcataaactgcaacttgagtggcaccccggccgaagtactcctatagcatccggttcaggacttcaggtggagctaacgggttccttttacttcgtggtgaaaacggagcacctgaattaggccctgtttagttccaaaggatttttttttaaactttcaactttttatcacatcaaatcttttatacacatacaacttttctatcacatcgtatcaattttaaccaaacttccaaacttcagtgtgaactaaacacagccttactgaactaccagtagtactaaggctctgttcggtatccccttttcccaacccctctctctcgtttttagtgtgtacgtttttcaaacagctaaacggtgtttttttaaaaaaaaagtttctataggaatgttgcttaaaaaatcaaattaatccattttttttttaaaaaaaagctaatactccctccatatttataaaggaagtcgtttagggtaatgtttaagtcagatcttgggaatataaatcattaataactctcaagttgttgagtttaaaaatataaaaattatatgaatagatttgtcttgaaaaatactttcataaatatatactgtcagggttacggataaggtataccctctattcttggacatacgttgtatactgatgcggtatactcgcgcgtatacggatgattcctgtgtacattaaggaaatctatcacgtgatagaaacaaaatttacagatggaatgagtcctactcggacaagactgggtctttaccatatcgtgaggggtccgatatctccgagtcctacttggagatcaactgacccgcgatataaaatggaccccctgggcaggacctaaggcatcgaatctcattgtcaacacatccaccacagcctacgaagctggagcctacaggagccaagtcgccgggtgatatagtcgaaccaactcgacaacggtcttgtcggtatcatcgagttctgttattccctttgtaatatgtggtttccatcatataatctcatatcaattggattagagctattaccttccaagtggcctgaaccagtataattcttgtcttttgtttgcttgatgtcatactacgtagatcctcataccagcgtaccccaataccctctatatccggtctacgggtatcccccgtcgacatatacatatatcatttttcaataaatatttttatagaaaaaagaagtcaaagttatgttttggagaccgtgtcgctgtcataaacgacttcctttacgagtacagagggaatacttagttaatcacgcgctaatatactgctccgttttccattattactgttgggaatgggaacagcatgtgcgaacacagcctaaagtccatactaggcattgtttagttaccaacttttttttttcaaacttccaacttttccatcacatcaaaacttttttacacatcaaaattttcctacacacacaaacttctaacttttccgtcacatcgttccaatttcaatcaaacttccaattttagcgtgaactaaacacaccccagcttatgctatgcttataaaagaagggtggtaaactggtaatgtaaggttgagtttagttcctaactttttctttaaactttaaacttttttatcaaatcaaaactttcctacacacatgaattttcaatttttttcttcaaacttctaattttagtgtgaaactaaacacagcctaaatatgcaactctgctgtgctgtagcacattaagcctgtccagtacgtatacgtagtactactaactactgctactatactagctactcaaatgacgaaacctacccgcttgattgtataggctgtgtttagatccaaagtttggatctaaacttcagtcctttttcattatattaacctgtcatacacacacaacttttcagtcacatcatctccaatttcaaccaaaatccaaactttggattcaactaaacacagccatagtccggtagtcccactggcattttcaccggtaatgcgtacagcagtgcgctgctgatcaggggaggctatggggttttcctgcctgtctacgtacgtactcacgacgtacggacgagctaatgctagcacacagagtaattcaggcgacgtaccgtccagatctcgatcgtgaggtggctggctggctgagcccgtcgatcgatggatcgcccagtgtcggtgggatagagtacgccgtggcccctcgtggcatgttcgcgcaaccggcgcggctcacgcgcgagtggttgaacgatgggcacactggtttagcacctagcaagctcgcacccaccacaagggacaacaccgccgccgtacatggcgtacagctagcggtacaggcacaccgcgcgcacacgaaccaccgcgaatacgatattgaggggtgcggcgtgcgccggagcatgcatgtgcttgtcttcgtatcacctgacaaggtcggcgcacgctagctagaaggccaccgtgccggccggccaccactccaccagcctaccgcggaggacggcagattgccgtaaatcgtaataggaacaggaatataaaaaaattccgttgccgggactcgaacccgggtctctcgggtgagagccgagtatcctaaccagctagtctacaacggaggttgctgcttgagctcggagattgctagtagtagtcagtagccccgacaaccagaccaaaataccaaccgatactgactgtcacactttgatagcgatcggaggtcaacttctacgaaccgctactgcacggcgcagggccttgcgacttgccgacagcgttcaagtcaaaggaaacattcagcattcagaatgctgaattcccacccgctcctttggctagaggcctgtgtgtacgtatgggtggatagcgagcccagattgactcgtgtcagctcatcaagataataagctagctcggctcaataagggcagtcccaacccatagtgttcataagtagtgtctatagtgccatgtcaataagacatcacaatagaaactacactctataacccatggtttcttaaagtgggccattaataaatatatcatctctcttctctaccaatcataattattcttcatctattatgaagacactattctctcccaatacataacttgatagtgtctagtgcataggttctcgtgttgaagctgtgtcttacatgagacccaattttttcctctcttcactctctctcttaattaatatagtgccacataagctaaaagtcctacataataatgtagttaataccataaacaccattctagatggagggttgggactgccctaagcaatcgagcccaaacaataacttggctcggttcgtaaaaggagctcgagctagctcattttggctcgcgagctactctactactagctgaggagctccacgcaagacaagtgcacaagtgtctgcctacctgcgtgcaaatgcgcaacgatgtgcatggcgatggcggcgctcgtcatgaggatgggagaaataaattacggttcagtaatttcatagcttgagtatttaggctggcctggaatggtcgtatggatggactgtattgtgatggggcctcaccagttgtccatattccctaataaaccaaaacggtttactatagagtaaaaattaatttataggtgaaacttttatatatttgttcgtagcgacttaaacaacaacactaaaaagaaactacgttgaaaatatcttaaaatcaactccaaaattaagtttaaaaaaattaaaaatttacttttgctttagcttattagcccaaccgataagggttattggttatttttcaactgtccttatgcatctagcgctcgcttagcatatttttctttttgggctattggacttgtgcatagctcgttgggctcgttaacttaacgagctaaactgctagcttggctcatcgaaaaattcaaacgagtcgagccgactcagtcccgagcggccgagccaaacgaagagtatggaggcggggacggtgggaagtgggtcgccaccttcctgaggtccatctcactgggccggcgaatccgcaggccggaaataggacggatgcatacgatatctgggccggatacatgcccgttagtgggcaagtcctagatcacgtcgccactggactgtactacatcacaaggaataagttcactttacatccctcaatttgttgccgagtccgaaatttgttccagtgcaaaaccgggtacaacacatccttcaacttacaaaaccatgcgaggtccctcggcagtattgtgcccagttttggctgatgtggcgtctacggggctcctttgactaagtcttcgtcccaagtggagcttacgtggaaatttgataaaaaaaaacccataggacccacatgtcagtttcatatagaaaataataataaaaaaatggtgggcctcacatgtcatccttactactctatcttctctctatcccctactctgtagtctgcaaggagcggtggcgagcagtggcgcgcgaagtcgatagggtggcgagcggacggagtggcgacggagagcctgcgggagtcgagatcgtccggggaagcaacgacggcaacgacggcagccttgtatcccgtcggcgaggtcacgctcggccattgcgcacctctcccttcgcccatcgccatcgagcccccacccacggcgcccggccatccccggcgaggagctctgtttttggtgggtgtcggcggagttggaacgaaggagggtcgttctcggcatcgatgtcgccatctccgatcctccaccgccaccgccgccctccccccctccattgccgacccctccccggcgtcgagaaaatcctcgcccgacctcagcaacaagaacgacgagcgaggagcaacgacgggaggagatagcccgcgcagctgtcgtgcttgccggcgacctccttctctgcctcttcctccaccggccacctccactgcccgtggcctgccgccgctccgccggcatgctttgaccgccatcttcgttggaggcgacgaggactaggacgacgacgacggtgcggtgacggctgtgaggtgacgctgtagcgcgatgaagaagaagagggaaagccaagaggggagaagatatgacatgtggggcccacgtgggccccaccatttttttagctgatatgtgggcccatgatttttattatttttccgagaaataattgtcacgtaaacgccacgtgggacggagacctagtcaaactagacacgtaggagccacctcagccaaaaccgccgagtcgtttacaccggttttgacagtttagggactggttgtatctggttttggggttcaggatgaaaattgaattcggtgtaaaattaagggacctctggtgtacttattccacatcacagcgcttggtgaattagctgatggattgacgtcccagggccggtgctggacgaccacggcccatgcgtggggctgtggccttggcgtcgcggtcgaccacgtatgtgcacggttcagtgatggatgaggtattaggctcggcggcgatccgtgtcgcgtgtcagcggtgcaacgaaagataaaaatgctccaaaatttaaaaatttccgttgccgggactcgaacccgggtctctcgggtgagagccgagtatcctaaccagctagactacaacggatcttgtttgataacgaactgccaagcttatatttccctttgtttctccaaacgaaaccctaaatatcctggaaaagagatactgataagtgctctgctccctatatccacaataattcagcatggtttcactgccaccttatataaaaccgtaaagcagctcgatttgacgtgcctaccatctctactataataaagataaaaaaataaactagagtagttatggacataatgcttgtctttcaaaccagtatcattgatcctcattgcgaggactatatcgaaatccgattgctttcctttcaaaaagagaggattgaatcgaagtcctaatcgactctttctttccgtgctagcaaaatgatcaaaatcttcagatatcatgttggtaggggaatggtctcatcgaaccggtgcactctcgctatttcaatgccaagaggaactatcaaaagcaagcttttagcgggcaaaataatcccatggtccaaaccattattgaagtttaataaactgacacatcagaagacactgccatgatctgcaggatccgctagctaccagaagttgttgctaagtgcgaaaagaaaggcaatgcgtttctgaataaattgcccgcgacaatcgcaagatgttctttttctgatgaaaagaacagtatctccaaacatacaaaaacgtcgtctttctctgcgttggaatcgtgagcaaatcgaaaggaaggaaaggaacggctcgtgctgagtggagctaggacaagttgaggaacagatggcgatcaggcgatggcgagccctacatgtcaagtgtgatccggatgctcccacgtgtcacccctgcccactgtgattaacgcactacctgcagtaggcaggggccaaacggttatggacagggagtcttgtcaggttactgtcagcgttttacctgaaaatggtaagggatattcttgcgcttctgcaggtttactgctgggtgaaagtgtttcccagtcgctttcccgaaggacatgatgtttcaacctgcaaatgcaattgtgctgagtgctgatcgttaattaattaatcaatctatagaatttatccaacttaatagtactatatttaattagctagattcgctacgttgaatgaccagctaacatcctccaccgaattccctatttcatttctctctgcatattgattgttctggttctacgggggcatatgtactagacgaatctttattagatatgaaaataatgaaacgacgcacgtcttcgagtgattatgatgtgcacagagtacaggtatgctgaaatatggatgcaacattgtgtttgctttcaagatggagcccaatatagctgagaaagataggcattgtcgcattgagttggtattatccatccaaagaacaattatataatcaatggccatcaagaataccttcttaatttgatttgagtttcaaacaagaaaaaggattcaaacaatctgatttgacaataatagctagagcccctttacttcatccagctttcactagaaatattctttgatatggtcactgtttagcagacagaaatgaactgtcgccttgaccaaatgaccagagagaactcagtgcgtgcatgcatgccagaagagtatgaacttaatctatcctggtggtagacatacgcccaagttacactagaaaaaaaatgctaaatttgattggattgcagtgccccattttattttattttttctaaaggttgctgttatcccaacttgctgatgttcaagcaaggaagtgcccatttcatgaatcctaccaaagccccaccaaagcatcaactgcaccctgtacacatgggcacatctccaatatgactaagatacgctaaccatctcttaattctttgtcacatttgcagaaccacatcttttctcttttgaaaacgtcggtaagacatatatagacaagatactcgtagctgtttgatattgatattgcacagtagtagtacaatctcagtggtttgtcaaaccgctcgttggaacaaaacttgtctttgccccctgggcctggaccgtctgcagtactagatctcattgagttctgaaaacaataggctacctcagggacaagactgatattttgagaagcaggacaggagcctggtatgccactacattgaaccggagaatcaagaccttcgttggtcatctctcttaaaaaggttcatagatcctaaagcaaaatatttttttagaggactaaagcaaattaaatttgatactgtaatatatttgaatattagataggggcaaatctttggccatttttctaactaaaacaattttggcctctatattaatcactttactttaatattcataaaaattttaacgatgtgtcggccaagaatggattttaatctattgaagggatgtcccctcatatatcttttttttctctcaaatataatgtaaatggtgttttttcgtttaaaaaaataatgtaaatgcggttatgattcttttttttttaaaaaaatacaatgcagagtatagtggcatcaatcactccataaaaattaagtttgaaatcgatctatacattgagaaaaaaaagagaaattcaggcaagaatagtgccaattctattcacacattggatttctgcatttcatttcatgaatgtacaagttaagtttagacacttgagaatctgtgaagtggtatatgtagattggatgagtgttgtaaacattttttttttgaatttctcacaaccatttaggtggtatttgagtgaacaagccgacattccctctagggattattgatttctctatttttttcatacgcttcgtgtatctctgtattaagattaagaaaatttacagcggttctctcgagcgacagagaaaaaaaaagagaagtagacaaaatgatttatctgtggtaccttaaatatgattttgcagaataaatgcctgttttagggtttaggtacaaaaacaaacaaacagagccggtccgaaagagaccggaccatgtgcctggtacatttaaagtatcagcctgtctactctaattccaaagtatcattttcattttttttttcactgaacctccacagagatgtcaaagcgtagagaatacaacaacaggaatgcatctgcatctcgtagactattagtttaataaagctccgtttccgtacttaaacaaatgaaaaaaaaaagttgattagaacgagagggctcactggagcagttgatcagagctagagtcgatgaactctggtctcctcccaacgtgcggcccattttcccggcaccaaattctgcgacgactcggctaaaatctgcgagacatgcgttgcaaacctccgatccatctcgtgatagatgcttagtactacatcatgccaaccgttcttctcccaccggccggcttgtggcatttgcagtaatcttggcgtataaacaattgcagcttggaacattctattccatgccatccaactcgttttctttagtggcaagcacaacgctgcatggctacgaattcgtcaagcctttccgcgtaatacacgtacaggagaatctctgataaccccttgtcaaagaataggagttagtgtgtgctagctagctgacctggaggaggacgatgctgtgtgatcatgtcaataaaaatcaatgcagttaggtgaggtaaagagaagaaactccatgaaaaagcatgaaagcttcctccccaaccgattgcaaaagggaaaaccaaacgaacatttgatcgatcgatcactgctcactgtcatgtcaaccaagctggcagccattgcaattgcaagccaagagaaggttgagaatatcagtagcagtggcacgtgcggctaacaaccatttctctttgcagggctcttgcttcacaccccatccggcttggcctccgacagagacccaccgacagcgagctccacttgttaaacgatgatgatctcaccgacgattctcatcttttaattggtcattttcaggtgtcgcattttcgcgccatcctgctgcaaaaagccatccctatcattgatccgctgtatacgagtgccattcttttttctggacaatggaataccacatttcggggcctccatattagttggtgaatgatgccctttccattagcttaaagcttctgaattacctgatttgaaccggtgaatatgacatatgcaaattttgatagaattgtaatgtgttgtctgccattagggaagaaatgtatatgtctagaactctatacggcaccgtgcaagcaaataggcgagctaatcatcctgtcctactgtccgagcaatctttaattttttaattggaatcgtccgagcagtattaatgtcctatttacgtgcaagtacgatgactttgttattaattactgtccttgttttgtcatgtgctaatcagggttagtttttttaatcgattaagagcgagcatgcttggtaaagctctcctaattctgcactgtttaaagacgtcgcaatgatagatcataaagatgcaatgctccattagaaaatttgagacaagatttcagatcattggtggctttctcaaaagttcaggcgatggctttcacatttgtgtggcttttcagactaatttgataatttcaggtggccaccctttgccatatattaatgcgttctacaaagctacacacatgtcccaagcaaggtactggttactaccttgcgttagttgatctactgcactgcaaaactgtctggactagggccggatgcttttctggccccggaggcatttttgctgctgttgttgttgatcagaaatcacgtgttcagttcacacatcagtgatctccaccttgcaaagtccaggcatcatctgggtacatttttttttaatagagatcttttacagtgcttgggaggtatgctaggtaccttccaatgtattgcacatccaccgtttattttttgagtgataatttagaagaaaatcaatataagcaggggtagtttagtactttttatagccacaccatctctaacttatctcgtggaccgttttttataactaccctcgaagtaatcctcgtaattctaatctcctgcgctcgtcgatctaatcattacggcctcacagcatcagtgcattttatttgctgtaccgtctattcatatatagattttagtctaattaaaactactttttccatctagttaaaatttgattcttcataatgattctctgttacaatctacacgcacgagaagcaaatattttctatttaatccaagatgcaactttcattaaccatcatcggtaactatgtggaaataaattactttgttttagattcgtattgatatatacttcagttgattaactcataaagtaccgtacgtaaattactttgttttagattgaggcgccaaacgtcagctgccatcgatctgttgcttaggcgcaggaacaatacgcaccaaatccgacttgtttggaagaacgataaatctgctagtaattaatttgtgtttttctatctattgtaatattcgacacaaaattacctatttaactttgcacctaatcttttaagttagagagaattcactcagtaccactgagttcgttatgattcaacaatatgccactgactttgtcaacttccattatataccatcgtctttgctttaacctttacaatttaccatcacgggcacaaactgttaatttgcattgaagaaaagacaaatacgtccttatgatgcgtgaagaccagtagcactatgaccatggcatgtagggtcctgagagtgataataattgagagagaatgtacaacatgactacacatgtgaaaaatatctcaacatgattataaataataatgaggacatattataagtatgaataatgtacagcatgtgtgcaaggaaattcatccataaaaggtgcatagcacaatttgacagtaaggtacataatatccaatgtccaagttatgcaaggaaaaatcatccataaaaggtgaacattacaaaagctaaataaataagttacgtggaaaagatgttacaagtacatatcccaggatgacaattacccatcttggatttcaatggagagagcaacaacggcaatcggcaccgggacgacctccttcgacgacgatggcgcgcggcagcataggggcatcttctcccatcggcagcacaggggcattttctcccattggcagcacctccttcgacgatgacggcggtgctgacgacgacggcactaccagcaacagaggcgcaaggaatggaggagccggggacggcggttgtcgcggcgccaggcccgacgatcggggcggagagggggacggctgttggggcggcgccggggacggctgtcgctttggggacgacgggcggagatgtagcgcggcggccggcagagatgcggcgcggcggcggagatgcggtggccggcggaggagatacggtgcggcgatcggcagagatgcggcgctgcggcgggcagagatgcagcgcggcggcgggtggagatgcagcgcggcggccggcggagatgcagcggcgggcggagatgcggcgcggtggtggcgtggcggcattggcgctagccctaggaagggctcgaagagccgattgactgggcgctcgaagagaggattgactggttagggttagatgaatcaaagggtatttcggtcattacggaaaaaaaataacagtacaaacggcatatagatgactgtctgtggacggcgatggtaaatcgtagaggttaagggaaaggcgatggtatataatagaaatcgacaaagtcagtggcatattattgaaccgtgacgaactcagtggtactgagtggattctctctttaagttaactagctgggtggcccgcgcgattgcgcggctagcacccatttaaaattatctattttctaaaatgattttacttaaaatttattaaatagctatctcgttgttttaaaactttaaaagaccaaaccttattatccccgtgattctaattttatagttcaaagtcataccagttgttactccttacttcttcgtcacctccttccttatttgtttgctcgatctaccactgcttctattctctctctttggaatctttaaaaattactccctccgtcccaaaatataagcatttttagctttgaatctagacaaccatgtgtctagattcatagctaaaagttgttatattttgggacggatgtcgtagatattatttagatatagtttattatcatcattgagtttcatttttatatttttttagaagtcccatcaaacgttgtcactgtactcctgtatgacccatccgttgcctgggattttaaaaatcaaacatgattatcgtttagattcattttttactttctagaagtcccaccaaaccatcactggctttgccactgtacttctctatggttcacccgctacctgccctctttattgtccttgagattttaaaatcaaacatgattatcattggggtttattttttatttttttcatgaccgtgttgcttaatagcctatccatcgtccttgcttttaatcgtcattggattatatttggggttttgttaatagtttttagatgtctcatcaatcgttacaactgcttctattcattctctttggaacctttaaaaattggaccttatagtttttagagtttattatcttcattgggtttcaattctattatttttggaagtcccatcaaacactgccactatactcctttacgacccgtccgctgcctcatctctttattgtcattgagatttaaatcgaacataattatcgtttgtgttcatttttttactttctagaagtcccgccaatcatcattggctttgccactgtgctcctctacggctcgccgctgccttccctctttattttatattttttggatgtcctgccaaatgtcgtgaccgtgttgcttaatgacctttccgttgttcctactttcaatcatcattgggattctatttggggctttatcaatagttttgagatgtcccatcaaccgttaccactctactcctttacaggcatgttgcttctcccatctttattatcagttgtcatatgttttctagatgaattttttgtttgaaaattccataactttcattccgatatttttttatttagaaaaatatattcctactttaactcttataattgggtagcccgcgcaattgcgcggctagtacccgtataaaattattatttttacatatgattttatttaaaatttatcatttccatgtttctaatttaaagtttttaaaagtcacgttagttgctacccttgctcctctgccacacctttatttgattgcttgatctatcattacttctatttatcctctttagaacttcaaaaattagaacttgtagttttcagatttgattgtctcgttgggtttcatttttataatttttagaagtcccgtcaaacgtcgtcaatgtactccactacggcccatccactgcatcctctcttttttatcattgggatttaaaaaaattgaacataattattgtttgtgttcttttttactttctagaagtcccaccaaaacattaacggcttcgccactgtactcctctatggcccgcccatagagatatttaaaatcgaacatgattatcattggggttttactttttataagtctctccaactgtcataaccgtgttgcttaatggtatgcccgtcgtccctcctcttaattgtcatttgattctatttcgggttttgtttatagtttttagatgtcccatcaaccaccaccactctattcctttacgggctcattttttctcccctctttattgtatttgtcatcgtagtgttctaaatggaccttttttttttgaaaattccatatttttcattccgatatttttttatttataaattatattcctacttcaactcttataattatttttctattttcataatttattttatttgttataccgaattttcattaatctctctatatggtctcttctttcaataattcttttttagtacaaattttagttatttatataatgtattccactctcatttttatttttgtattttcgtgtttttttattttgaatgtcaattactctcatgtcgtgttcttatttggagataaattatattcctatatgaactcttataaatatttttctattttcagaatttattttatttgttattccgaattttaattaatctctctctctatatagtctcttctttcaatagttcttttttattgcaaattttagttatttatataatgtattccactctcatttttatttttgtattctcatttttttattttgaatttcaattactctcgtgttgggtttttatttgtactcttctttcaacattgcttatttttaatttcgaattttagttattttactacttgaaatcttctttttgttaaaaaaaattcggattttattttatttatattttaaattttaattaatctcatattggattgttatatagactctcctttcaatattgcttatttttaattccgaattttagttacttttaaattgtatttttacttgaaaaattattttttgggttaatgtaggaatttatatccctcataacaagagtagagtacaaagagttagccgaggtaattgaataaatggaccagccatcaaatatatctatttctctcgtgtactggtcgtaccttctctttctttggctcctatttcttcgttattttgttggagacggcagatggaaactgtacgtgctgtgattgctttgtagtatctttttttttggtagctagccaccatagcaatcggacataaaatcatacacggacatagcttttttccctagattcctattacaatttttgtttcctagtcctagtttggtaagaaaagtgtatctgctgctggccaatttctataataaacgtatctgtatctgattaccatattaaaacttctatgctattaaatctcagcccttaaaatttagacaactaagatctaatggtgtaaagttttctctttttcttctattaatgtgagaatttctagccgccacaacgaacgtggtgtcttctttcaaagctgttttaataatataatagatagatagatagatacctggcccacattttcaagtacccacccacacataccttctgctatagatcgttggattgcatccaatcaacggatgccatcattcccaagcaccatagcaggtctctttttaataaaaaaataaagaaagatacacacagatcatcattccctctgtaaatctgtaactccatcattccatcaggaccgaaataaagctggaattcgcttgccttagaatcaaatcaagcctgaacctccggtcatcccggctgctgacagtaactagtggatgtgagtaaaaaaaatcaggacactggccgtcgagtgaacggaatttacccttgagattctccggccgaagatagtgtgggccttgcacgcgatagccactgtaaaacatcgggacaaacctgtcacctgctcgaacaagctaagatcgcgccatcgtgtggctccagcttctgcaaacaacaagggaccgtatattcctggagctagatttttggctgtgtatgtatgtagccaagcaacccttgttcaagtacaaaacgtggtacatatataaatgcaatcttggtcgaaaagaccggcgatttggcgtgtatatagccatcgcggtaatgacatttagccaagctattagtaaaagtgaacatccttttcagagggaacagcaagtgatgagcaagatggtcagtattgtaccaagtgattaaaaaaatgaagaaatgtttgttaactaaaaacgagatttacagggaaagtcatccctccaaatatattttttaaagaagacattatgaagttgttttactaaattggtatatattatgagcttgttttttttttgcggggatattatgagcttgttgatgattgaacatgaaactttagacttaaaatcacacattatttaccactgtgttaagtgtatctaatcgttaattaggctagcgatccggtcgcttttggtttatttttccaccctccgatttcttccggtgcctgccagctacctgcggcaaaggccaccacacgacacgcaccaacagacccctttccggcgcgggcccactcggtcaggctcagaaagaggccagccaagttgccccacctaacgcccgcctccctgagccgtccgttccccatccgatgtcccaccacccgcccacgtgtccccccttaccttgcctgctcgagaaggcaaaggctcgcgatgctacgtgagccgtggatcttgtatccgacggcggaaatctccccccgcgcgcagcagcaggcggtgcacacgacgtcgtcgcaacggctataactggagacgacatccgcgcatgttacccgccatatctgtctccctctccccttctcatctcccgagaagtagtagtagtagtcgtctagtagtagtagcctaccaccacctccctcggcgagcgggtcccaccggccaccgtccgtactccggtgagccggcattgcgtgttccgggatggcgtcgccgtacgaccaccagtcgccgcatgcgcagcacccgtcggggttgccgaggccgccgggggcgggggcgggtgcggcggcgggcgggttcgcgcgggggctgatgaagcagccgtcgcggctggcgtccggggtgaggcagttcgcgtcgagggtgtcgatgaaggtgccggagggggtgggggggatgcggcccggtggcgggaggatgacgcggatgcagtccagcgcgcaggtggggctccgggggctccgcttcctcgacaagacgtccggcgggaaggaggggtggaagtccgtcgagcgccgcttcgacgagatgaaccgcaacggccgcctccccaaggagagcttcggcaagtgcatcggtgagtccccggcccgcagcttccatcgatggtgcgatccagaaacagatagccgtaaattcagttccaaaagggcgattagttgttgctaacaagaacacagcagaaatatctctgattgaaggaatattgtgttggcgccatctttcttgttttctgtcaatcatttttatgctccgcaacagttgtgtgatgatgccgtgaactgttcatctttgcccaaagagttggcagggacagctctgcctaactgagatcggctctttgcttctcaactaatcccctcgaattaatgcttttgctttgcgaaatggtccattattaagcagtaaatcggtacagcaaaagaaacgagtactctgtacttctcttttgttattgcacatgcttacggagaaaatggagttatagcgaccggttcatgctggaggcagttaggcgatcgatggaataataatcgtgtagcgctaagcgaatcatttctctttttagatagtttggatgtctaacaatgcccatgattcatgatcttttaattgaactaagaaaaattaatccatggtggatctgcttggcatcaaaaggcatgggggactccaaggagttcgccggcgagctgttcgtggcgctggcgcggcggaggaacctggagccggaggacggcatcaccaaggagcagctcaaggagttctgggaggagatgaccgaccagaacttcgactcgcggcttcgcattttctttgacatgtaatggttcaccgtcccagttataatttccaagatgaacacgataaatcgatcgccaactgacgaaatggattttttttttccttccccctctctctgatgcatccaggtgcgacaagaatggcgatgggatgctcacggaagatgaggtcaaggaggtgaggacgaaagaattcttctggattggatctcatctgccattctggaacatggagagagaggattaaatatcgttttcttgtttggctggaatggatttgcaggttattatactgagtgcgtcggcgaacaagctggcgaagctgaagggacacgcggcgacgtacgcgtcgctgatcatggaggagctggacccggacgaccgcgggtacatcgagatctggcagctggagacgctgctgcgcggcatggtgagcgcgcaggcggcgccggagaagatgaagcggacgacgtcgagcctcgcgaggacgatgatcccgtcgcggtaccggagcccgctgaagcggcacgtgtccaggacggtggacttcgtgcacgagaactggaagcggatctggctcgtcgcgctgtggctcgccgtcaacgtcggcctcttcgcctacaagttcgagcagtacgagcggcgcgccgcgttccaggtgatgggccactgcgtgtgcgtggccaagggcgccgccgaggtgctcaagctcaacatggcgctcatcctcctccccgtgtgccggaacacgctcaccacgctcaggtccacggcgctcagccacgtcatccccttcgacgacaacatcaacttccacaaggtgatcgcggcgaccatcgccgccgccaccgccgtccacacgctggcgcacgtcacctgcgacttcccgaggctgatcaactgccccagcgacaagttcatggcgacgctggggccgaacttcgggtacaggcagccgacgtacgccgacctgctggagagcgcccccggcgtcaccggcatcctcatgatcatcatcatgtccttctccttcacgctggccacgcactccttccgccggagcgtcgtcaagctgccgtcgccgctgcaccacctcgccggcttcaacgccttctggtacgcgcaccacctcctggtgctcgcctacgtcctcctcgtcgtgcactcctacttcatattcctcaccagggagtggtacaagaaaacggtaaaattctcatcaggcgctcgatcttcctgtgactgcaatgaaattaagtgacatcatctcaaaatgtcaatcttgttcctgcagacatggatgtacctgatagtcccagtgctcttctatgcatgcgagagaacgatcagaaaagttcgagagaacaactaccgcgtgagcatcgtcaaggtaagcagctgactcatgtaactgggatccattctttcttagctgtttgcctgttactcataaaattggtgatgtgggtgtggcacatgcaggcagcgatttacccaggaaatgtgctctctcttcacatgaagaagccgccgggtttcaagtacaagagcgggatgtacctgtttgtgaagtgccctgatgtctctcctttcgaatggtaaccaattcacccttgtcgcatgaatgcatgtccaaaatgtggtttatctgagactatttctaactgtttttcctgcctttgcaggcatcccttctccatcacttctgcacctggagatgactacctgagtgtgcatatccgtacactaggtgactggacgactgaactcagaaacctgtttgggaaggtcagttgaggcagcacagctgcaaagagttgcaagaacaattagtttccctcgttaaacaattctaggagaataatgcagattgccaaaagatggagaactaaatcttagtattcatgtaggcttgcgaggcacaggttacttctaagaaggctaccctttcaagacttgaaactacagttgtggcggacgctcagacagaggatactaggtgactagagaagctcttctatttcacctaccaaatgcatttggtctacaatcattttctaaccctggttatcttcacaatgttgcttcaggtttcctaaggtccttattgatgggccctatggtgcaccggcgcaaaactacaagaagtatgacattcttttgcttattggtcttggaattggtgctactcctttcatcagcattctgaaggatctgttgaacaacattaaatccaacgaagtaaaattcttccctgataaatagtgtttccttatttcctacaatgttgtataactggaggaaatagataactaaaatgagttgatggcaacaggaggtggaaagcatacatggttctgagataggcagcttcaagaacaatgggccaggaagagcttacttctactgggtgaccagagagcaagggtccttcgagtggtttaaaggagtcatgaacgatgtcgctgaaagtgatcacaatgtactgtctcactctcaattcttcgctgtattttcaaatttccatagttccttcagtcatagatagaacataaactaatatatgtgggaattgcagaatattatagagatgcacaattacctgaccagcgtgtatgaagaaggcgacgcaaggtcagctttgattgccatggttcagtcacttcaacatgccaaaaatggtgtggatatcgtctccggcagcagggtattcgacatcttccccctcttctatctgaaatacttatttatttccagtgtattcctcttatttctgattgatctgttgcagattcgcacacattttgcgaggcctaactggagaaaggtgttctctgacttggcgaatgcccacaaaaactcacgcataggtgagcctcttttttcagcgaacatcgtcgatgcaacaattttgagctttgcagtaacggttgttaacaaatccataaatatgcaggtgttttctattgtggatcccctacactcacgaaacaactcaaggatctttcaaaagaattcagccagacaaccacaactagattccacttccacaaggaaaacttttaagaccgtaccaaaggacgtctaaacagactgcatatacttgtataggaaagaaatacgatagcattgggatagcaaatatagtcttacaagttttgctctacgatggattgtacaaaatatatgttgaaagctagtgtcaccatcgtgcatagattctggaatgtttacagatatatgtattggaacagtgggaatgcatgttagaaaaattgagttccaggtggtgcgccttgagcatgcatattttctctcttcagtctttctgccttcgccagtttttctgccctgactgtctgtgcattgcgtataagaacactattttgtggtgtgcattcagcactctgagcatttccagacaagttcctgttttttggaggcctgcctcttcttttaggctgagtattggcaggaatagttgcatcctttcgaggatacatagttgcatcctttcgaggcctgcccctttttctaggttgactactagcgttaacatatgcatcgttggatgtagatgctggaaccaacgctagtaagttattggattgatgttcatttgccgctccagtcatcatctgatcttccatagcattgtttgtgttgccatccgttatagcatagacttttcttggtctacccaccttaggtttgaagacaggagctgtattttgaagtgcgaatttatccgaaataagtgttttcagcgggatagttatgtccaatggcagcatgatctcctccacttccttccactcgagatcctcctggtctccatcttgatagacaacactgtaccagttactttcactatcatacttgtccactttccctacaaaatgcttgtccccaaaaggtttccttactttccgcccttctagaaattcaccaaaacgatgatcaacaggaggttctgcagcattacgtggctcaggttgtgattcggatgctacatcaggaggcaagtctggaactccattgataatgacggcaggctctctggcaactttgatgacagatgcagtctttgattcttgcatgccatgaatctcctccatgacctaacaccgtatcagttgtccttctatgtagctataacagcctggcacagagaggatataagaaacaatgaaacattcccaaactaagaaatcataagcaagcttagtccacagaacaagtaatcatgaaccaagcacttcaaagctaatgtaacatatgaagaaacataaaaagcattggtgagcatctaggaagctagaagcaccggtagttcacacatgtgacgtgatggttccatgatacatggcaggtctcagtatagcagtggcaggtattgctggagtacgcatgcctgttcagaaaaaaagaaattttccaacaagtgcggtgctctgaaattctgatacgtctgagccagtaaaattggcactgcatctaacccttgccagttatctgctgccaatctcagcactgcactagagactgaactcgaccatcaactggtcatgttccatttggtggtttactgctaatctaaagatcaacttttaaaacaaacaaaggccaattaaaaatataacatggcttgttccattagctctaatttcagaaataaatgggacatccaagttgaactaaaactaatttacgcgtttcagaaagggtctacctacaacagcaagtatctgtttttctcccggacgtaagtacaactcaaatccaaaaaaaaactgtattacaacattgattagaaaacaaatagaagtagtacctaaatatattccttaaaactagctcataaaagttcaattaattagaactcagcttcccaaatctgttccagaaccagctatctgaaagttttgatcacaaaataacatcatacacaatttggtgagagaactaggctgattcacaaagactcagagttgaacaaacaaggatgatgcctcttctttctgcattttacaataaaataaataagcagtttgatgcaaaaaaaaatatgataaaaaaagtaaatcaagcaaaacaccaagattttatgcccttccccaatcaggcttgccacatatgaaataaatcttccaacgacaaaaaagcctaagatcaatttcttcattttgcatgcaaaagtatgccagttgtggacacagcacattggacctagaagctaattcagatgttacaaaaaaaaaggtgtcatttgtgttagcattgtaaaaaccttttttttttcaagttgaggcaggcagcgttcccacatgcttttgagaacatcctaaaacgacattctcttctctgttttcggttgtaattagctaccatcataaagaaggtgaggaacccgtgttatcccataatagaaaggcagcactttaaatccaatgcatcatttctgatatatgaacatgttgtctatgctagggctctaaacaaggccaaatcataaaatttgttaagggtacgaggctacaggggcgaatccacgtacatgccatgtgatgcacaggcacaggctaaactttgacatcctaatcgtagatcatgttaccatgtaaacatgtaaacagagtattagatctaattcataggtacaatgaatgggtgggcataaaaatcccacaaccaaccgaaccaccattttttaggcctttgggttgacctttggtttctgctataccgcacaaaaccgctctctctcgccccagtgaggatatagtgcaccctacatcgtttaagtcaattcagcacaagtttgcaacagaattatcaatttaacatataaaaccatctgagcagagggcctaggccaccggttcatcagatacccaacagatccaaacggatgcacaacgcgcttcgtttactagacaaaatggaggcggcatttcatcgaacagaaagctctcgcagtataccaccgcagattatgatccaacggatgcacaacgtgtttcgtttactagacaaaatggagcaggcatttcatccaacagaaatctctcgaaggaatgtatggatggcagattcagcggactcacctcgggcttgcgctctccctgcggggaactgtgctcgcgaaactcggagggctctgtaggtacgcgccacccccccccccccctttcgcgggtgagagacctcgctcgccgtcgccgggtcgcacaaaccctaaccctccgacgagaagggcggggggtagatcctgacggcctggatctggcagcagccacgcagtacgatgggagcgcccgcaaaggtggtggccgttgagggaggcacggcgccgacgagaggcgggcgcgcggtggccgccgtctccggagaggcggagacggcgagaggtgagcgccgcaggcaatccctctgcgaagtgggggactggacagcacagccaacagagtcacagggaagatggggagcggatttaggtggtaggtattgggcttcagcctttcggcccatgtaggtttggatctgtttctggaggcccataaagtgttttgggctggctccatctcggctatggaagtgattatctaatgggccttctgaaactgagtaatttctttttttgttagaaacaaaacgcaataatttcactatttcagtgtacaattcaatgtgttcttttctttagcaatggtatacgtacaaaaattttattgggaaaaaaccgctcaaaagtttcacgtgttatcataaacgagaagttagattatgctaaaaaaaagaaagaatttagatgaggttaggtgtttgtacaagttcggtaagaaatcctaagggattgtttactttatagatattttcaatatttccaaaattttagcaaattagtaatatcaccaagttttggtagaatatactacatatgatgttgtcaattatctagacatggcaaatattaagtaataaactaaatgttgtcatatatctgttaattttaataaacaatgttcatcgcaaaaaaaaattaataaacaatggtatggtttaatataacatgaatctgaacatgccctaagtctaccatttccctttttaagagagataaaataaactttggtatatttgtatagtacctatgcatttttttaaaaaaaaacacctagtattatacaattgaagcgaagaatgaaaatgttttttttaaacttaagttttgtattaccgtttccattctaaaattaatattagcatcttttaaaaacgtagtccaaaggcgtaacaatttttcagaggagcgcagttcttttaaaaaaaatatagagagaggaatgcatttcttacgtcttcatgacgttaatgattctcttggacgattttaacatttacctgctcattgccatccaatagttttaccgcgttatcttaaccatgatcttacatcagtaacatcacctttgtatataccatgaattttgacgctacatcatgcatgtcttctcttttttttactgcgggtggtaactgtgatagagactttcacacgaaaacaacaaaatgatcatgttcctttcacttgggaaatctgtgtctgctgaagttctttgaccacccaacaaaatcttggtgtgttcacatttcagctgctgtcatgcatgaccccaaaatgcttaagctactacgcctaattgcgtttaatagctaacaagtggcaaggaatcactagctagctagtttacaacttccatttgcgggaattacttagaacactttcattaccaattaccactaaacaaattcaactttgtgttgtcacttagcatttctaaatagtaatatttatgcccctttgctgattccatctttttaccatgttctttcccccccccccccccccactgaaggaatttctgcagaaatcttttgacctcattgtcacattcgttgtcctgtttgtccttaatcttgaatccgtccttaaacaaattaatgatacttttccaatcaagatccctcgctggagtgcgcaaagatcatatctttttgtttttttgttctaacctcaagtaagagcttgcttattggtgaagtggttagggtgggctagtaccctacatttcttactagggtcaacaatagcatccaagtgtgcacttttagatgttaattcatgccatgtgttttgcttatgattgatttatccgtgaaagcaaggccatcatttgattctttgggccttacactggtgtaagcaatctccacaatactataactatatagagagggaatgcaacacctcacatgattcccttgttcttccttcctcctccacttgagaaagtggtttggtgcttctaattgtaaatggtttcttgattattttgcatgctactacaaatatgctttgccgttacacgccattgctggtcacattctcttcataaattgtaatcatcatgaagctaagtagctagctagctaatctacctgaagaatagcacattagccaacatcaactgtcgagcggcgttagctgaacaaaagaaaaaaaaatgactcagcttagctgaaagagggaggcggcattttgactatattctatatagtcgcacgttcagcaacagcaattacaaaattggtacatgaacttagcacaagaatttgtgccaaaaagagtactaattacacttgaaatcatagctagttaagatagattatctgcacaaagtactctgcttaccggccgacaaagattcggcagccaccctccccgcctctacggagagagggaaagagagatagccttgctcaaagctagaaattccaaagagtcagagagagataggggcagagagattcaacttctgcttgctctaaaatatatactaaggaagtgggagaattagtgcgcccttaattatagggctctcccagcataataatctcctttcctcatccctaacctatatgcagcattagaagccatttgcatgcctttggaaacttacttgacggaaagacaagaactgcaaatggccttcatgtgagcttgggaatgtctgatgttgtaactaaattattaaaaaaagcacggtacttagcttattggtagcccgcagtatatagggattagggagatgtcgacctccttcctgtcagtgcaaagatgcaatggtcactttcatgacataattaaatcgagcgactgatcacatgaatcccatagtcacatgcaaaagtataaacactcacatagaagagtttgaatcgaagtgatgatccttgctagctaatggtctatgctgtcacatgccattatgtcctgcctgtagatatatgtgtttgatttgcacttgttttgccttctctgattgtaattgtaaacaacaactgactgtcaaaactcaaaacctctttctcttacagtcaggagacttctgtgcatttttctaccgtttcttacagtcaggaattaaacagtatctgagaaattaaggaaggattctgctaataactgcaagagcaataatacattaactcaacatgcatggaggcttctcaattgctcttctaatcattgattgagtcgcattatatacacttgggttcttattcttgtttgactcatctttacggtatcatgtcctggtccctggcccggcgatggtgccggcgacgatcgtgcccgttgcgatcagtctaaaggtgtgattttttttggaggaggttcttgcattgctttctttcttctaactctcatggatgcatgattcccaaaatcgagctcgagatagaggcgaggattggaactgaattcgctcttgcccgttgggtgattttcttgccatgtcctttcgctacatttcattttcgtgctacatttcgaggcgcaattagttgccgctttaaatgttctttggtgataaaattttgcgattcttttgtgtggtcaaaagggtgtgctaatagtagagttaattgtatctgagctactgcgaatcgaatttttcccctcggtgtattctgtttgtgataactcggtttatcttcgtccagaaattttagccgcaattttatccccatatatgctcatttgtattatagagacatgacatccacaaagctaaaaatgataagaatccgggaatgccgttcctaaggaagcaatccgtcttttggtaaaaaaaaatgccaaaaatatcagtgttcctatattttgtttttgctaaaattttgaggggtttcggttcaattagaggacattggatcaattctaccagaggattgttatggttcaacagttggtactcccgttactggtaccaccctgtaccaaattatatccaaccgttgattctttaaggtacgattgagagtagagcatcggtctcggactctcggtcctcaaggcgcgattattttgcatcttcacggatgcatctaagtcgaaggtcgcggctcagcgaagcggtagtggctacgacggcagaattgtgtgaaaggcaagggaagacaacatcgttcatctgaggaaagcagcggcggcggctgaacgagactttggatattgtttgcctggagatattcccttgctagccgcatcctcagatcagatagaccaaacaaaatttaacatgaaaagtcaaatttaccttccacatcttgttctagcactaagtaccgagttctagcagccgttcgattgatccctagcatgttgaacggtgaaattccttattctacaaacatcacaaatgactgaaatatgtctccacttaattaattaaagcatactcccaatgtttttttatttgttgttaaggacatcaatagagacggtcagcatacaattttttgtgcacatatttaatcacggcctattctaaccatatattcacagctatatttaaaataactatgttattttcataaacaaaatgttaatacttacatatacctatgagttaatattataagtgttcaagaaaaatatctatcagagaatggaggaagtcaacatccctatttcctcctatgtacgagtgatgccagtatgccaccgtgcccataacctcagtcatagttctcccaattcccgctccctctgttccctgatacaaacatatgtaggattaaattttgtatgcaatataagtatttctcgtggcacaatgattctaatacacaagattgaaaatttatacgtaatataaatattttttgggacattaatacacatgaatttaagtatttaatttttagccaatcagatacttggggaataatgtgaggaatttaaactgaaacataatatttttctcttaaccttaatagctaaacaatctagaaatattaatattagtgacagatggagcagtacttagcaccacttctgtttttcttttctcaaccctaacgacctcacctagccactgagctcctctaagccacaatagacaaaatcaagtagaaacaatatttcacataaatataatgattttgtggcaactagttagtactagtaaacaagagttgagaaagtagaaacattattccaccggttgtccggttcatccaacaagttgggttctctgcacaagtaggatatatggccaaaaaggtccaaaaatgttatagtagtatgcagatgtttatttctcaacgttgagaatttttttcgatccgattacatgaaaaatgtataatacacacacttctactgtttgtccttttcttttcttttctaactctattatcccctttttacgcacataagttttccaaactactaaacgccatgtgtttacaaaagttttctatataaaaattactttaaataatcaagataattatttttaagataatcatacactaattcatcatttcattttatatgcatggagggtacatccccttgaacatactctcaagaatcatccggaaatctttggtctcactaaattcctagttaaaacacatccatgtatatttagtaatggtgtttgaacccttcattgttgagcggcaaaattcttttttaaaaaaaagcatacgtgctccaactctcgttccatttcatcagatttcataacaaaatactcttacacaatttgcaatcgccggccgaattcttgggaattgctcgaccagtacaccaccgctagtccacgcagttcgtggggggaaagagcgagaccgaacagctaaccaactgtagggcggatcacgtgtccgcacgcgtgcaggtagccgggccaatgggaactcgcaacgagggagggaaaggcggccattaaaccctctcacccaatgcaaaacaaagccgagatcagacatcatcgccatgggcgagggaaaatcgatcgatctgtccagcagatggttgcgcgtcacggacgcctcgcctgtggcagcgacctcgccgacagcgatccgcacccgtttgacctcgccgtctcgccatctcccacatgaagggaaccaacccaataatcccaccctcccaccaccgaagcctgaatcaaatacgagtggaactgcatggcatgtcacatcgcgtcacacttgatcgtttggtaataaaccttttttagacgagacgagcacggacgctagcttgcgctgcagggtgcgagcagcactaacaaggaggaggaggaggaggattcaggctcgttcagggctttgtggaagtaactgggaaatcacggagcagtagtagtggtagcagcacaagttgttcgatctttctcagtgtccggtcacgagagaaggtttctttttgtccctctttttttcttttttttcgtttcccagctttcatgatgtttctggcgaaagttacaataatactacacacaagggaaggtcaacgacgccactctgacctgacctgacctcctcctctcgcgcgctgcacactggcgctggcgcaccactacgctgcgcaccggtcgcccgcccgcgcgcgcccgccaccctgagctagctagtgcgtgctcgtgctcgaacaccggaccccaccgaccaccaacaacgacgccggcctacgcgccggtagatctccagctcgatcgttcgctcccctgatcggcggcgacagcgtactacgaggcgaggttcacggacagcatgtcgccgagggtggcccatatctcctcgtcgacgtcgaagccggcctgccgctgccgctccgcctcggcggtggtggcgcccggcgcgcgccaccaccactcgccattgtcgctgccgccgacgacagacgcttccgtcgcggcgccgtccttgcggttgtaattgtagcagctgttgacgctgctgctgttgctgccgctgcggtagtcgctgtagcccgcggcggagtagtcgtagctgtagctcgcgtcgaacgcctcccgctcgtcgccctccgcgtcggcctcgccgttcctcgcgaaccggcctttcaccctcggccggctatccgccagcgtcttcctgcacgcgtactgcccccaaacacaaccaaagcgtcagcacgaataatgggcgatcagagtgcaatttttgagcgtggaggaggggaatggttacagtgatcttcttgttgaagttgcgttgatgccgcttcacgcgatacctctcgatcctctccttcctctcctcggcactgtaccgcccgaccttctgtgagaatggcccgctgccgtcttgcccgcagctttcgccggacgggagcggccgcggcggcgacgatccgttcatcccctgttttcgtcaggacacaattcgtcagtcgagcttccatgaacgcagctcgattggaagtgtgcaccgtgcagttcaagctgttgcatgcagcttatattacctggaggtcgccggtgctgaagacgcggcggacggggcatggcgaggtgaactcgaagaggtcgccagaggaggaggacggcgaggaggagagcggcggcggcagaggcagctggtgggaggaggaggacgacgacgagaagaatgcgccgccgaagtggtcggtgagctggaggtgatgcgggagggagtgcgagctgatgctcctctggatgttgttgtagtaggacgaagggagcgacgaggagtaggacggcggcgacgacgacgacgacgacaccgcccctccgaagtgaggtaacccgccgctaacattgccgtcgaggtagccgccggcgacgcgagggatctgcgtcgggacggcgggcaaggcggccgccggcgagtggttcatgaagctgacgtcgctgccgtaggaggccgccgacgaggcagaggaggaatggcggaacatggcttctttttaatttggacgtaaaaaaagccttgggacttcgggcgaattgtgtgcttggggggaagctcaagtggagggggcacggtataagaaggggaactggggaagggcatggcgcgttatgtgcgctggcttatggtgccatgcactgtgagaggtggtagggtcaccgctcactcgtccatgcagtacaaaaaaatcttatcatgtcccacgcgaactataccgatatatactatatcggaactcatttcacaagtcaaatcgaatttagatggtgtgtcttgctaaaagaaaaaaaaacaaaaaacattatgcactgcaagaccgagagtggtcacatctccactactcctatattacaaggtaagaacaagtttaatattatagcactattatctttaaattatctatagttaatttaatagccaattcatataataattacatataaatatataatatagaagtaatattttgtcccatctgtcatacttgtagtctgtgttgtggctagctacaaatatgtagcccactacttttctctttttttatttatcttatcgatatgtatttatagctttatagctgatttatagtcggttattatacctacactataagtagaacaactaccgatatgtatttatagctgatttatagtaagttattgtacctaagctataagtagagcaactggtaggactgtaggagggttgaaagtatgcgtgtacagggcatctgacttttcttccttgtacaaagtcagatttcctgatgctgttgataaatttacttgctactactactacaacggttaggtgatatcagccgctgatgtaaaatccgacggccaagattttatgctcttgtccctttacagtagttctttacactcaacagatccacatatcattacccgtttggccattagaagattgcctagactggagcatctactggaatatttgtactgctgaattgtatggcataggcaatagtccttaaaaaggttgttttaccccttttatttatgaatgaatgaatgaaaggtgctattggaaactagatgcttttgccttgaaaacaaaagcccgcgaaatattctcattagccccctttcataaaagtcatgctgaagttaacaatttagaggaatgagtataggtgtcacagctagggaatatgctccaactaattacacattgattaacaaacacaacgaagttgatgccagggacctttctgtataaaatcagatcaatagggtacggaggtacagcttactgaaagatatttttgcgtgtatggaacgtcggcaagtacgttcagagcaattttgttttcacggcaggaaacataaacaagatgattcactgggtatgccgtatgcgtgtttccaattttaagcaagcacaccataaaatgagagaaattaggtaattgaaaacttataagcaaatcgacaaacagaaacagaaataaggccttacccaaatacacttgttgacaaactttgacagcacctgtcaaacacagcaccaatcttttagaacccccatgttttgacctttgacttcacgtcacatattgccaattaaatccacttactgagaaaaacagaatagtaatcaacactaactgaaactggaccattctctctctgagagtgagagatctagagagggaaatgaaaagtatagaattcatactgtagttagacaaagatatgctgcttgccagaagcagactctgatcacctgtctcaacatgccaaactttaacatcgaatcggctagagctccagtgctccacctagtgttccttatcttttgtgctgtaccaacgtccatgtacgtagcccatgagaatgagatgtatgtagtgctgctattagataaactagagatgcttttttaaaagaaaactagatgctttccctccaatattccaatacagtttgatacagagatacttgtatagttgtatatatgccattttcaaagatcttatagggttcattgttgcacgatttgcattatatgagaggactagggaaaaaaaagaagaggaaatcccatcactcgcctcttaaggcagaagaaaagtactgaacagggtggttaagatgatgggttagctaagactgtttactcatgaaacaaacgcgtgcatggaattgcaacaagcacggtgtgactagaacaggtgatctttctttttaagttgtcaaaaggagatgtaagtcagttagtgtacttgcatggactagtattcttttattgatttaacttaattattgatccttctaacctcacgctatactccaaatgcttccatctttcaatgtatactgctacttgaactgtctacatgttaaaaattatgtcttaaagccatgctttaacaaataacttgtacaattaaatctaaaaatttgtcagttgatcatggtagtcatttagatatttccttaagtttacaaatttctatcattttggcctggaacattcaacttagtttattcatgcatagttgcagactacatttagctacacaatcatagtctgttgcagataatgccttaattctgtttccatttttcctgtaaaaaatctaagaatacagtcataattcataaggttctgtaaccaacgttgactataacctaaaaatgcagagtgattgtcctatactacaaggttcctaaactgaacaactggatagacataggcaggacttgaaagcagcttcagaagttgacctgttaggcttggagtttctgggacgcccatcatcttgcacactcatttcaggcctctgttcttgcagaactatgtttaaaataaacaatatatacaacttctaaactagctcatcgagcaacaattttgtagtactgttgcagtcgtgtacttaaagtactatgcaattatagaacgataaaacaactatggagcatttcaataaggagctaaggaccactcaatagtcatacgataaaatgatttaaagcaatgtatttcacctcgaagttttatcggaagtagattcagacctacaacatttggatgagctttatgagattcaaatctggcatcttagcatgtccagtcagtccatttcatatttctttagctcgcaatatctaacaacatatcaaggagaaacgttagccattttcatcagatgacatgaactagatgaataaatagtttctttttgtttttctttaatgatttaacaagacatttttctcttcctgaaaaattcaaaggagttaactttttggagaattttgaccaggtctattagaaagattgacagcctaaagattgatctcccaatgttacaaacagaagaagaaatgcataatgacaatcctgatggtgtttaagcctctgccaaacgtatttgttcaga

SEQ ID NO: 9384 - DNA, 17096 bp, Oryza sativa
tgcatgtggtatccccttgagatataaaaggaggaccttgcccacttaagagaaaaaagagagaagaggggggggggaaaaacaccggagctcggagaggagagaaagaggaagagggtctttagagtttgaactctcttgctctccagctctttgtaactccttcatacacagatccaccagaacacaggagtagggtattacgcttctcagcggcccgaacctgtctacatcgcccgtgtcttgcgcatttgctctctcgcgaaacattccacagatcgagggcttagaacctcaccttgcgcccctggccgaaccggcaaaggggggcccgcgcggtctcccggtgaggagccccacgctccgtcatctggcgcgccaggtagggggcgcgtgtgtttttctaagccctcgtcctctttcgtgtgcgccaagcttctcccgctcagcccaatggccgaacgggcagtggcgcacaacctctctccgagcgctagcggtgacgacggggagcagaacccgcgccgtcgagctcgtactccaccgcccccctctcgccgaagtcttaggcgggaggaggtgctcgagggggtcgaaagatccgcgacttcgccgcccacgagcgatggagaaggacggcgagacggggagcgtcgcctcctcgtctacggcgatggcagcacgccccagggcgcgctccaagctgcgggcgcgctcttgcgtcacccgcccgtcgtccccgatccagagactccagcccgacgttggctggatgacgtggccgacttggtcatgacggcgcagcagcgcctaggcgccggtgggcggtcctccgccaccaaggcctctggcgctgctaccgccggctccgtgtcgtcgaggcggagggcgcggcgagcggcggccgttacccgccgttcgtctgccatttcctcgtcaacgcctccgacccaagaagatgtgcgtagggggccggatgcccgcctcagtatcgagcgccggcgcaatggtcgtcgtgctgcccacgcaacggaaggcgcttcctcgtccggagcgccacttcggtttgggcgcgggggccagccccccgtgcccccggttggtggtgtcggctgtcgagcctttgtggcgagccttcggaacgtccgttggcccccaaggttccggcccactatcaccgaaaaatatgacggaagtgtcaaccccgccgagtttctccaggtctacacgaccgggatcgaggccgccgggggtgacgacagggtcatggcgaatttcttccccatggacctgaagggacaggcgcggggttggctaatgaacttgccgcccgcgacggtccactcttgggaggatttgtgccagcagttcaccatgaacttccaaggcacatatccacgcccaggtgaagaagcggacttgcatgcggtacagcgaagggacgatgagtctcttcgctcgtacattcagcggttctgtcaagtccgcaacaccataccatgcatccctgcacacgcggtaatctacgcgttcaggcggggcgtgcggcacaaccgcatgctcgaaaagatcgcctccaaggagccccagaccaccgcggagctttttcagctcgcggaccgtgtggctcgcaaggaggaggcctggacctggaactccaccggttccggtgtggcagcttcggccgcccccggatccgctgctcggtcagagcggcgggacaggaggaggaaaaagaggtcggcccattccgacgacgagggtcacgtcctcgccgtcgagggcgcttcgcgggccacccgaaaggggaggcctgcgagcaacaaaaagaaggaggctggcgctcccagcagggagcgcccgaccggcaagtggtgcaccgtgcacaacacctccctccacgacctcgcggactgccgcgcggtcaaaagtttggctgagcggacgaggaagtgggaggaggagaggaggcaggagcgccgtgagggcaaggccccggcggctccctccggcaaccggcgaagtgaggccaagcaaaaggcccccgctgaggacatcgacgatggcgacgatgacctagggttccaggagcctggggccaccatcgccaccgtcgatgggggagcgtgcgctcacgcttctcgtcggagcctcaaggccatgaagcgagagcttctggccgcggcccctacccatgaggcgacgcggtggtcggaggttgccctcaccttcgaccagaccgaccacccgccgtgcgttgcccggggaggacagatcgcgatggtggtttcccccaccgtttgcaacgtaaagttggggcgtgtcctcatagacgggggtgcagccctcaacatcctttcccccgcagcctttgacaccatcaaggccccggggatggtgcttcggccgtcccagccgattatcggtgtgacgccggggcacacttggccgctaggtcatatcgacctcccggtcaccttcggtggatccgccaacttccgcacggagcgggtgaacttcgatgtggcggacctcagtctgccctacaacgcggtcctggggaggcccgcgttggtgaagttcatggcggcggtccactacgcctacctccagatgaagatgccgggccccggtggccccatctctgtccatggcgacctcaaagtcgcgcttgcttgtatggagcagcgcgcggaccacctcgccgccgcgtccaagcccgagggtggcaacgagaggctcagcacctccatcccagccgccccgaggcagcggatgatcacgtgcgacgaggtcccggtcaagaaggttgccctgggcgacggcccgtccaagaccacacgaatcggtggtcttctggacggcaaataggaagacgcgctcgtctccttcctgcgggcaaacgccgacgtcttcgcctggagaccggcggacatgcccggggtccccagggaggtgattgagcaccgtctcgccgtgcggccgggcgcaaggccggtccggcagaaagtgcggcggcaggccccggaacgtcaagccttcatccgcgaggaggtggcgcgacttctggaggccggattcatccgagaggttatccatccggagtggctggtgaacccggtcgtcgttcccaaggcgaacggcaagcttcggatgtgcatcgactacaccgaccttaacaaggcatgtcctaaggacccttaccccctgccacgcatagatcagattgtcgactccaccgcggggtgcgaccttttgtgttttctagatgcatactctggttatcatcagattcgcatcgctagggaggatgaggaaaaaactgctttcattacccccataggaacttattgttatacgacaatgcctttcgggttaaagaatgcaggtcctacttttcagcgtactactcgaatttctttgggtagccaaataggacgtaatgttgaggcctatgttgatgacttggttgtgaagacgcgcaaccaagagaccttactctcggatctagcggaaactttcgaaagtctccgctccgcccgcataaaactgaaccccgacaagtgcgtgttcggtgtgcctgcgggcaagcttctcgggttcttggtctctgcccgaggcatcgaggccaaccccgagaagatacgagctatagagcggatgcgccccccagcaagcttagggatgtgcaatgcgtcaccggctgcatggccgccctaagtcggttcatatcgaggctgggagagaaggcgctacccctatttaagctcctcaaacgctccgggccgtttatctggacggaggaggctgagcgggccttcactcagttgaaggcgtacctcagttctcccccagtcctggtcgccccggagccagatgagccgctgctactttacctagcggcaaccccgcaggtggtcagcgcggcgttggtcttggagcgcgacgaggacaaccctcactccgcgcatccccaccctgtgtcgactcgacccgggagagagcagggaggagaggcccccgagtcgaacggcggcccgaggcccccgacggccggagttggccctccgcccgcttgtccgacggtgccaggcacccccgacccccaggatggccccggggccactgcgggaaggccgcgcctgtcgccctccgaccccgaggtcgtcggcacagaagccgagtgcgccccgcgcggcctctcggacgaagagcgccctggagatgtggcccctagcgaagaagatcggccccgccgaaaggtgcagcggcccgtctgcttcgttagcgaggccctccgggacgctaagacccgataccctcaggcccagaagatgctttacgctattctgatggcttcgaggaagttgcgccattattttcaggcgcatcgggtcacggtggttacgtcttaccccttcggccaaatcttgcataaccgagagggtactggatgggtggtgaaatgggcaatcgaactctctgagttcgatttgcactttgaaccacgccacgcgatcaagagtcaggccctcgccgactttgtggcagagtggaccccggcccctgagcccatctccgtccccgaggccagctcgggcccctcgtagctgcctcacaccgcctactgggtgatgcagttcgacggctccctatctcttcagggcgccggtgcgggggtcacgttgacctcgccaaacggagacgtcctcagatatctggttcgcctcgactttcgggcgatcaataatatggcggagtacgagggactccttgcgggactcagggtggcagctggactggggatccgccgcctcctggtgttaggcgactcccagctggtcgttaactaggtctgtaaggagtaccggtgctctgacccgcagatggacgcttacgtgcgccaagtgcggcgtatggagcgccattttgatgggatagagcttcggcacgtgcctagacgggataacgcggtcgccgacgaactctcgaggctcgcttcctcgcaagcccagaccccaccgggcgcctttgaagaaaggcttgcccagccgtcggcgcggcccgaccccctaggggagacggacgcgcctgaacggcccctgaggcccgtcggagtccaggcctcgggacccgaggggagcgctcccagctcccttagattggttgcttggatcgctgagatccaggcatacctcacagataagactctacccgaggaccgcgaagggagtgaacgcgtccagcgcatctccaagcgctacgtgctggtggaagggaccctctatcggtgcacggctaacagagtcctcctgaagtgcattcctcggaaacaaggcgtcgagcttcttgccgatatccatgaaggcgagtgcggagcccactccgcctcacgcaccttggttggcaaggcctttcgccagggtttctattggccgacggctctcaacgatgcggttgacctggtccggcggtgcagggcgtgccagttccacgccaagcaaacccatcagccggcccaggccctgcagaccatacctctttcatggccgtttgctgtctgggggctcgatatcctgggtccgtttaggcgggccccgggcgggttcgagtatctgtatgtcgctgtcgacaagttcattaagtggcccgaggcttacccagtcatcaagatcgataagcactccgcgcttaaattcatcaggggcatcactgctcggtttggggtgcctaatcgtatcattacggataacggcacccagttcactagtgaactcttcggtgactactgcgaagatatgggcatcaagctctgcttcgcctctcccgcccaccccagaagcaatggccaagtggagcgcgccaacgcagaaatcctcaagggcctcaaaaccaaaaccttcaacatcctcaagaagcacggcgactcgtggatcgaggagttgccagcggtgctctgggcaaaccgaaccacgccaagccgagcaaccggggaaacgcctttcttcctcgtctacggcgcggaggcggttctcccatccgagctcaccctgaggtcccctcgggccaccatgtactgcgaggctgatcaagatcagcttcgcagagatgacctcgactacttggaagagcgaaggcggcgcgcggccctccgagccgcgcgctaccagcagagcctgcggcgctaccatcagcgccacgtccgggcccgatcactctgcgtcgacgacctcgtcctacgccgtgtccaaacgcgtgctggactgagcaagctctcaccaatatgggagggtccgtatcgagtgatcggcgtcccccggccgggctccgttcggctggccacgggcgacggcacagagctgcctaatccgtggaacatcgaacaccttcgtcgcttctacccctagtgggggtcgggtgtcaggtctcgggctcgggccaaccccgcgcccccccaggcgtgcagggttggccgggggctaccacatgcataaacttatatttttttctcttccgtatttcaataaaagcattttcgatttcctaaggactgtgtctgtgccattgtttcctttcgaagaatcttggcttgaattagcacgctcgtgctcgatcctgccctcggtggcccgggccggctaaaatcgccaaaaggggcccagaaccgagccgtgccccggggcgtggtgaactccgggggggaatcggcaaaggcccacaatcgggtcatccataaccctcggtcaccacattcccggcctggccagtctcgacacgtggatctccccaggcactagccccgacccgcgccatttgaggctaggacctaggcacgagcccttgtttaagctaagacacagagacacagaaggaccgtggcacagaccatcctcgtctcatacacacaacaaatgaaattgacacaaaaatttcctctttatttgattgcagattaaattagtttatacaagaagggggcccgaaggcctcagaagaagaaagaaaaagctatttaagattggcgggggcctgggggctcacgccgacgcgcccgggtcgccggcctcatcgtcgctgacgtccgcaccaccgtcaccgccctcctcgtcggagtcgagggcgaacgcgagccgaggggccgtaccctcgaagctgtggacgatgtggtcggcggcgtcccggacctgcgcgcgcgcgccatcctcggttccaagagggaactcgtccagcgctgcccacggggagaagtcagggtccctagcctggtagcttgccagtacgagctccaccgccccccctgcgaggtccctcgaggatgacttgatcgtctcctcgagctcctcggggagccgctggagggtcccggccatctctgagaggcgctgggcgaggcccccctggttggcggcgtatttcgcggtccgcccgccccagaggcccgcctgccgcccggcacggtctagacgggagacggcgtcccgaagcatgccgggccctacctcgcccgccaagcggagggcttcgacctccccggcggacgagtccagcgcgccctgcagctcggcgatggtgtgttcggcggctgcgaggcgggcggctaggtcgccgtcgcccgcggccgccccgccgctgcgcgctctcgcgtccagctccttcacccgcgcctcgaattcagcagcccgctgatccagtgcggccctctctgcgcgggcgccttccagattgaggcgcgcctgctcctcccgccgctgcgccgcggcctcggcctcctcgagagctcgctcccactcagtgagctcgtcctcacggaggcggagtgcggactcctcttcggcgcaggcggcctcgtgcgccgccagcgttgcctcccggatggcgacggcggcctcgcgacccgccagttccctctccttcgtgtccagggcgcgggcgcgctcctccagcaccgtggcgcgagcctcaagggcctcttcgcgctgccgggacgcgtcgagcttcttctctagctccgccgcccggctcccgtattggaggcagaggtcgtcctgcgccgcgttgaacacggcggtggcgatgagggcagtctcccgctcctcctccacctccctggcgatctccgccaggtccctacgacgggcctcgagctcggaggcgtgccggcggtgtgccttgcggcccgcctccaccatggcttccaccgagcgccgtccctcttcgacgcgcgcccacgccgcatcgacctccgcccgctctgcctgcaggacttccatctgggcgcttaacccgtccaacaccatggtgttcgcagcggccaaggcctgcaggaggggctctgcgctcagtggggcagcggaaggcagaggggagagccgcctcggtgtgggcgccgcgcggctcggcccgccgatcgacgtgccgaactcgggggcgtcccccgacgcgggctcgtcccgaacgtcgccagaggggtcgggcccgagcggcgcgcccgcggcctcgtcgtgggtggcctcggaagtcgttgtcgcctcgggcggagtcgggtcgggggcttggcaggccgcccggcgtgtgcgcgccgcctccgtctcccggacggactcctcggcccggcggagtctggcctcctcccaagcggcttcctcagcctggcgagcccggacggcctcctgggcagcttcttcggcttcccggaggcggtctgcggcttctcgccggtcagcttcccgcctccgggcctccgcggtcgccgtctcctcgacctcagaccggccggacttggaatggcgggaagggcgcgacgggatctcgctgaggcagaagaaaaaccagaagacgaaaaacgggtgagtgaaaacttgccttgggagatgggagaatgaatacggccgcagtgggcgcggggacgaacctgcgaggaggtcggctaaacgaccaccttggggggggagatgaggtttccccggcatggttcggtcccccccatcttgcggagccgcttcttttttcgctcctcctcgggctgcgacgtcggcacagcaccctccgggcgcctgctgctggcacgcaccgccccgccccctcggggaggagatggggagggggtatcctcctgtttcctcttcccccgggcgtcggcagggcggctgccccccgggcccccgtcacggggcccagaagcacgaccccctctcggggtagattgttcccccctgcggctcccgcccgcgccatcgtggcctcgaggagcccgctcccctgacgccccgaccgcctgcatgatggtcaggatgttggcgcgctctggatcgctgcagagggggaggacaccttgggggatgagggatgcctccacggagctgagattcagcacccgttggatcaccatcttgaagtcttcagggacccagtcccatttgaccccctggtgggtcctcatgtagtcctcggacccggtgtactcccaggcgccccgggcgcgccgctggagtggcgcgatccggcgatgaaggtaatcgccgtacaccatggtccccgtgagcccctgggatcgcagaccagccaggcggtcaagaacggcgtcgtagccgtctcccagatctaccggcgcccgccagctggaggcctgcgccgggggctggttcggaagtcggaggcgcgcttcgtcggcgagaggggtgtagaaccagtcgctcttccagtcgtcccacttcttgcgaaggacgcagggaatgtagcggttcagcaccggcccccgcggctggaagtagcagccaccgactaccgacggtggcgacaccggctgtacggtgaagaaccatcggaacagccggagagatgggcgcaccccgatgaacatctcgcacaggtgcgcgaagatggccaacgtcattaccgcgttgggggtgaggtgcgccatctggagatcataaagctccagaacatccatgaagaaagaagagaatggcgggaccagccctgccattgcaaaggaaaggaagaatacggaccgccccgggtagtgtggcgccgggcgtccctcacccagcgcgaccacctcccggccggtggcagattccggcatgaatcggcgcggcagcccggcctgcctctcgctcacgatgcgagaaggcggcagcatgctaccgtcgagcggtgcggagccccgtgccatgacgccagcggaggaggggcttgagagcgagtgagtgtggcgagggtagggcacaggaaacgagaagttagagcgcaagcggcgaaggcaaggggaataatggcgagaggaaggaaacgagtctcttcctcggcgtctttatacccttgccaacgctatgcccggctcctcgcttcccgggcccactatctcgccccctcgtttctcacgcccactcctccactaatcccgctcgcccgtttgcggtgcacgaggcggatgtgcggccgtggcagtcgagatgggacatatcgtgcgcgccgaccgatgcaccatcatcacatctccaggcgaaacgaaccggctcgtcccgattcgcgcgctgctcaagtaatgtagcggtcttgaagaaagccgctcattattgtcggtcggttttcccttgccgatgcgcgcaccactggattcctgcccgcctgtagagaccggccccgcctgtcaccaggcctaaggagtggcgtcacgcccgagcgctttcctcgaggagggcgatcgccctggcataacgccgggggctactgtcggtgacatgggaccgggggtatcttgactagaggtttggggcagctgcggtcacccacgtggcctgaccccctcgggggggtcgggcccgagggtgatgtggccgcccctccctctgtctccccgaggggttgggccgctcccgtttcggccccgagggctggggcgccccgaccccctgcgggtttggcgccacgtgtgtgggttaggtgagcacagcggcgctcacctaaccgcgtttattgcgggttggacgagcgccccacgccgcatttaatgcagcgcagcacactcgttcggtccgtgacaggtcatagtgtgtgaccggtcacagaccggtcagatcgcgggttgggtggcaacaggcggcctgtcacacgcctcgccccgtcccgtcagaatgatgagagcttcccggctctcgtccctagccggagccggcgtgctaactcctggagttggtacgtcagtcccggtcagatccattccaggcttcagcgcgagcatggcaaggaagtcgctggccattgaatgaaggttaaaatgggcgtccaccgggaaagctggcgagcggggcaggaggcgtgtgctctgcttgtcagaggtcacttccggctgtagactagccctcattgtaaaaagcatgtttcctttcttaggcagctagaggcccctgtggtgacccctgaccagataaaaaggaggcccaggcctaggaggagagggggactctggcggaggggttctggagcctgaactctctctcgctttcgagctctctgtattccttcacgcacagatccaccagaacacaggaatagggtgttacgcttctcagcggcccgaacctgtctacgtcgcccgtgtcttgtgcacttcctctctcgctgacgttcctcagatcgagggcgaagaacctcacttagcgcccccggccgaaccggcaaaggggggcctgcgcggtctcccggtgaggagccccacgctctgtcatccgtggtggtcagagatcatgcgggatacttaggctagagttgacgcacgtggttgatggagattccatatggcatacgatggaggtattgtgtgcgtatgggatgcggagttgaatttggaaggagtccaaatttggtatgattggttatgtaaagtttgtttcttgttctagagggtttcctaaggtgtttaggacttctagtatgagtttggttcgtggctttagactgcctatctcgggtataaatagagggggagtgtgaggcttcccggtatcgcttttgagagcaattgagttgagttttgagttagggtttcgagtttagtcgaaatttttgtaaggagtgatgtttgtgccctttgtaaacacagagagaatcaataaagtcgtcatccactttaagagttcttcaatttgtgtttcaccgggtttcggcggtctaaccggcgatataccggcggtcagaccggcggcatacgggcggtcagaccggcggcggcgatagcaagcggcagctgatctcggcagtcagaccgatcgatctacaccggtcagaccgacggggacaggcgctgtcagaccggcaggacaacttcggtcagaccgatcttcgtcgaattcgagggtaacttttatttccgctaaaagttttcggtttttgggtataccaaccattcacccctccctctggttggcttagttgttgtgattcgatcctacagtgacactcctatgggcaattaccttttgctagtgtctcgttattcttggggaaggacagtggcacattctcgtgaacttgcatatgttttcaatttgtcgatagaacaaagaaaaaggttgtatttgaactgataaattgtacttcaacatttgtaacatgttgataaataatatattccttagtctaccctataattcaacaaataatttcactcatctttcattctttcattcatcacttaatggtcgatatcatcttctgtgaaatccaacgcatcagaatcaactacgtagtacgcggggtcactaggcggaaaatcgcacacgcgggatcaccgctgggtttcctttccactttccttcgccctccgccaaatcgccagcgctcggtttcctttcccttttccttcgccctccggagggatcgccaaccgccgccctcgcacccccatggccccatcccgcgccgcccgccgccctttgctctccgcccttcgccaaacgccgccttgacttcgatccccctaaaccctggccaccgttgcccgcgttcaggtcgccgttcggaccccatcgcgccgcgtcgccacccggaccgcggccaggagatagagcagcggtagacgtgcggcgtcttcctccttaatccgtcacctcggtttcttagttcctcccaccatgcccctcccttccaaccctatctcctttaagcgccaagtcgccgcagcagcaacgaggttctcaacggggcatgttaaggtgatgtctcgtctattcctctgttcctaaatcctcaaacaaattaatatttgtgtgccaaatttgacttggatgttttgttgtttaatgtaaatctaaaaatgtttagcaggctctgcatgagatgagaggtcgactcaacgatggaggctgaaaataaagcttgatgttaagaacatggtagtcaatttgatggagttatatttacaaaggattatgcggaaaaagcatccgtacttcatttccttctgtgcaatgaaataaccaattgttctttatttcagccatttatgtatgggtttagtttgcgttggagccaagctgccagatcgtgtggtccctggtaaatctggagctttattttcatatctatttactctatgaacattgtcaaataactaactgaattatatgttttgcaagcatgctaaggaaccattaacctagcttatacggctggaatgtaattatatacatatagccaactgagtcatatgtggtcaaggaataaaaaagtaggaggaactaggaagagatgtcggtgctgtgttgatagtaaacatatgggtttgcccacttagtcaattcttctattgtgtgatttaagtaaagttaagtgaggaaaccatgcttagacatctctccccgtatggctgtatggctaatttgtttttaaaggcagtctgacggtaattgtacatttgtactgtcataaactcataatctatggcctgcagagacgcgtttgtgtcgcacacaagcatcccagtgcaaattaagacagcttatcatttcgatcgcttttaatttgacacctccttctgaaacttaattaattctcattagccagctataggatagatatagtaggtcgacacaaaacgatggagtatagtataactgcaatcagcaggttggattctatgatattactaaatggtgaaatactcaaaagtattggggctgtatcctgaaggaaaccatcctatttcatccaataaattagtttcgatatcttacaaatcgatctggttttgtcggtgtgtgtaaatggtgcatgtgcacgtatagcaaacatgagttggattactaatcttatatattgtcaattaggtaagtatagggacaaaaatctgtttaccagtggactggaaatctgtttgtcaaattcacttcaatttttcagtgcaaaatttatattttcagaccttttcttattttcttttcattccatatcaatgaaagtaatttatttttctgtccggggaaatttggtctcttaatcattcagcacttatcttcttgcaccgatcttataataaatcttctgcatccgatgtaatcacatttctgtcaagtcacattcgatacttattagatgctaataaactaaatctatatgtcaacagttacaggttgaatcaactaattttctgacagtagatgtgctgacgttcatatactgcagttgaatttaacttccaaatattactgccagcatccggcctcctcaacatcagatcagtgtttcaggtgtgtgtgtgtctcatttaaattagtcatcttttccggttcgaaattttcgctttgcaattggtatatatgtttacatcacaccctgaaatttctctaattcagaagaacatgtaaccatagtaagtataaaatttgcaagatatagatcttgatggcctggtgctgctaggtgtatgcattaattctgttgtgctggatgtagtttgcttgcctttaagattatatgattagttagatgtattttgttggcctactggatgtatgcattcagctcctgactcattcttgatttatttgtgcatgccggatccatggaagaatcggccactaaagtctaaactctgaaataaggtttttggtatatagtggcctatatattctgcacgtcatagatctttcatgtcacagtatttatgtaaaggttgattagtacacaagtacacataccttttttgttatcttgtagcatacaaagtttacacttaatcactacacaaaagcacttaagtataactttgtattatcttgcaagtcaccacactaaaccactaaaccactaaaccatcctatcaagagagagagagatagatagatagaggtggtgaggtgcggcaccgcttggatagatggaagctgtttcttttcctccgctaatcacacttggatactctggtttatggcaataatgagcaacagggcagccacgacatctgtaggagcataagaataaaaagcccagttaatcattgacgtttgtattcaacttatcgatgtctggtagtgctaatctccaaaacaatcaagatattttccatagccatatggatcataaatatgcatctgatccttttgcaatccctgaaatttctcttaaagaatcaattgcaaatcatgtattgtagttttctgaggtccgttggtccattgccaaatattagcaaatacgttatttagtcagagttatggtatccttgaaggttcaatgattggatttcctttattcatgcatcaggaatttgtgttggatgatcaaattgcagaatttttatgccctagatctatatactttttaatgagagagttgtatggtctattaggagtgaagatcaattcagtttctatcctagattgagcagagttaacatggtccatttttttatcataaattcatgttttcctgtctaatattttttttgctaccaactgcatattcaaatcaactgtaatttgattgcaccatgaactgcatagcattagcatgatccaatctaatctatggcctctaacatggtttagtgcaatctgtcatgaccttctgcttggtttcatgtgcttgacatgttctcctcagattgaaggaaaaaacgcatgtcctcccactaggagtggttagtggttcattcttgaggtatatactactcatcctcttgcatatgttagctttatagttcacatgttagggtggaatgggatcctttgcctgttcactggacgaaccactttggaatgttcataatcactgtttcctttttgtttgaatcatatatacatcccattatatgtttaattgtcaaaacatagatcatcttttgactgttttgcattaacaaataatgccataataccgttagcacgggcatgttactatcataattcaccaactagcagcatgatgttttgaacatctttaagaaatgatttatttataaattgattctgtccctcttatttataaatgatttatttccctgagtatgtattttctcgaaaaaaaccaaatgattcattttcctaagtatagtttggccttgatttactgtttgcccatttcaggttatctttctttttagcttagccctgataagtcgcacaaaactttctctaaattattttggcctcattcctaatggctacataaccatcattgaaaaaagtgtatgtgatatgtggatttgggtgatcttaccatcctgttggctttttacatggcatgagcgatagtgtgtaaataaaatcatttagtactctgtaagaatttatgttgcttgttcatctccgaatgggcatgtataacattgtcatcttacataaatactatgatttttaacattcattgtttagaagaagaaattacaaattcgaatcctactgactactgtcatttgattttgtatagcataccagaagaaacacgtgcggtaccacgtgattatcactggcttaactctttatgtaattttttgcttgaaccttaatcccaccccttctatggggaaatgtaatgcctttaaaatatcaaatgtcactatgacgttatatctttttcaatttgagttatcaattgtc

SEQ ID NO: 9385 - DNA, 5939 bp, Oryza sativa
tgcttagagagaggagatatgagttgtccatgtacttatattatcgatagaattaactattcctattatgtaacggtacgagttctctacgaaatcaaataatataattaattgtataattaacaaattaatgaaatattatacaagtttgtctataaattatctaaataatgtgacatggaaaacttatacagtcaactgttatttaaataactagtcttatatatacgcatatattataatttgtctctcgcactactatgcaaatttttttcacatacaggtgtatggcttgcctctaacaaaatacctatcaaaaccatttttcataagcaagtgcttaagacacatgcaagtagaagatatgtttttggcagaaaagaaatgattctcatagatgtcgattggtgatatgggcccgggggaatcagggccatagggaggaggctgccccacatagccacatggccctccccccgaggggggtcgggcaagaggcggggtagcggccgccctctatgtgcccgggggccgggctaccctgaccccctcaacacggtgccgcgttagacgggcgctcccagtgcccacctaaccgcatttaagacggtttgagcaagcgcaccatgctgcattaaatgcggcacgtggtgcacttgactgatctgtgaccagtcgaatgaccgatgtagccggggtagtgcgcttgcgcactggctccatgtcaggcggcgtgccgtctgacaccccctgtcacgttgtgatgatgagaggctaactgccggagacggtttgcctaacccagtcagggtagggtttccatttcccagcgtaactgaggacccaaaagtcttcattcattaaatgccgaatgacgggatggcccgcacaccctaactacataggacatttacttgtcttatgctccctccttctcaaaataaatataacttgtatgtgatatgacatatctttagtactacaaatttgaatgtctctatctagatcgtagttgtaggatgtattacattcactgttagttttgttatattctaggacggggagtacaatacaagaatttttaaagggtgctatccgtattgtggagcccactagtaggatcttattatggattaatttaatattgaccaaaaatgccatatcaatcacaatccactgttgtaggtgctatatatatactccatgtgtagatatgtactcctgttcggctcattgcatatggttggctacctaccgatcgacaaccgaaagacttgctacagtatagctagcaaaagctatgtaggaggttaggaacatgcatctagcaagctagctagctatagccctcgcagcagttgaattgtatgcgcagatgcaatggccaatgttccgaatccatccagatgcttcatccgtttttagacaagatttgacagacacatgatacgtgcgtttccaaattaaagaagtgcgcatggcatatattctgagatatctcaaaggagtgcttcagatatgtaaagctcaacacattctgaacaccatgcatccattttcttttttatatatgcatgatgatattttactactacctctgtcccataaaaattacatttctagctaatttaggataaaatagtaggattagaaaatgaccacaataaccttatttaatgaacccactgcatgcatacattccatatatacaaatgattaaaatgaagtttgagagaattaacccatataattagtatacttaataaaattacaagcattagcagtccaaattatgtgggatggaaggaaacttatatagatgaatcaattggttggaccccacatggctagaaatacaatttttgtgggataaagccttagagctagaaaagcaatttttatgggacggagggagcagtagtttagttctccatccatccattggtaaatatacgtaaacatcaaactaaatttcttgcttgaatatatatggtagaagattacatgcacttaattactaattagcatcgcgtccctgaattacatataatgcatatatacttcagatagtgagcacgcatgcgtgcaatatatatgtgcttattataattaaggcctataactatatatgttgcgtaaattaagtaggccatgtacacacactcatgcatgtgttattccgattcagatcatacatgggataattaatgctgactgctagctagctagcttgctagttcgatccatggattagcatgccgtcgctgttggatcgatcggtgtagcttaattagttaattaattactaattatttattattcgttgttttgggtgattgactggcccttgagagcctcaagctgtgccttgcccttggggccattcttcctgacgtacaccctgtactcgtcgaaggtcatcggacggtagtagagcgacggccgctccggcgtcaccagctccggcgccggcgccaccgggacgtcgcctctcgggttgtagaagagtgcgagcgagatgcgctcctcctcggcgttcacgatcacgcggtgctccacgctcttgtacatcgagttgctcaagatctgtacgtcgtccgtccatgaattccatccatgcacagtacaagaagatattagttcctgagaaattaaaatagaagaacagcttgaaacattattgatgcaactagctagctagctagagtactatagcaacgcaagctgtatatatgtgtgtattttgtacgtagctagctagctagccagatacatacgaccatattcatgcttatgctcatatatcaatgcacatgcatcatggaatattgatatatactcgtatatggattcgttggccatgcattgagtgcagttgggtacttgggcggttcgtggtatgattcgccgtaacatgcacatgtctgtccgaggtagagagtagtaagcttcaaaccgacgcacagaaaactcgtatgcatttatggagctagcgatcgatcacaatccgcgcattttctgcatggttggggctcatcaccgtccatgcatgtgtgctctcatgccgcgtaacctgcgcgaaagatcgccgcatagatcgatcgagctagccggccgccactagctagtcaactctaatttattcctgatcatcatttgactcgaacttaactaattaatcatgagtaattcttaatcccaggtcatggaaaagccacgatagtgattattgctctttgattaattaattatataagtcctacatatatgtgtacctcaatctggtcgccgacgttgacgatgaaggcgtcggggaggggctgcacggtgacccagtggccgtcacggcggcgtacctggaggccgcgaacgtggtcgtcggcgaggaggacggtgaggatgccgggatcggagtgggcggagaggcccagcgtgaggtccggctgcgggcaccgcgggtagtagttggcgcgcaggcccgcgccgcagtccgccccaccgaacgcctcctggaaccgcgtctcgtccagccccaggctcgctgacagcaacctcatcagccgctcgcacagcttgatcacctctctcccgtactcctcggacacctccctgcacgcagtaataattagttgattaataagctgcttaggttaatttcagttggcatacttataatgcgctaaacctaatatggcacgtactacgtactcagtagacacgactaccaatataatataatcttttagtttgtccataaatataaaagttttatcatcctaagacatatatagctacttagtttatttttcccctatgaacttttgcactagtttatttattcatatcacattttatactatagtttgttctttcgttactcgtttatgtgttttttctttaaaaaaatattatccattatatttatgaacggaggtagtaagttgagaagataataaaaaaatatgaggcaacatctacataatggttgtgcgacggttctatattgtggttgtacaaccatagcagctgcagctgccatcaatatagatcttctttatatttttactgtatcagtgggctgcaaattagcgatattgaacatatccataaactacaaggaagaaagaaaaggtggtagtggatatgttgagaagaaatgtataaaataataattgtgattgtgaacgtttagctgataatatatgttgtggagaaaataaaagaaagtcgtcaccctattaattgaactatctctaaaccacacaaaatggaaagtgactatagtactagaaattttacagtgcccgccctagtaagctgggaaattttgttttagcggtgaagtgagactgggccggtcaagagtgaggactaggacattttacatatgtacagtggatgcattcttgtgtcttgcatgctttggactagtatgcatcacactcttgctagctggatggaacttttgcatgaaagcacccttcacctacttttcgttgcatgcacgtgttggatttcatgaactgagaaattaaggtgagtcagatgaacgtacccctgtcccttttctacaacaattttcatgctgctaataagttttagatcggcctactctacctatatgtatgtattacgtctacccatgccaaacacagtcaagacacacctatataaatagcaagtactgcatcttctactacagtgcaagtagagaaaaaggtacaacaatcatagaacgaaaaggaaatcaacggatgctccaggcagttaagttactctgttcatgacaatcagtacactgttctcaggtaaaagctgaccgaatggatgttgatttatgtatgcagtacgatagtaaattaaatatgtactgtaccgttagttttttagcgtgtgaactgttcaattttgtcatatttttaattaatgaatgccatgcttctaattaattttggcgtgtggagtagtacttattattagtacatcactaatcaaagatgccattattaatgttctaatagataaataaatgaataatatctaaaccctaatgaaactaaaggtatgtttggtttgtcgaaaaaaaagtgacggaattttggccaaacaagctcctatatatatatatatatatatcatcacgaccacaccggtataaaaagttgatagggttgatctggtaagatttattagcaaaaaataaatgtgccctaaattttgttagaatcagtgtataatgaacgtatacacagaacatatatatatggagcaaaatgaacgttctcgccttaccaaacaatttaaattacggcaggccgtacactaatttaaataattctgagatgcacattatggaaatttataaattcagtgtaacagtcaaatatatatgcacgatttgatcagtactcccacccttttgaaaaagaaattcgacgtaccaagaacgcacaagaacctctgcaggtaaaacatgcatgcacatgggcaaagctaaatgagaaatatctctcgaaggaaaaaaggcgaatatgcaggtacagtacttgcaaagagatcgaggtgatctaagctagtgcttacttgcagatgccgggattggccggccagtatttggccgggctcttggcggcgtccggcgagaggacgaggaagtagtagtctccccagtcgaggatggcgcccttctcgacgccaagccggctgccgtacccctcgtacgtccgcggcgagttggcgtacttctgcttctcctggagcggcaggcggaagaagccgtgccacgcctcccgcgccgcgcgcatcagctccggccgcaccccgtggtttaccacctggaagaagccccagccccggcacgccgccgccacggcctccgcgagctggccgccctcgtcgtcgccgccgttgccgaggtcgaccaccggaatgctggcgcc

SEQ ID NO: 9386 - DNA, 6486 bp, Oryza sativa
tcagcttaagcagcagttgagttttgcgcatcagtattcaatggtccaatatctccaaactcaaaggtatcatcaacagaactctcagggaaaggctctatgctataaccttccttcagatatttgtcgctactgtttttcatattcttttcaatgctatcatccagtttggcattgtctgtgatatcgtgtacaagtccaggacctaaagacaacaaacatttacagtaaacctaatgaagcaagcagcaaatgatctttatacaggataagaagatgactggaattaaattgcaaattcacacaaacgttggtaaacaaacaacagttcagcaagactgataataaaataggtttggcctttctttgttaaaaaatgtctcctcaaatgtgcatttttaaatccagattcatttcatttctgtagtgttaccaaaaccaagttacatattatattgaagagcagaagaaaattttcaattcttctaatatacagagaaaacccatgtgaagcataatcgtataacagcagtaatgtttctggaagaggttaccactaaaatgcaccatttttttttagctctgtgcatatttaacagcaaatttcagtttacaacagtaacaaaacatctctcattcagcattgtctgcaccactcatacacaattcaagttgaattggatcccaacaccaattatagttgaaatttgaattggaccaccatttccacaaacacaattcaattctttttttttttgggataactacacaattcaattctggcatccaaacggtgcctaacagtatccaaactctttaatgctgtaattcaaccctgttctcccacttcaataaataaattcataatatcttcatcggagcaaagagggttaatgttgaaaattagtacaaatactgtatttagtggagtactaatattgaagggtgaaatcaagcagaaagtttaagatttcagaagtacttacttgtaaaagcatctgcatcaaccctagtaccaaatgaactgagcatttgaagctccttctccactacactcagctccgatcgctcatctccttccccagaatctcttggcaaatgacactcaagcacaacatccgcagggtgcttcaactgaaacccatccatgccacactcatcaagtatctctgtctggtcatcaatgatctggtacctcccatagacagtggagctagaatccttcaccacctctagccccccgttcttcagtccctcaccacagcatccgcagagcggtgatgaacatgtgtacacctcagcacatccctcacagccgtcattgccaacatgttcatgacggtggtcatcaccggcactaagcactcccatctctatcctccctgagccatcgtggacaccaagaacaaacttgtcctcctctttgtcttctccattgtcgtcgtccagctccgacttgctatggaagagatggtcgtcgtaaagccaaccttcttggaaaaagaagtcggtggcgtcgtactgacgcgctgtgccaaactccatctccgatgacgacgtgtccgagtgccgcggcgaccagactccatatggattcagcatccctaatctcacaaacaaaatatatcaaatttaggaccaaaatcgtgacttaaacacccacaaatccgcaaattagaacactcaactatactgagaaatcagaatttaacgacaagcagtatcattggtgtacaaaacccaggggaaggggtttaaccagcaccctactagatcaaaagatcacaattttcctccatgaacatatgcacagagatatgctggctttgatccagcaggttcgaattggacccaaagccaaccatagccgccaaaaacatcggcgcacagatcgagatttcgcgcgacataactgacgacctcggaaaacgagaagatatgggtttaacgctgagagatgatgaaaaaaaaaaattcagccttgtgccctgatcccctaactacctgagggcgaggagcgcatgctgacgaaggcagaggacgacgccgagtcagagctggagccagggcttgcaggcggcgccgccggcgccccaccgcctccggacgtggacgccggcaaccggaggggcgggagctggggatctaatgcggcatcggaatcggagccggcgtccccggcggcggacgcggcgcgggcgaggacgtcgtcgcggagcgcggaggcggcgcccgcgaacccgtggtcggtgaggaacgccatgacctcgtccaggcccggcgccgccatgcggttggcggcccctctcaagcgcgtggcgcgccgcgtgaggtaagctgttgcgtcggcattgggacttggaagcgaagcgaggcgaaggcgagaggcgagaagccttccttggtctgcgctgcgagtgacggagggaggacgagagcgaggactggaaggaagcttggaagaagcacaaaagaagtcagaagaaagagagagagagagaagagaaaagcatatgcgcacaaaaactttccgttgattgcgctcagaccctccagtaactctgatattacattttacggcttcgagattttcttctttccaaatacaaacagtccagtcgatgtctcgtgttctcaaaaaaaaaaaaaaaaaaaaaaaaaacagaggagagtcgatgtctcgttgacacgtataggtcataatggaatcttgaattataaactgcgtctatatcaagcggtagatcttaggtccaaccgtggaagagatcagaacctatgacaaccgttgcttgtgtttaaaaggacacaagttgctcaaatcgaattgttgacgactaatgtatttggatttcggagttttgaaacacatgctataatgaacttaaccattgtagtagtactatagtactagtacttctttatgttcaacatggtacttagaaattcttacttcttactagggtgcaatttaggtctgtttagaacggggaaaaataactttctcctgcaaaaactgaactggctgtggcaaattaatgtgaatccttgattttttaagattgttttttaatcttttaaaatttaaaaataaagccctaaaagcttatgaaatttgaacatttttccacgcaacttaaactagtgtgcaatgacaatattgtcacaccagtaaaaagtgatggcatgacaaaaattttaacgtggcagataatgttatcacaccaacggctcatggtgtggtaatattgtcttgccatgccattctaacttgtcatttagtaagttttggatgtatcttccttttttttctactcatagaataggcaaatcaatgggctgatatgcatctctgactactgatggcgtgataatattgttctgccacaccattataacttgtcatttcaataagttttggatgaaccctccttttttctatgatcagaatatataaagagtgggattcatggcatgacaatattgcccggtcacaccaatctaacttgacaataacttcttgtttcggcaagttttggatgaacctttccttgtctctgcgagcgaaatagataaccaaggagctaatatgtgtctttaccaatagttcatgacgtgataatattatctgccacaccaatttaagtcgccttaccttctctctctcttttttctctacaagcggaatagggcaaaccgaggagctaatatacataaccatttttgttttttttttccacgggcagaataggataaccgagggctggtatgcatgttttgccccctaatataacatgtacgccgtgttaaggtctgtggcccttggggagctagggatgtgcctcccttttggggttttttggctccagaaggagggaaaaagcgcgaggagccgtgggtcctctcccggtgggcctctcgctgtaacctgcagaccgaggcagggcagagagcagagccaactgatgtggagacccctcccggacgccacatggcggggccgccccccatcctcggagccgctgcccgtgttgcttgcaccgctctcctcgcctcgctgccgtcgcttcccgcgccgtgccggtgctccgatctcatccaccaccacaacggcatcacccctcctgctcgcgtccaccgtggtcgggcggatggcgcgaaaattattaaccggctcggtgtccaccccaccccattcaccgctcgccagtgaaggctggacccgggcgcccgtccgtccccacctctgccgcccgttgcaccgcaccaccaacccaccccacccaacccaacccggggcgcgtcgcctcgccaccttttccgcgatttgctcgcggtggccatcgagaaatcgcgtgccaccccgcgcgcgcgcggagccgcggggtgggctgatgcatgcatggcgtgagcgccccgcgcgacgggtttggactttggactgtgacgcggccgatggcgagtgggacggggaatcgccaggtcggtactcggtaggtaggtgagccgggtgcagcattggtttctgctgccaccgcgcgcacctagcccaggccgtggggatgtccccgtcccctttgtcttcaaggccgtgactgccggctccggttgcctggttggtaggagtaaacgagcactccgtaccgtgcactactgcgctgcatgtatgcttcctgctggttttatatacaagttgctcctaaatatgcggtactggcatgatgatgattatatagtgctggtacttgttttcttcccaagagatgccgatgcaatttttggtttgtagcagcatatgccaactgttacgttcttgtctgcgtgatggtacgatatcactctgtgactaggattattacatggggcgtgaccacatatacagtgcaagcaagcaagcgtgggtgagctctaccgtgcagacgagtgatcataattctaatagagctctcgtctaatgatgacattagccattgctgggtggtaaagcaagaagcggatgagcaagcataatcatgacggctgaattctataggcctgtagttcatcttgggttatcaatcaaccaactttcagttcgcttagaggagtaaaattagaagcgcgtgaatatactgaataacaaccgcagtaaccaaggcctattaataaacaccggggctacaaaaacaggtcaccgaacaaagtttaattcaagaagtataatcaacacgatgatcgtcgtctcgagggtgttaggcgcaccttcttcagacaggacacccgaaagatcatcagagcccgtggtcggcggtagttgcggaaaaggtcattttcttctgatcagcgattcaggaaaagttagccctccctgatgtggatctcaatcaagcagcagaccgtgcgtcacaagattgataattgtactagaacggcactgaacgactgaagaaaacccagacaaagataaccaactctaacttaatttgatccaagaaaaggttggtgatatgcctaatgactaattgagcaataacaatgggcgcaccattgattattccaggctatttaagcgattcacatttcgcgctcgctgtcactaggagtgttacctgcctaaggggcagtgagcagtgaagagagaggactgtgctgcacagttattcatgcacagtctgtgcatgaataacttcatcttaaaaagttcgtaggcaatcaataatgtaatgtgatccggaacttttgcttaatcagtgtgcctacctttatgtcatctaagtaccttttggtggcaaaagataatctattcccgagtgcatgaaaatgtgaaccgatattaacttggtcccgaatcatatcatctctttgcagtacgtaggttcacgatcttaggttctcgagccatcagacagcacgggactcttgctgagagaggaagtgcaccttttggtggctcaaattaaacattacttgaccagccgatgcctattcctctcatttttttctgccggtttatcaagttaatttggtgaggttttggttggtttcgaagggaaatccggggtggcgtgatgtgtaatctactccttttgcttattgcacggctcatgtcgctttaggtcctgtttatttggagaggacaaaagacagagatagagagagaactgaaagagcagaaaagtatgcaaaataaatgtatgtaagttacaccgaaactagtatcttttttacattcgcctcctgatgttgatgtcttctacttttactttatgatgatgtcgtttttattctttatttttatgatttaaaatagacaactaaagccaaaaaaggttcaaatgtcatcctcctcgctatatcattgggcttgtagagacaaacgtgggccaatgctgccctggtcggtacaccctttctcttttggtaaaaaataaattagttttattattttacattacagtcccatgttaatattagtagtagctcataatttaagtagataaagcattt

SEQ ID NO: 9387 - DNA, 14435 bp, Oryza sativa
tgtggactcacagtgcttgtacaacagttgatcgttgttctttgtatacagacaaaactcctagttccatccagtccttatgtgattgttatgttcttttaggtgagaagttttctgaaattgtgggaagcccatattacatggctccagaggtattgaagagaaactatggtccggaaatagatatttggagtgcaggagttatcttgtatattttgttatgtggagttcctccattttgggctggtatgttgcttttcttttaaaaccttcgctatcattggctgtcatctccctcaaacaatctcgcctggaattttttcagagactgagcaaggggtggcacaagccattcttcgtggaaatatcgatttcaaacgcgaaccctggccaaatgtttcagaaaatgctaaagatttggttcgacgcatgttggagcctgatccaaaactcaggttaactgcaaagcaagttcttggtacgttttacatagcactacaaaaaaatagacacctgatattctacttgcgtgcatcataccataaaatatcaaattcaatgatcattcaaacttgattatattttctgttctttccagcattatagcattgtgatggaatctgattcgatattactagttctccatttcttgggatcactagccatacataaattaatcattgtctaatataggcaacatataccatatattgtcttttaacgacatggtattttcgtttgtgaattaggatctagagcattaaaaaggtcactacttacattaattagtataaataacttgttaacttttgttattttcctttttttcttggggaatcttgatatcctttcttttttaccacagaacatccatggcttcaaaatgctaagaaagctccaaatgttcctcttggagatattgtgaagtcaaggctcaaacaattttctagaatgaatagattcaaaagaagagcactaagggtctgtatcttgctctcttaacctttccatcttgttccgatgctttccaccaagtatctaccatgtcaatctactgttgagtgacaaaaacttatgttgggtatctgactaggtcattgccgatcatttatctgctgaggaagttgaggacataaaggagatgttcaaggctatggacactgataacgatggcattgtatcttatgaagaattaaagagcgggatagcaaaatttggttctcatctggcagaatcggaagtgcagatgcttatcgaagctgtaagtgttttcagatattcagccacaaatttgtggattttcaaagtcactgatctgtgcatccttcatttagtaggccatgatataggcccctctgatatcccacaatagcacaagtacccatctgagtcaaacatgctctgggaggtctatatgactatatatgtctatatggtccaattccttcacatatagcagtttcaaggatgcacacgggactatataggaggaactagatgttagggggcttctaacttagaaacctcaactgctgcatctatttgttttatatacatggtacacatgatcttttcaatgagatcgacaatttttgcatgaccatgttttctgtcggtccattgccccagttttcatgctaacctattgcttacgtgtaaaatatgtattgattttgttctgttattcacgatatatttttagaattagagtacatgtcaatggccaatggagtattgcatcaatgtgtttccttccagaataagactgaaaatttgcaatggatatttattctagttcaccacttgttctaggttcatgtaactggtatccttctagctgacaaaagctaggataaaagcatttggggtgcatgatttctacatcatattcgagtattttgtctgttccatcttcactagtgttattaatggcttgttagtgttgcttaggtgtaggagctgaacctgcacttgtagattgtaggactaggaaactagctggtacgatttgattgtagtacaattatttgctgggataaatatatttttcttctcattttttaagcaataggagtggttttacttttcaccatatgtgtatcaagaaacttatgtgtagtaagtagccttgtgaagtaacagaacggtagggcaaatagaatgaagtattgcatcttgttttgatgtgcacaatgaaagttacctaaccttcatatagaaccaccattctggcagttccatttcggggcttaagaccctttggaaccatatcatcacttgagttatgtgtttcctttggtggatcgtgtttgatgatggatccgcatggtccacggcatcacctgtggagctgtcttgatcgagtaaatggttaatatattactactacaatataacgcaaggaacaaagtagtgtgcagggagaagcatattcatagaagtgggatagattactgaattcacgactaacactcacttttgtagatgtattatggttatcgttaatcagatagttcgtatagtactagactactttgcaagtctttaattgatcatgtgttttgcaaataggtggatacaaatggtaaggatgctctagattatggtgaatttttggctgtctctcttcatttgcaaaggatggcaaatgatgagcacctccggcgagccttcctattttttgacaaggatggcaatggctacatagagcctgaagagcttcgagaggctctagtggacgatggagcaggtgacagcatggaagtggtgaacgacatattgcaagaagttgacactgataaggtgatgatatttctgaatacaaccattcttttggtaatatcgttcaaaacttttttttatctaaataacatatgttttcttttcactgcaggatggcaagattagctatgacgaatttgtagcaatgatgaagacgggcacagattggagaaaggcgtcccggcattactctagaggaagattcaacagccttagcatgaagcttataaaggatgggtccgtaaaactggtcaatgagtgaaggcctaagggtgataattttatgcgtgtagtttaggcctttgggctcgctaagcagaaaccctttctccttttcttctcatgattattttgcgtggaaatttagataggtggaacctcccgattggcttacctgtgtaattagctcatctgacaagcacgcgccgaatgatataccaaatgctgtgcgcctgcttagccctcgtggccttgttcctatggggtacctgatgccaagtgttgtacaatgttttgccgtgttcaaatgcaatttgttcatttggggtgctatctagcctgtcgcaaaattcaatgtgctcgtggaggcatcgagtgcgtgctatcgactgaacgaaagttacgaggcagtgttcatctagtacaccaggtactaatatcgaattctgttctatctgcccccaagttgttctgacccgcgatgctttcgtaatcaagaagtctgagatcgatgccgctcgaattcaaccacgcgccggaatttttcccgtggtaatgctacatcatcagaaatgcatcactgctggagagcaccaccgggcgcatcaaccgtggagcataattaagataaggttaatgctgccaaattcagggaacaagattaaaccaggacgaacacggctctattattttaataggcaccctctaaaccccacggtcaaacctagcaacaggtgatgacgcatcgatcccaaattcccaattcgatctcttgctgctccatccgccggaataaaaacgcaaaatcctcgtgcgcgggtggcccttcctttccaccagggcataacgtgtcttcgttttcgcttctcccaaacaaaagcgaaatcaaatcaactgcctgcattgccttgtggcgctggttccgccgcctaattgcacagtcgcaccgcatcccatgccaagtatcgtggaatgcccgcgcagcacatacgccgtcgtcagaaaagcggccgcgaagccgtcaattcggtcgctgtaggctgtagcagtggcacggtcagcccccatcacgacgaacccacagtcccacacgcgggccactgtcacagtcactccactgcactccactccgccgagcagcgcgggccgatgtcacggtcgaatcatcagcgggaaagcgggagcccgcgacgtgcacgtagcacgaccggggcctcggccgtggcccaacaacgcaagcgcggaagcgggtggcgccgagaccgacacgcgaggagaggaggccgagagatcgacagccgtccatgcggcgggccgtcaaatctgtccgttgcacgcagctaggagtactagcatactatacctgtcggcagatatcgcgctcgtgcgcatttccgttcccacccgcggctggctgcgccgcaatcgcgccgtgccgccgcacaccctgctgcccctcggtgtgctctgcaccacccgtgaagccaaaaaggccaaagccaaagccaaagccacggggcgcagcgaatatctaatacacgtttcggcgtttcgctcgatcggtactagtaccggggggaatattatatctgattacgtttcggcgcgtttcgctctggtcgagctgcggcggaggcggacgtctgacggcctccggatgtgacgtgataaaacgaaggcgtactccgtggtggaaagccgtggtggaggttaacccgtgggcatgcatgccgacaacgagcggtttcgattggacaccatgtggcggcacggccgggccggcctgatcctcccctgtgcgatgtgcaagcggccgggcggtgtttttgcccgggcgggtgtctatccgaatactacatttacgtattgattgatgggggacacgcagtcgaaacgtggtaggccaggacgacggtcgctggctacgcccctttaaatcatatgattattgagaaaacgtaggatgattttgatgagaatatagatgtaaaatagaagattgtagaacgcagaaaaacacaagaataaccgtttgattgaaccgttgaaaaaacacaagaattgaataagagatagatgcaggaattggttgaagttcttgctaaatttcctctaaaatttctataggacagtctattccatatgaatattaaaggattggatatggttcaatcctttgttttaaatggcttcataggaaattttcctatatgattaaaatcctctaaaatttctatatttttcctccaaatcaaatgggccctacaatttgtagtaaaatttaatacaaaaaattcaaaatttatataactagttagatacagtaaaaccgttcactaccgaagaaaaaaaattgtaatcgagacattattttattatttctaagaaaaagggaaagagaaattttgaaacaacaagattaccgatagtgtgagccgcatctaaccctcatttcccaagcgcagctcaccagcgaggcgatgcacaatctatgaggaagaagatccattcaccttcactccacaatggctcaatcgatgctttttattaaactcgtgtacttgaatccaccctcttgcactgtcgattgtgctcagtaccatcgaaaccgccgttgtcacctcctatagctaggcttagcactttggatgcggatccaggggagatagtgtggctaggtccaattcaaaccagactcaaacggggtagatgcaactggcaccagaggcaatattactttatttagagtgaaatgtaatttggactatattttatcgtccaattttcactttggatcacccttgaatcaatcttttcactttggattggataactttgtaattttgtttttggtttggaccactccaaacaacttcaacattcatcagcatcctcaatcaaatcggttttgatacactagtaaacttcctgtcaatatgcaggccatatcttcaccagaataaagggtatgtgtgaatagtaaagagagttagatgatccaaactgaaaaaaataacaaagttatccggtctaaagtaaaaagattggtttaaggttgatccaaagcgaaactttgacaataaaaggtgacacaaactgtagtttactctcctttttaaattctcccccctttttacccaaaacgatacaataatatcttcattttcttcaatcaatcacatattttttttaagtgtccttcaatattgacacgttcttgcggtattctccagccaattacacatatttttaatatcaagtagcaaccttaccaaaaaaaaacaaagtaagcgagaccagcttaggcggcgttcgacttgctcaataggtttggctgacctggacacgcaaaaggaggcgatcattatctagtgattaattaaatattagcttaaaagatagatttatttattttataaagaaacttatgtataaaaaaaatttatacgaaatacatcgttcgacagttcggatcggaatcgtgcttaccgcaaatacaaagtagcacaatccttaagttagtagcctttggtctgagtgtccaatggatatcaccacgagattgatttccgaccgtaggattgccaagatctattcgatggtatgccactatgcaacaatctttcttcgtaggaacacaatttagcggcggagccagggcccggctagctagcctcggcaggtgcccgggctccgcaggatgtagccgtactatgaagtagttctaatggatgtgagatcagtggatcagcacatttactagcaaaatgactagctataagtacatataatgtctagtactccctccgtcccataatataatggattttgggtggatgtggaatggaggaagtattcaacattaacaattaacgagtttcatttcatcgatataatttcgcacatttgttatcttcttcataaattagaattcgatctatgctaaatcgtgcacgtgtttgtatgaatttaattgtagtttttctctattattagatttgctcaggttagaaaaatttagggataattgcaaatatgccactgatttcaacccctaactcggaaaagccattataaatacccaaactgcaaattagccaccaaagttagttcccgttactttcgtttgccatcgccacctgaattggtacaattaaaaggccaaaaataattcataaaactaacttaaaagataagaagcatgacaagaccatcttgcccctaaccggaaaagatcctcgctggctcgccgccctctcacttgcaggcatgtgggcgaatggggatggacaatcgatgggagggcgcgctgacgggcggcgtgtcggcggacgacgggaggacatgtggccaggcggacagcggacggcgaccagcgtgcatgtcggcggtggttggagtccttgcgacgacgggcaacggggtagggaaaatctcaccttttttgggtaatcttgccggaggtgcgaggaagtcgacggcagccgccgcaatagcagcagcagcacgttgcaacggaagcagcaacgctcgcggctgcagcacgagcacgcggcagcagcagctcactacaggcctgcagcgagagcagcagctgcaacaactccctacgatagcagcagcaagccagcaaggtggtagggctgcagcaagagcagcaacaatggcgggcgcccagagacggcagcagcagggaggggcatccttgtcctattttttgtgagaacccatcttttaacggtgttattcccagccgtgaatctaatggcaagtatcatgggttccaatcgttttttatggcaagcatgcaattacgttttttataatggcaaattcacaataccgattcaaatcagtggcaaatatgcaattggcccaaaaatttatagatctgccactaaacacaacaatacactcgtacgtaccaaaagtacgacaagcattcttctccagctgctgcctgcctcacacattgcctgccgctgcttttctgtttcacgctttatcccccaaaccttttgtccttctcatcatcgttcattaagagcccacacctcattgcggccatgcatcatgcatgcatatgaagttgccccatgcagtgaccaccatataatataagtcggcacttggcacttgcagttggctgtccaaattaagctccctaccacacatgtacacatcaccatcagcgacggaaagctacaccacatcaattaattaatgtaactttcacttgtcccatgcggggatgtgatatagacgacgaccgacaaagaacacgacacgagccgaactagctaatcatcattttaacagattggaggtagcaaatgggcttagattaagggcgccgcatgcatatcctcagcaagtgctcctccggctataaaatatctaacgtttagaacaatatttatctaaaaattaacaatatttctcaaataccctagtttattcaaaacaaagaaaacaatatatagatttatcatgtagttattaaatttattaattaaactcattcaaatataaattaattgtcaaaactgattattatcttaagagtcatatttgtgatgggagggagtaggactaaaacgtactactgctgtgtaacaatgacaatgtttactggcatgaccatgcatcaatgggcaatcaatcacacacactgacactgtgacacacaagtgaatcagacacctggagtatgttctttgcacagaaacgtttactcttttcttcagagtaaatgtacgtcatttgactttcgtcttcagagtgtgactgatcacaatttcttttattaaaacaagtttaccaaatctgataaacagtagtatatggtgtaataaaatcacattatttgtcaagacatatctatgtatgccgtgtttatgttttcaaattaattgttttaatttttaaatttttagtgattagagttttaaaagtttgaagggagaaaagtcagaacatttatttatcaccaagagagtaatatctctatcgaggacgtatattatttctagcaagttttaaaatcctaattaaaactagaaaaatacttatttcataaaaccacccttattaggaaaccatgtacgtgatgtcccaatatagggcatgtgcgacgactagcccgattttaaagtgttctagtagattatagatgaaactgtgaattgatgaaaaatatcgaggacacgaacaaatgaattaaatattaaaacttggacaagttaattttaacatttttttctaagaaatatcggtgaagaaagtcttcgcatacattgtactcccaccattttatagtgtaaagtgttttgttttttttttcagaattatttttttatctttgaccatatttatataaaaaagcaacatatacattatctgattagttttaaatatactattaaagatgtcttgatagtgtatttatttgatattatatgttaattatcttttaaaaagtttaacttctgataaaactaaaacaccttacgatatgcgatatggaaaggatggagtataatttaggaatatgaaaaatgttcccacaataatccataatccgttagttcaaaagaaatgaagaaatgcccctaaattaatgagatagtttaaggagtactctgcattcatagccatgggcagacccaagcatggtccgagactaaaggagcattgagtctatgtaaatttccaccatactagcacaaatacaatctaaacaatgatggtgacctagacaatggtccgcgcgccccatccacaacaattgttctacaatgaccttgtcttgttgcaatattttgatctttctacaacaaaaggacgaataataccttatgctaaaagcgaatcaagatgaactactttcaaaatatcaggcgtgcatgcattccctaattgaaaacacacacacacatgtgtacaatccacatgcgtttggtagcccctcttcccaacccatcttcctcgttttccgcgcgcacgctttttaaactgctaaacggtccattttttacaaaaagtttctatacgaaagttgctttaaaaaaattaaattaatctatttttgaaaaaaagcaaatacttaattaatcaccctctaatcgctactccgttttctgtgcgggcacttagtgttgggaaccagggttccgaacacacagttctgaactccacgactgagataacatgtcgagctccctcattctgttgatacagtgtgtgacttacccctcaatcctttatcatccatcaattcgcacacctccttagtcctaactatttagggtcaaatcttgccacaaaccagccaacacttgcattactactgatctttcatatccaagtccttatcttcccaaatcacatggataatatctaataaaagggtaaacagtacaaactttccgaaatttactcataactatagtaaattagttgatatttttttttcaaattgggtccccctattgccagatgcatgccacacatgagcttcacagttgagtatatatttttcacaggtaaatatggtgatttggatacatcgagagtgagcataatgcaacttttcttaaaatttattccccttatttttttagtatatgttacaaaacttaagatatttttttataaaattatcatgaaaacaacaaagataaattatattatcataatactacacatcttgcttcaaatatatcagaaaactctagatatacttgaagtgagtgtatgaccacaaatatagtaccaattttatggaactacatgattaaatgttaagaaattctacacattgctaccaacaaataaatgattctacaaattgtcttagacgaatgcaagttctacaaaatattaccatacaagtgttgttatccccttttggcactacctttaggttttcatccatagatctacgttatgtctccccaaaagatctttttgcccttttaaaggcctccattaagataattatgtagaatctccatatgaaaatatgcacatatttttgctattcaattatttatgatattcttaagggtaatttgggaatttattattatggaatttaccaaattctaggggtaaaacgatcctcttagacgacctaacaaagatctatggatggtagttgcaaaaagaaaagaatgcttgtacaatggtattttattgaacttgtgttcattgatggcagttttaagaactggtcgcttatcaatgtcaaaatttagaatttgcctgaaatgttccattagaaaagaagcactaggaaactactcttaaatacttataatggctttgtggaagtctccacggttaatttgatgtccactccctccgtcctcaaatgtaagtattttttaaaagtattttaaaaataaagaaaataattaaattaaatagtagaagattgtgattagtcgagaaattaaacatgagatggtttgattggttgagatggggggaggtttagagtgtcagtgccatggataagacctacataacatacctgtattaggctcgacagaacctaccgtatatgaagtcttatacggaatcaagccacatatacggaaagtgtttcagataaggaaagagaagcaaactcctacttgagcaagacaaggactatttggatcgtatccatatttggttccctagatctacttggacaagggacatctgagagtataaatacaagactccttaggaggagagcggatatataggctaggacagatcaagacaggccaacaacatatgcgagggaaagcctagacaaacccactatggagccacagataccgacaagaggaacctagcgctgcctccaaatatcgccgagttcatattcgtggaagctgactacgctagccgtcgattacatgtgagagctccatgccgctaaaccgacaaagactatattaggttgtcccaaatattgtgctcatgcgatattgatatataaaggcaacatcggattcggtcaacaggagtaaggctattacctgttagttaaagggttaaagggtccgaatctgcataaaaatcgccgtctctcatctctttacctcaatctcgcgtataccattatatcaactattcctatactctacaaataacataggcgggtatagtccgtcaacaatgagatatgtatattttaggataatttgaactctagaaatacgtatattttgggatagatggagtacactatttagggtttatttttcaatggaatatttacgcttaaatatgtagattgtgatatattagtagttttatgatattgtcacttaatgtgtagttttatcgaagttgttaattttactccatgcattttttgtgttaccattctctctttatttagaaacacaaaatattttccaattcctgccggccgccggccaccggccacaagcatagattactacatggttttatccatatatatagactttgaaaatgttgtttgtgctgaataattgtgcgacacgactctttaaaaccaaaaacgcgtacatatattcaacgcagtcctgtgcatcgtgcacatattcatcaggaaactaattaattgctacaccgtttgacttcacttcttaaactaataaaaagatggcggcagaaatgtttgcctcgcacgacactatgggtgtgtttagataaaaaaaaattggctaaaaatatcacatcaaatatttagacacatgcatagagcattaaatgtggacgaaaaaaaccaattgcacagtttgcatgtaaattgtgagacaaatcttttgagctaattacgctatgatttaacaatgtgatgctatagtaaaaatttcttaataacggattaattaggcttaataaatttatctcgcagtttacagatggaatctgtaatttgttttgttattagtctacgtttaatactttaaacgtgtgcatgtatacttaaaaaatttttggctaaaaactaaacacggcctatgatttgagctgggaattttttttttaaggaactatagtaagctactgagtttccgtgcctaactttgatcatccgtcttatttgaaacttttaaaaaaatttaaaaacataagtcacgtataaagtactattcatgttttatcatctcataataacaaaaatattaattaaaaaaatttaaataagacgaacaattaaagttgggtatagaaacttatggttgcatttaaaatgggatggagggagtagctgaaaaatgataggagcacgtatatcaaatcaatcgcttcatgatgccccgacctgtaaaacaacatctgaccactacacagctcccgtggacggtggaccttcccactaaccccaattcactcatgttgtagtatccgtatgtgctcgccacatccgatccatcgattcgtggaattctcgagcgccggagagagacggctcttcttcgtggtagtgccagtacgtctcacagcccagtccagcttcgctgtctccccactgttcagcgtcaaagcacacacacaaaagatcccgatcgatttatctcaccaaaaaacacgttttgttttaattcagtagctacacgtactactagcttttgtatggcccagcatggtatcctgcccacggccaaaccccagatcgatcgaccatctgaatgacgaattgttattgtcctctggaagagacaaaattaagctaagcaacaacatcaacgaccttccaaatagaattaattcacttgaccctttttgtatatctcctctctctcttggtctccccgaccttatctggctctatatatacccccatctctgcaacaaagtctccaactccaacaaggcaaggaggaagagctgaggcatactccgaacccagccagagagctagctcagtgagcagtacacagtacactccccgggttatctctcccagcacgtatgtttatgtttaattcatttcctccatttatactctgtgcgcgctgcaaacgtagtacgtgtatgttctagctatagctcttgtcttgtgcgtgcgtgctgctcgtgttctcgtacgtgcgcccgcgtggttcaatagcgcctaattgatgggtgaacactggtatagtacgtacactagcgtggggcgtgacggcgtgtgccgatgtgcgcgcgcgtccatgcttggacgagtcgtcgtactctgccattaatcccgcccggccatctcgtgctagatctccgcgttcccgatcgatttcacgttcccgtgtttttgaggcgcggagcgcaccggagcgcgcgcgtcgtgcatgcatgtgcatgtgtacgcgcggcggccggcagggccggccgccttcttcgtagtaagcacacgtttgcttatcttgtgttctctttactgttgcataggccagggctgcaggaat

SEQ ID NO: 9388 - DNA, 20318 bp, Oryza sativa
  unsure (1)..(20318): unsure at all n locations
cgtatgtagcagctaagaagaatccaataatcactgaagataaaaaaaaacataaaatgaggtatataggcaatgagcttgccctgtgcagcagtgcggactgccttggctgctaggtgctttaggtgttagcctcagtgagcttgctgcattttgttctaagagacttttttttttaatcttgtgccactcttcacaactctattctttcttttccataaaaaaatcacgcttctatcttttgccactattccattagtgtgcatttctctatttctatccctgtctgatcaacaaaggttggccatcaagctttccccccgaaagacaattatggcattgcatatgttccaaatgaaaagaaaaaaatactaaatgaacaatgtagagaaaggtacaatgttaatttagatggcacaattcttaatagcaatccaaacatatgtgcaaaacaggcggtaaattttagactaaggattaagtacttgaataagttacatcacagcatttaagagttatgacaaatacaactacttgtgtaaatttggcatgtttcccgctatggcatgcaaaaaattgcggttcaatgccaaagtcatactgaaaaagcttaattaatcataaaatactgaacatgaaaaggggaagatgaactaatataaagggaatacttaaagatgagaagcacctaaaagggaatccaatctaatcaagttaaaaacatgaaatagagtattgtgctaaaggcagggatgtgtcttacttaatacatcccatgttccaactggtaaaaacatgtgataagtttatatgtaaattaagtgccataatcaccactgctgtagtaaggttagtgcatttactgctaagacatagcagtttcagttctatagcgttctcccaaagtacagcacgctgaactcaacataatgtattgacacaatgaatgtacaaataacatgtctggtgcaacaaaactaaatttagccatgactatgcatcagcatttgtttcttctggattctataaatagtaagtccatacaacagacaccttagatcctaaacctagtgtaccaaatactgaacccacaatacagtcttcaggaaaccaaactactgagactgatgcaatcatagaaatggccaatattgaactagtgttctgcaaattatcagcattgaactactaaggagtgcaccaattccagcaaaatagcatcccatagcaaggggaacaaccaacattgaactacggtttggtgaaaaagacactaactccatccaaataccatagtaaaggcgctgtcatatacagtattcgattgaccacccaaaaatcctgccttcaactagaagtacaaaaactggtgatagctttttcctctatggaagaaatgcaaaatctttgcagattacacagcagaacaactgcatttagctacggcggtatccactaccaagtattccacccaaaacagaccattaggctagagatctcacgaggctgtacggaaattcagaagtgcgagtggataattgttcgaaattgggaacggatctcgattctgcagggcttaccgggcttgaagaagatggagaggccgaaatcgatggccttgagcggcgagttctccttcttgttggcgaagaggaagttctcgggcttgaggtcccggtggataacgccgtggcggtggcagagctggacgacctccacgatggtgcgggtgacattggcggcggcgcgctccgtgtagtggccccgcgcgacgatgcggtcgaagagctccccgccttcgcagagctccatgacgaggtgcacggcgccctcgtcctcgcacgcctcccgcagcgacacgatgctggcgctcttggggaggtggcgcatgatggcgacctcccggcgcacgtcctccacgtcgaccgccgtcctcagcttccgcttggagatggacttgcaggcgagcagctccttggtgtcccgatccatgcacaggtacgtcaccccgaactccccccgcccgagctcccggtccagcgcgtacttgtcgtcgatccctccgatcagctcgcacccttcctccccgagcacggggagccgcttctgccccgctcctcctcctcctccgccgccgccgcccccgccgccgcctccccccacgccgccgttccgcgcctggtggggcttcttcttcccggccgatgcggggaagtgagacgacttgacgtcctcccgcgccgcggcggccggcgagcggcagcagttccccatgctcgcgcgagatcaaggggagggagggctagggtttgtgctgcattgggcgccgcggtgggggattgggagatgggaggagaaggaattggtgaagtgaggtagaagagagagaggagatgagtagaggagcggtaaaactgtgacgagtttggtaatggtaacggtaaagggacgggagggaggcgctggggacgcgtagccggcggtagcttttagccttgggccgacgaggacgagggtgggggaacattcccacgtggcgccgtggcgtgtgcgagatttgtcgctgaccggtggggcccttacggtttttttgggtgggttctccggtgcgtttttgggctttcgcggcggtgcggtgagccggtgtggggaaggacggctaggggggggtttgactgcgctggtcgccgctccggttgtctaacggcgtgtgcgcgagagaaaaaggacggaaagggcgtccgccgtggcgccgtcttatctctaatctctcacagtctgcccggtttttttgctggattattttggtcaagtatctaaaaataagttctctcacaaaacattactacattttttctactgtatttttaagattattattattccaggctatttgttaatttattttattatataatcgtgctaataattgggttaataatctatgttcttatttgttgcttacttcttattataagccataatggcacattaatagttaaaaaataattataattaaaattttgtatatgtgtttttatcgacttaaaagttaatataaaaattacattttaaataatattaaatcaactttaaaatcaagttttagaattcaaatattaatattggcatataaatcataagccaaataatgaggctctaatcttaaacggttaagaacatcaagccatattagcagtgtgatttaacaagaaaatcactgcggcacatacgcttttcctctatgcatcttctgttttgtttcttttttgctagagacttgcctgagctccgaaaaccgatgtgtttaggattcaaccttctgaactgtccctgtcactgtttcagagaccgtcaaagatcgtgttaacgaagctgtgtagtatagtattgttgctgtctttgcagcgcctagctgcggaacaatatgccgtgattttgcgtgcgtgatgtttgtgtgtcactgtgcgattatgtctataccactcaataagtgtagtttacgctatcgttcctgtagctcgagacgttgaaatgcgaaaatgtcaacaatacgtgggccgttgcaactaccgttagaagcctctcgttaaaatttcaacgttctcttgccaaccttcaacgccatcaatggatcaaaagccaaagcctaacctacacttacacagctgtgagatggacttgttacacgtttctagcttctagccggcaataaactagtagacggtatttggatcggtaacaacggaggtcttcttcccttccatttttgaaacccttgcaaaaagcgttccagcttttaaccaatatgagcaaattcaagtgtgtgtatctgtggccggacagcgaatgcttccgaaacactcagggacaaagcggagctagctacggctgtcatcttggcttaattagccatgcttccgacggcaaggggcgacaacgactgctcgacaaaaaagcaaacctccccgtttgcttcgacattaaccatgcaacagtgagcagaatacgacctgtgaggcagccaaagcatgaaaaatgaaaaatcaccggtgaacgaagtaacgagactgtttctacgtgtggccatgtttgcccgcatgcgtcacagggttatcctcgccttcttttttttctcctcgcgggatgagccgcgggagatgagagatcgccgtcgtgcacagcgaattcgaaagcagaacatgcagctatagcaaagcgcgcggttactgtatctcatcgtgagcagtatagtatgaaacggaggggctcagcggtcacatcgggagtggattctaatccctcgaaaggatatcccctcgtatacctttttttcttttaaattcgatgcaaatagttatgaaaaaatctgaaaaaattgacaatgtagagtataatgatacctactagtctaccaaaattcaagttcaaattcgatctacacatcgaaaaaaaaagacaaatttagatataaacagtacgctactactcatatgctgaatttatcttttttatatctcggcgtgtgagttgagtttggacttaagattttgtggagttgtatatatgtgttgtatgaatattgtcaaatttttccaaaattttttataaccgtttaaatagcttttaaataaatgagggaactcccttgaaggattagaataatttccccggtcacatctgcagtgggggcgagagagattggagaagcctttgctgcgtgcagcgtgcgcaggaagcagcggtcccagtcgtccgtcccaagcaggtgacacccaaaaaccaacgactgctgacctcgctaccggaaaacggatctcggcgacagcaaagtcccccgcgccgtaccaaacctttgcctgaaaaagcaccgagctgatgctgtgctgccgctggccagggctccacctcccgccctcctttttcttcggatgccatcatctaccctgcgcccgtacaacacaacacaacaccacccttcttctccatcttctgcatgactgcatgaccgatcggcgaacctgcagcagccacaagatcggttggtttggttcatccatgcagcaacagtagcagcatgtagctgtcaatatatcttgctccgtatctcgtgttgcttctccaggagactggacgattatcgcgggtaggtgaagtagtatctagctagtctcgcgttaagaagaacgagctgaattcggtggcactcggctgtccgtctatcaggacgatcgagccggtcacatgttgaggcctaataaaagcggtgcgaagcactgtttactgccgggcggagcgcgtaaacgcccggcgatctcgcattcacacaccaacgagagccgtcgacgtcgagcggttgcagcggaattaaattcgcctgcccgaatgattggttgatcggagccgctgccactgcaggctaacgcgcacaattctgatggggcgtacttgcgcgggtgttggaacaatagatcgcgtggtggtactacttggtaaagagaacagctgtagttggtgtcctttagcatggtcgtgtagagcaacagtgcatctggcggcgccggcgacaatgatacggtgagattgcaggtaaggatggcaattattaccgattgaacatttaaggctccattcttttctacactgctggagcaagggtttttacccacggttcgtaaaacccttacagttccgattatataaccggactatgaattcggtagttccggtttaaataatcaagactaaagatgtatctttccggtcagtaacatcaaccgggactaaaaatggcccgaggatagtgccaggtcattggtccctattcgtctcttttttttcattgttatttgaatattgatttcacaccaatctcaccaaaatcataaattccaaatcgagttgctcctacataggggtgaaaacggtacggaaactttccggattccggacctattttcaaaaacggaatctgtcggtcagaatttttcagaaacagaaacgaattcgaaaatattttctcggaaacggaatcgaaaatgataagggcagtttccgttggaactcggaatcggtcggaaactttccagaaattttctcggaatttttggaaaatttctcggaatttctagaagttttgtgactgaaataccctggattctttttttaagcaataaatagtgaatactatggtgtttggctgctattttttaaaaaaatatttgttatggaaatctaaaattatataagaatatttttttcctgcattgggatttatcaacaacattactctcttaaacatagataatgtattccttaggttgtgttttgtgatgtactattgatacataacaattggacttatatgattgtgttttatgatgaattgttgaccattgagacttgaaaattggatttatcatttggaggggttttttattccgataaattttcgttaccgtatgcgcgccgattcgttttcgctccgttttcggtttcgataatattcgattccgttttcgtatccgggattttcgatccgattccgaaaataatatgaaaacaataaagatggtttctgtctgtttccgtactgttttctcccctactcctacatccccaaatcaaagtaacaacatcacaaatcataatattcacatcacaaattgtcaaaaaaatcacaaattctaaaaaaatacatcacagatcaaatataacacagatccaataaatcacaaattcttaaaaaaaagaaaaaaaaagaaaaaaaagtaagaaatctagccgccgtccgccgcctcctactgcgggctcccgccgctgcctcggctgccgcttctaccgtcgcctccccaggccggtggccgccaccgcccccgtccggttgccgccgaccgcgccccgctgccggcctcgctggccgctgctcgctggccccgccaccgtgcgtaggtcgccgccgcgccccgctcgctcctcgccggcgccgtttattcctagagaaagagaggataagactgtgatagagaggaggaggaataggaatataaggagaggataagagtgtgagagagagggggaggaataggagataaatttttttgaagattagtgcaagagattttttatttttaagtcccggttagtaacaccgaccgggattaaagatctacataaactttagtcccggttggaaacaacaatcgggactaaagttatgatctttactccttaaagatctctggggacctgacagcctctgacacgaggtgaactggaactatctttagtcccggttggtgttatcaatcgggagtaaagatcacatagtcctcttgcacttataaacgggactaaaaatgcttttggacaatcgaccaaagatggtttctccagtagtgctattaggatataaattttatttagattttcgttaacgcatttttaaattgctaaacgatatattttgtatgggaactttctataaagtgatttaaaatatcatataaatttatttttatagtttaaaataattaaaactcaattaattatgtgctaattattttttagttttacgtatccgtatttaatcttcaatgaactcaaacagtcaaacgggaccttaaatagtgagtgtaaacatgttaagattaggcatgtcaaaacctataccgaataggtaaatggacatgaataatcatgctcgctttgcctctttgcccgccaaaactaaccggcatgtgaggtatactagacactactgtttttgtatgtactacagttagtgtctaattagtatgttacacaatgataatgtcgtttttatattaaaaccatgtttgttttacctaaagatgcattgtatttgctggttaattcctaagtagttttattaagagtaaaccgtactttggacaaggtttcttacataagttgcataatggattggatcttatcgtgtgctttcactttgggtcaggtttccttttttttttcctcattggaccaggttcatcttttggttgccaccagcccaccaagctggaggactacaattgtgtctctttccgacaacccaagacatatgtacttttctatggttttgcccatgaacatatccgtgaaacatgtagcacccgtggataatgggtatgagccaaatgattatggatatgtttagatccactgataaaatttttcaccctgtcatatcatatgtttcgatatatgtatggtgtattaaatataaacgaaaaaaaataactaattacacacattacgtgtaaattacgagacaaatcttttaaatctaattgttccatgatttgacaatgtggtgctacagtaaacatttgctaatgacggattaattaggcttaataaattcgtctcgcagtttataggcggattctctaatttgtttttgttattagactatatttaatactttaaatgtgtgtccgtatatcccatgtgacacggtaaaaattttcaccactaaaactaaacgcagcctatatttatttttctatcgtttttcccatgaccatatccgtaggacatatagcaccgtggataatgggtatgagcaaatgtttataaccgttctacatagtaggtggtatatccgtggacataaatttggctgtgtttagtttcttttaaagttgaaagtttaggttaaaattggtacaatgtgactgaaaagttatatatgtatgacagattgatgtgataaaaaaagttagaagtttgaattagatctaaacacagcctttatctcgttggtacaatgtagtactacaatggtacactgcatgtttctttcaaaaaagacagtacagagggagaaattcgagacggtttgggtgtttgactatttgggctggtccatcgctccgtccggcaaggtggccctgaacggtgggcccatcatgtgtcagcccactggcatcgacggcctgccagtgccggcctgccgggctgttcgctcccggcgcgtcgaaattccttgcgtgacgtgtcccccccttccggttttcttcaatctgtggtcacgccctctggaagccgagagcccgagaaggcggagaccccgggagcagaggggagagcagcgcagccgccatggaccgcgtgcagctcgtgctcctcggcctccccatcctcctcttctgctccgacctcgtcacgctcttcgggccggagcagctgcccaccccgcagcccgacctgccgccccaccccagccccgacgcggcctccgacgccgtccagcccgacgacatcgccgccgatgccgccgcttccgcgcagattgctgtaagtccgagcttcgctgctcgatccagtgccaattttgatcttcgatctagtttgaactagacgagtcatgtgcttttccctctctgttgactcttgtgttgtaggagccgcaggtggatgggcctgcctccggcaccaccgtcgagttgaagttctgcgcctcctgctcttataggtaaaaccatgtactactcatggcttctgtcatctgtggagttgttagctggtttggtagaatcgatagtgtcgaataatggccagtgaatcacagatcaaacccgacaggtttcgtcagatttccttgtagccctagatcgcaggggttcagaactatgtatcaatagttaagaccgcgttgaccatactgatatctagagtacaagtttctattgtacggccggcctatagcttttctgttactgtaaggccccaaaatgagatccattctgaatttagatttgagttcagtgtgcaacacacgagcacctaacttatctgagctgataccatgagctcaaactccaagtgtcatcatgatgggaatggctggttgactgtaattataacacctaagtaacctgtgcagaagccagaaataggtggagtcataccttgttctagtaccgtacttcctaatactggtcgtcttctagttcttttaagaccataataaggactgatggtagttgtcttctaacattttcatatatgatctgcttcctgtgaagcatcgctgaaacttcttactgtttgccaatggtattgcacaatgggaaaaaaaagcacacacattttatttttcaaaataatatcgtattcttctgttttcatcttcttaattcaaagatacaccagcattttctgtattcactaaccaacagtcctttaatttattttttgacacaaggcttgcgccatgagttgagtttgagtgccttcatatgtttttggttatttttttgaagtgaatagcttgtgatgagaagaataccacttacatagttccactaactacttctctcttttatgcatttctagtgtctgttgggtaagaatgcagattctcagtccattcatttatattcttttagtttgtgaatgagcatgttttgctccaaacatcttggttcatcctctcaggaatgctctaactcttctctctgacctagttcacacccacttatgctcgtgggttattatagagtctggaatgctatatttctgtggacttcgctgtgttttttgctccttttttatgcccatggcatgctaggagagatgaactgagagaaagaagagttcatgctgaacatatctttgtttgactttaaatgaataaacttgtgttgatgtgatgaccatttatttcaacatgtaatggagcagaaccttctttcacatgctctagtgaaaatgccttttgttttctcttctatgaattggtttgtgagttagacagataactttaagtcgaattctgcaggggaaatgcagtcaccgtgaagaagatgctggaaacctcatttcctggtattcatgtcgttttagaaaattaccctccaccattcccaaaacgcgcactcagcaaagctgtaccttttcttcaagttggagcaatggcaactttaatggccggtgatcagattttccctaggtttggaatggttccacctccatggtactactcgctccgtgctaatagatttggaacaatggcaacaatctggctgtttggcaatttcgcccagtcatttctacaaagttctggtgcctttgaagtttactgcaatggacaattggtatgtttgttatgcatacatccttttttttgctgcagtggttcagtagtacttttgcttgtgttatgtaatgttagaatcccccccccccccaaaaaaaaaaaacagccataagatcttttttatgcaaaccagtacagcaactgttgtttactatggttataacccatggttgtttagtgccaaaatttctagttattatggtttgcttcaatgggattttctttatttatataatctctctcgaaagaaactggcattttggagccctcagtcatagctgaactgcaatgatgctagactctgtagctgaatctttgactcaaaatgatctgttgtgtggcacaatatcagttagtggtgaaaccttgaagccagagtaaagttgctgtagaagagagctatatcttgcatttatatgtgcaagttgactgtccatttatctgtctattggagttctaatcccaagaccccctagttgccatcaatttttttcagacccttgcattgctgtgtgtagtgatacacttgaatgattagattgggttcatactaaattagtaataatcagtagactagctgtttcaaaacaaagagtagcttgcatgtttcctaaaactggtttgcaattgtacttattccctttaattaaatgaactgtgcaatctttgtcctgatcacttaataatgttcaccaggcgctaggtgctagttgggtggtagaccagctcctagcaactaattggcaatttggtgggctaggtggctggcttttagaacacagttactaaactttgtttagtgtgtttgaggtgttctgtttttttttttgcaagattaatttcttacgcaatccatctgttaacttttgctttgtgtgtatgaagttctcctggtttttcttttgcgaagcttaattcattatgcgctccatgtctccatttgtacccgatacactaactcaattcaatttctttcttcaggttttctcaaaattatccgaacagagatttcccagcgagtttgagctacgggagctcattggcaacaggttaccagattctcaattcgggaaaaatctggaaaaggtttggtcatagatgttgatgtcaagagagcccacttcatttacctgctatttaattgatagaaccgcttgaaagtttacgcctaattgtcaatcacatgctatttgtcttcttcttttgtgaaggcaggtacttttctttttgttgtaaataatgttttaccctcgcaaagaaagtgaaggagttctgtggctatgttagtttgttagaactgtcatatttactcaaagaggatgtgaaccataacgccccttctcgagtattcctaattaattatcagaaataattactctgactttggattggaagtgcattttttccggatatgttctgttgccctggttaaagcgtcatttgctgtcgcaaactactagatgatgccctgtgctttctgcgggatatatgatagatattggagaaatgatgaaatgatttggtttgaaatattataaaaatgatttgagaatgatgattgagcattgtactcctatatgtttagttttaaaatgaaattaattgaaggtataattactatgcttgcatgttgaactttgtgtgcttaatgggttgatgtgatatgtttgtatgtaggttttaggagtgctaataaatactatgcttgcatgcttgagttttaggtgtttagtggacattttctttatagaaagaagagattcatttgaaactctatgactgaattgcaatgattcagctatagctagctcttttttttttttgaaagtacaaacaaataaagattcagacatatggtggtgttattaatctcaatcctattggaaatgatattgatcctgatatttgcaacaaaaaaaaaactgattctaagatagtcctcgtggcctctcctcgaattcatcagattcctgattctaagatgagccccttgatcgccggagagcgacctcggcagcgtcggtcagatcccctccccgcctgcgggcgtagaaaggtatgggtccgttgccggcgtccgggaggagtaccagggatcaaactctggccagtggcctgctcctgggctcctggcgctccctctcagctgcaggcgtttcatcattctcagcaaccgagatgagatgaggttatctcatggtctagtggcacttgcagatgtttacagaagtaccagagttcaggccatcatatgagttctcaaaaaaaaagggggccatcatatgcagttaaactattctctccatttcgtattacatgatgttttgatttttttaaaaaaataattctttttaagtttgaccattcgtaggaaaacgtgccaatattttttaacacaaaacaaacatactatagatctaatgttagacttaataaaattaattgtattgtagatgttacaaaattttcgtataaacttgattaaacttaaagatgttttacttagaaaaaaaaatcaaaatgtattatagtatgaaacggaggaaattaaaggcaagcaggctggctgtcgttccccgtggatgatgcaggacagtaatcttggggcttgtttggttctttgctatgtactccctccgtccaataaaaagacaaactctggtttccgtgcccaacgtttgaccgtccgtcttatttgaaaaaattatgaaaaaaattaaaaagacaagtcacgcataaaatattaatcatgttttatcatctaacaacaatgaaaatacgaattataaaacaatttcatataagatggacaattaaagttggacacggaaattcagggtttgccttttttttaaaggacggagggagtgtaaccttgccaaaaaaattttggcaaaaactggctaggtttttgtttagtttgctaccaaagttgtatttaggtatttaactaagccaaataatttggcaatggcaatttgacattttctttggtttggctgagttagagcaagttttatgaaagggatagctgccaccttcaattttatctttatcatctctatataaattaagaagtagtctgtacagtatgttatctctaaacataaatctcaataaatatatttattgaagtttgtattggggttgtatcttacacgagggatggcttaattctttctttcatctcttctctcttccacaacagtaaataaatctacatggtatgtagagataaagtgcttacaaacttatagtatttgctcttagaccgtaaaccaaacaaacccaagaagcctgataaaaaaagccagtgcacaactagcaacagcaattcaggtcggtaatggttgcaagtaaagcgttgcattgaagacgaagttgcaatggttggtcttcaaagatgtactataagtactgtcacagtgcgtacaaacctttcagagctactgctagtaagttgtggcattaattaagccacatttaatcatcgaactgcaacatgttagttcgcaggaagtggtcagcgacagctttgtatgtggcttgcgtcggatggacagagtcccagaacatgaactgggccggcgtcgtgcaggtcggcatcagatcggtgcacaggggccccatctccagcagcccagtgccgcagcaccccttgccagtttcggcgaaacctgggttaacagaagttccgaaagcaacatcaaatgctgtcaattctgtaaaaaacaacgccgaaatttttcgatcggtttcggcttcagattttcagaagttagctctttactcaccatacttctggggatgatcgaccatgtccgtgagaggggtgtagatgtcagcgtacacggctttcgctccgggcgaagttgactggaacttggtgagcattttgcggagcttggcgttgtacttctccgcctccgcgttctgctccgcgatgcagccctgtggcctcggcggctgcctcagcgccgccagcgtcatctgcaccgggaggcatccgaccggcggcaatccggcgaccaggagtctccgggcgcccaggttgtacaggctctgcacattgtttgaccatatggttaaatcttggaaaggtcaaattcaggttttacagcgaggttgggggactcgacacgtttgaaggttgcaatggtgcagcatgcatgggcagatccactgtgttgatggataggattcgatcttgcttgttgaaacttgaaacagagtgcctaactaccctaactgcaattgcttcttgccattgtttgcagagcaagagagatcaaggactacatttgcacctgatctcgtgccagaaatgcaagtgcaatcagtatccttactttccaggaacaaagcacactacgcacaagtgcaatcacagttagttataaactgcgcgagaacttctcacgaaaatggcattagcacaaaagtgcaatcacagttagttataaactgagaacttctcacgaaaatggcattacggtgacgtcgatatagatactaatttaactaatctccgaatctcaaaggtttcgcatgcaacttgcagcattgtagctgtcactagaaatggaccgagttaacctgaagaaacgaatggaattcgcgaagaaattaacctgaatgtacgatcggagcttgccgatgaggagggcgtgatactggtccagcgtgtnnnnnnnnnnnnnnnnnnnnnnnnnnatgatcatgtcgttcgtcccggccgacacgaggaacagcgacttgttcaccacctcaccggccttgccggcgcccatcctcccgacgagctcgctaaagtccgcgatctgcgaggccatcgtcgcgacgccggcgttcgtcgccgtcctgtcgtcgagtcccgagccgccggacgcgaagctgacccccgtggcggcgtcggcgtcgctgaggacttcggagccggagtggtacgccggcaggaggcccttgacgccgagcgcctccacgaggaagtcgctcatgatcttgccgtcgcagaacctccccgtcggcgcgccgccggggaagtcctggccgtagggcgggtggtcggcgcgcaccgcggtgacgaggcggttgttgttgcccgcgtcgagcgtggagtccccgaaggcgaagacggccggtatgcgtcgcgcgctcccaccccgtgacacggcggcagcggccgcgtcgacggcgacgacgacgatgccgtggatggcggccagggagaagaggagggcggcgagcgttggcttgagcgccatgtgggcaacgtacgcatgcacgttccagctaagatggtgtacacgcacagtgcagttggtcgctcgtgtttatatatgctagtagcatcaactgctatcagcattggccgcttgtatttacgagcagcctgtcaactaactctttgtcattcttgcattgttcatcagccccagtcagataatggcacaagaggcgatgtgattggttttaaatgaccatgcatccatttaagcatgcatagaattcaggaaaagagataatctaatcagtaccattgagttttatttggttactagggtttgaaaaaaaaaagagataatccattccataacattgacaaaggatgaattctacaatataccaccgacaaaactgagttttataatatagcgttgaacaactagttttcttacttacataccattgccgctagtcaacggttagtttaattccgttaagagaaagaaaatgtccattttacctctagggtaccgtgcgtacgatcatggatttcattggtcacgatccactaattcttctcattgatgaaaaatagaaatcacttgtctttctatcatccaagattatttaattaggcatggcattgtgcaaaatctcaattttatcctaggggtaaaattgccatctttctcctttaatggtgtatgactaacggttgactaacgctgatggcatataaggaagaaaataagttgttccaaggtatattgtaaaaccgagctttgttagtgatatattgtagaacccgagctttgttgatggcatagaatggattgaataaaaaaatgatgaagagcatgcctatttggttccctcattttgtagtgttggataaaacacatactaacatactaactctagaaacaaggtagcaaaagacgcataaaggctcctatatactttctccgtcccataaaaaatcatctctatattaaagttcaggattggagggagttggaagtaaccagatgtgatctatcctgactccctgagtatgacaacgtttgttaaactgtgatcaggtataaatgggtgaaaagcgatcttaaaatcttaatagactcattacaccggtaatcatctataaatgggtcaaccagcctagcaaaaacccaactactgtatactacaactgtatgaaaacagtgttcattaaaccggtgatcagctataaatgggcacatggtcttctttaccgcttccattatttccgtcagcaaaaaagaaaaacaatagtttgccactactgaggttgctcataattctccttaattcaaacatgattagcgcttaattctcataaaaaattggtaactactcatgcgtcataaattttgtctcataacaaaaaacaaaaatatgaccctttcggagctatttttttcgtgtcatcatgcccgtttagaatgtaaaagttttcctggtttttatatacgaaatgaaattgttcacatgaaattcctcctatgtttcaaatagacactagattctttcttaaaaatattttttttccaaaatacccacactcagaaatagaaaatttgaggatttgccactgtcaatcatgcgtgagtcttggactctcttccctgtcaaacacatgtgattgacaaatcctaaattacgagtggcaaaatcctcgttttatccatccgtttgtccattactgcggtggtcgaagtcgttagttggaggttggaacttgtgggagtttgggagcttcagagttcagaaatcggtatggtcagtctcatcagtgcccatctcctctcgctaccctcatccgcgccgcgctctcgcccgcaatcgaggccgcccctctcgccgcccgccgccgccgccgccgcctcctgctccttcgacctgccccggccccgccgcctcgtcgccgacgggagccggaggaaggggacgatggctgcggcgatcccgcccgaggcaagcggcctggcccacgacctcgggtccgcggccgtcaccgcaggcgtcgccctcgccctcctccgcttcttcgaggagctcgccaagcgcggggtcttcgagcaggtcagccaccgccgcctcttcgcttcgccctttcccccgttggcgcgtcactggaggcttctagtagctaaatatctccaactaagatgcatgctcccttagtagccattactatttgaatttcgatgcaacagtaaggaggtcgctactgaattacacgctcactgactcatactactgagattcccatgggtgggtgacgagacagacacgcagatttggattcgtttctcgtatttttgccaaggttgcatgtacgaacaattatatttgtgtgatcatcttcacggtgctctgcgcttctcccaagcagtacaacttgtttgttaaaatattcagcgcaattagtcccagcctccaagctgtacaggagtcccatactgctaagtattaattgtgctcatctgaggtgtctgtttagtagttttactttgagataggatttttaggtggggattagtgataaatgggtaagcatttccatattcttccgaaatagaccctttcagtacaagtctagttagtgcctgttagattcaagaaagatataatggaaaaggtccatggagatgcatgtgaaatatgtcaatttgatggtctaccgttatgttctaagaattccaagttaagaacgaggagcgagggttgcgaagcaaatcctgatatttttgttcaagatattaaagcatatatttagtgcgagaagtaggcttatgagtcttgtatttcattccggtctctgtcccgtgctgttctttctttgattctaaataacttttatttctcttaatggaaaaaatgcgcccctgggtattcccgaattttatgcagtttttattcaaaagtataatgttaccttttctagtttctgttaacaagattgatctttctatcccatttccaacactcgtttagaaaaaaaaaatcaagcatgatatttaagccataaaacccctcagtgtctcactctgcacattgcaactcttaaagttttactttgcagcgcattcatgtgagataatccaccaactgttgttaaatatatttcagaaatagtgaaaaatgaagtataagttcccaccaacaaaaactcagattcacaaaatcttggggtaaatgcacagcacagccttcttaccagtaatttcagatggatgtctgatggctggcattagctcattgacaccagatgaaattcagctaggttctcaacataacatagacatataaactgaaccatgcaattagctgacaaattaacagtagtttttcttattgagatttgcttcaatacgatgatgctttctattgataaattccatttgtttgcctgcagaaactcaatagaaaacttgtgcatataactatcggtatggtattcttgctcttttggcctcttttcaggtaagaaaatctaattttctctggtcaacataaatcaccatattggtactcacatattgatgctttatacagctcaggaagctatgctcctttcctggctgcagtagcaccagggattaatattataaggatgcttctgctggggttaggagtaatgaaaaatgaagctatggtaaaatcaatgagccgatctggagacccgaggttgtatactcgcatacaccaacctttggcgattacataattaataagcttgtttctgctcatatttgccttttattctttgcatttttcactctgattttcctttttcctattctatgccttctttttggcacagatttgcttattctttgtttctgttgaatatctatagttgctgctgctgctgcttcaggtcatgatcctttagacttcattttctcatgaacacagggaacttctcaagggtccactg

SEQ ID NO: 9389 - DNA, 12124 bp, Oryza sativa
gacctcatctgcacaggcgctggcggggatggcagggagggcagcgccccaatcgccatcggcaaggcggcatcggcacggcggtggagatggccatggccgccggcgagctcttcacgcgcgggatggaggaagaagaagagccaggggcatttccgtccgggatggcattttagcgaagacactctgattgaggatggtattccagcgaagcccgttttcataatggtattctagcgaagccattcttatgggatggtagatatgcaattttctcggcgcctgtgtggagccgagtgggagacgggagtagggttggacggttggtgatctagggtttttttagtaccgggcctcctagcctcctaggcctattgggccagttcggttatttcgggtatttcagttaaccgagcccaataaccgaaatgcccgaaataaattcggtcttttgatgttagggaccgaacagctacccggatttttgggtctcggtcttttcggttcggtctaattttgcccacccctaagcgcactcatcgccgacgcccacgctaacgacctcctacagccaccatcctcgcccgtgccataatactgttgcgcaagacagccacaatgcatcctccatggtgttgagctcctactcagccgtgtacagatccactcccaaggcaccaaatcaagagacatgagcactagagtcgtctcacgaccaaaatgccaatagatccagctaccacttacaacaagagccagttagcgccaccgtcaggaccccaacatggcttgctaccatgatcagggaagactatggggaggagactccatcgccgttatctttggctggcatgccctttgggtggcgtgctcctgtggttgtgaggtggagggtggggagggggagaaactggatacgggtgtgacagcaatagtccacctagatagtccggattataacaccatgttccgatcatctttcgagtctggctgtctctaaatccgatgaattgggtgtagtcgcacgttaccatttgatttacataagtggtattgggaaaagccacataagcaatttccttttcttggatcactctttttgtgtagccttcggtgaaagtaaaaaaaaaaagtggcccttagatgaaagttaaggttaccgcaaggctatgagatgcttatactgttataactcttttggaacagaattttcgaaggacttttccacgaattaaattagttcgtgtaaaaatccgttaaaaattatgcgttcctaagggtcaagactaaaaacaacgcattaggcatgtactagtagatgatttctgcaaactcaacagccaattgcaatgggaaaaaatattaataagctttcaatgcatcaattggtggcgcgggtgcactgttcaatgccgcctctgctcctcatgactgggagaaagtctttataaccgtgggaaggccggaaacatgcatgtacacacgacaagatttgcacttctcgtttttaatacagaaatgatgacgccataggcttccaaattatcaaacacaaatgatgtacgcaaaccagcccccaacataccaacgcgagaaacaacatgctatcaacaacggcgtcgtcgacaaaatgcggaggaaaatcaggtggagaaaaacaaatagaagaaaaaacgcacacggaacgctcaaatactataggccacttgtgcctcggctcacgttgacctgccttaggccaccgttctcaccggctggcaggctcgcgcgccattggttcatgccgatcacgtactatctcatcttcccactcaaattccacgtccaccaaccgccgcttcgcccttcgctgctgccgctgggctccaaactatttttaagcgcgtcccgcgtcgccagtgagccgcgtcgcgttgcacggattattgcaatcgatccaaacaatcacgtcggtcgacgagaagaagtgagtgatggcgtcgccgacccggccggggccgtacatgccgcgcccaccggcggtgccggagtggctgaacaccggggacaacgggtggcagctcgcggcggcgacgttcgtcgggctccagtcgatgcctgggctggtggtgctgtacggcagcatcgtgaagaagaagtgggccgtcaactcggccttcatggcgctgtacgcgtacgcgtccacgctcatcgtgtgggtgctggtcggcttccgcatggcgttcggcgaccggctgctcccgttctgggggaaggccggcgcggcgctgacggaggggttcctcgtggcgcgcgcgtcggtcccggccacggcgcactacgggaaggacggcgccctggagtcgccgcgcaccgagccgttctacccggaggcgtccatggtgctgttccagttcgagctcgccgccatcacgctggtgctgctcgccgggtcgctcctcgggaggatgaacatcaaggcgtggatggcgttcactccgctctggctcctcttctcctacaccgtctgcgccttcagcctctggggcggcggcttcctctaccagtggggcgtcatcgactactccggcggatacgtcatccacctctcctccggcatcgccggcttcaccgccgcctactgggtaagataagctctcgcttcctctaccatttgcaacgtacggtcggttggttaattctggtcattgcctggtcggattttcttcacaacttttggttgttcggtttgtcacgacccgccggggtttacttttccggtgcgcgctcacgggtcaggacttacacgagtacttgcacccgtacattagcagtacatgtgacgtgtggactttgtggtgaaacgttcggggcacgcggtcgcgggagcacggagtcgtcagcgcccggggtagactagtcacttgcgtgtattgatcgagtgagacgtgttttggacatggacgatggtgaactagtactatggaaagaaacgattcgatgtagcttaggctcgagcctaatttcctcgtacctgcaaaagtacatatatagacgagttgctagaaagaaaaaaaaaaaaaacagtgctggctcagcttgcagaatccagattctagaacagtacgtggcacgaatctcgacggcgttaagtgttaaccacgtgacggcgattaataaatactttttttgtgacaggtggggccgaggctgaagagcgacagggagcggttctcgccgaacaacatcctcctcatgatcgccggcggcgggctgctgtggctgggctgggccgggttcaacggcggcgcgccgtacgccccaaacatcaccgcgtccatcgccgtgctcaacaccaacgtcagcgccgcggcgagcctcctcacctggacctgcctcgacgtcatcttcttcggcaagccctccgtcatcggcgccgtgcagggcatgatgaccggtctcgtctgcatcacccccggcgcaggtatcagctgcttcctgctagctttgatcaattctagaatccaactagattagcaatttagtactactacactgtgattagccagttgccattcacatagtttcattaatgaggtcgttgaattggccattcgttaattaattcagttggattaacgaactagttgtgtgatggcatgcaggtctggtgcacacgtgggcggccatactgatgggcatctgtggcggcagcttgccgtggttctccatgatgatcctccacaagagatcggcgctgctccagaaggtggacgacaccctcgccgtcttccacacccacgccgtcgcgggcctcctcggcggcttcctcacgggcctgttcgccttgccggacctcaccgccgtccacacccacatccctggcgcgcgcggcgcgttctacggcggcggcatcgcccaggtggggaagcagatcgccggcgcgctcttcgtcgtcgtgtggaacgtcgtggccaccaccgtcatcctgctcggcgtcggcctcgtcgtcccgctccgcatgcccgacgagcagctcaagatcggcgacgacgcggcgcacggggaggaggcctacgcgctatggggagacggcgagaggttcgacgtgacgcgccatgagggggcgaggggcggcgcgtggggcgccgcggtcgtggacgaggcgatggatcaccggctggccggaatgggagcgagaggagtcacgattcagctgtagtggtggtagagtgggcattttgtcgcaggctttgccgcactgcagctaaactggacgttgaccatacgataattctcatctcgtacaggtagatcttgcaactagcaagatggagtagcagatattactaaacacatatgcttcattattttatttctggagtaaatcaagattcgttttggggtagtggtagatatttgcaatctgatgcagtcagtatgcaatgtgtcctaccctgggagtcccaatagataaacaaacttttgccagcattgcacacaagcaaacctcacggtaccatggtttcagtggaatctactgtaaattggttttgcttagttagcttggacaggtctgagaatatctcaaaactgtagagtacgcgaccgcacgtggacgcctgatctgagtctgaagaactgcagaagcaagcctgaagacaggccagtgcaaactgaaatatgacagcctaacagatcaccgaagcaattcatcacttgcatcattcgataacattgcacaggcagtgttagcaataggcgtcaaacttcttgcatatacacaacaatcgtgtgcctgtgaaaggaatttagatacctgatctcacaagttaacgatacaatgagaaaacgcaatccgaggctagtcgaattgctcccagtcggtgtttatttgtgtggaagaaacccgtggtgggggtgcattcaagctgcccatgccattgtcgaacgtctcccactgcgttgtcactgaaacagatttgttttgatcgctgaagggattggcatttcttgccttcagcttatccaacgtctccacaagaccttggacacggcgtacctgcaatgcaagtcatcgttattgtgagggtatgtacagcatacaatgcctccagtgactattactttatgacaacaaaaagattttgcaacagggaccaaacccgtggtcagatggtcatagcagcaacaattattcagatatattaccgtcaagcaaccaaaccaactccataaaattcaaaagggcaaaataaggattctttaaactgaagaaacaaatgaattttgactttattaatatgttacaatacatataagatgttctaccgattaagcttggctcaacaatgtttttgaagcaccctgcgcatgctgaccatttcactggtcttgttcttcaatataatagggcaacaaaaaagtgaggaagctacaaatagcatttcactcttgaccaacaaaggtcctaatctggcaaaattctctcgaaaccaacactaataaatggttataaacctcaggtctatcccatatcagaccaggcatttattaagtataagctccagcaggttttgcattagaagctggattcaaaccacacagccaagttaaaatagttttgtgctatactggttacaagcctaaggctaaatggaccgtcttaatgtggaactgctcaagccacacaactagttcattacccataaccaagaaaataatcattggagtacgggggaaggtcaaagtcaaacaaagaaactagaattagtcctggaaggagttgggagacacccttgtgatgcaaatgaagactataattgattcagcatagcagaaaatagctaaatggcaagctttctttactagatgtgccgtatgtattgtcttttcatggcttttaagccatggtcctataaagggcattaataagatttatcattacagggtagcaatgctacactacatggtaaggaacaaaaaaattccatcatcagcatagatgtatgttgattcatcaggaaaattccatcatcagcataggtgtgtgtggttaaattttagtaaataaaaggaaatcaggtttgagtaatagtatgtgatagctatttatcaacagaaaataaaccattttgaaagcttaggatgaccaatatttcagcaccagtactagtaattgaatttgtattatatgagataagccatgaccaatcatgttgagatgtataatggccactgtacctcagccttcctttgtgcccttgcttctccctctgcctctatgccatcaagtttcagcagctccatcataagaagctccgtcaagacaacaaaatctttatcctcaatctttctccctgcaaacacactcttctccaaatcacatacctggtaatagaacaaaaacaaaaaccgtatcagcatcaagatataagaagagttaatgtttaatggaagaggctggagaaacattattccttcaccttggcagagagtctgtcaacttcagctcttacacggccaacagcctcacaagccttcatcatgctctcatccataattactggctcggccctctgctctacattggcaggggcaggcttctcaagtagaagaagttttgctccatccttgaccccagctgtatgcaggaactcattgtcactcttctccttcccacggaagaagagcctctgcctttcaggctctacgccagttgcctgggtaaggacccccttcaattcaccttcatacaaaagagtgaacaattaatcctaactacatatcaaagcaatggaaaccagttccttctaaggaagcagatcatgatgtactgcttctgcgaactactccaaaaattcgataagagaaggcttctttcaaacgttgaactatataacattgagcttccatctgtacagaaaatgataaaatagtgtaaatttagtaaatcacacaacctcagttgagccagtatgtgcacctatttaacgtcatgaatgaacaggagtgtactaatacaatacaacggtacaacagttttaacgtcatgaatgaacagaagtgtacaaatacagcggtacaacagtaattcagtgtgggcctaatggtggacggatatagcatgacgcacagacatgtcgtcaaatatacacttaaaaactagtatatttttgtcgccatatacctaggtacatctgcttgccacagtccaagaggatattatagttaaaagagcaggaccataatccatctgcctgccccctgccacacaagcacatagtattgcaatgcttttgttctgaatctagatttgcatccaattcgattcacggaaaaggagacaaggacgatgtgatcttattaactcctcgacgaatcgccgggttgactggtcaagatccgtagctcaagtgcaacatagcagatcgagcatggtggtcgctgctgtaactaaccgggagcggcaattcgtcgtgcactttccgggcaagcgtttgagcttgcctacatcaaaaatactaatcgaaacataaccgatcacaaggcaccctcgttgcaatcgcccacggcgagtttcacgaggagggaggaggcgaggatcataccgaaggtggagtgcgccggcacggcgacgtcgcggaaggaggcgccgtgggagaccctgagcctgacggccggacccgtgtcgccgtccctgcgctgcaccagcatcccgccaggccggacctcccactcgccctccgcgtccctcccgcccgatctgcctcctccaacgccgctcatcatcgccgaccccagccgcctttatggcgcccctctcctccccccacacgaccccaccgattcggtcgcggcgaaagcgacgcgcggccggagggaggaagggatggagggaagatgaggagaaaaggaggatttggtggcgcgtggcttttgcgaagggtggaaggctccctccccgcggggttccttcccctccggagaagcaagaacagccgcgcggcagtggcggtagagcttgctcgcgagcggcagcggcagcgagattttgcgagagctgttttttttttttcgccaagtacaactttggattctcgcgaggccgcagggggaaacaaaggaggctcgctggcgtggaggcctcgtctcgcgtcgcgtgctgcctccgctgcggataggacgggagagttcgcggtggggtcggtcgacgcctcgcggggcgcgtggtttttgggccctcgtgacacgtttggttcgtgagaatgtgagatcgctcgcgggacggctcggtgcggtgcgccgcgtgcgcctactggtatcgccgagtcgaactctccacagcctcctcggactagcggtgcagataagtccacgattcggttgcagattttcttttttcaattaactcccatctgaaacctgaatttccacttgtacgtacaggataaaatctcagctttgttcatagctgccgttcacctgatgattaaaaaaaatgtggtactaacgaggagctgtcgtgatgtttggtgtgcctaatccttgtcttcgatggccaagggtaaacgtcgtaattaaggcccacaaaggcacaaaccgtgattacgcaatgatagcagactttatggtacggctaacatgatggtatggttgcgccgacactagatggtaaagtactgcaattagcggtagtaagtagtgtagtaccactacagaagtacagtactaacattgttaggattttgcagttgagatgtgggccctgtgagctaaattatgaggcccacaagacagtgtaatgtcctcgctgggaaatggaagcgaagccggaagcgtggcaaggccccaaggccggtggcaggtcggtgatagactaattaaattaattagtacttgacaaccatccttttttttaacttacggaggactgctagacagccatctgatgcatatgctccgaggaaaaccaatgcatgcatgtatatacagctagctagcccacatttacgttctcagaaagtaattaattccaatattctaaaatatacatagccctttaaattttagcagcatagctgatgaggacatcccacactattacccgctggcagagacgctaaagtcgagcggcgaccgtgtgagcctctgaataatcccacattgcttagcttgggaggaggaagccaccttaaaagggagagccacccttcccctattggactagtcttttaggaagattgggcatttccccgagtgggtgtgcctatgaactgttggggtccgggtaaccttaagttattgggcctcggccaaccccacctgggggcggaagggactaaaaggctgggcgggactaaaaatatctttagttaatattcttaccaagataactggaagccccaaccgctaagaatcctagtgaacctagaaaaagaatacaggcccagaaaaaattacctctttttcgagaacctttcagaagttctaaaagattttgactttactttttttgattctgaatattcttaccaagataactggaagccccaaccgctaagaatcctagtgaacctagaaaaagaaagctaagaatcctagtgaacctagaaaaagaatacaggcccaaaaaaaattacctctttttcgagaaccttttagaagttctaaatgattttgactttacttttttttattctgaaatcgccttcgccaactagatactcctgtaaaatagttggttagatacattaactttctattcaaaaagcggaagggaggggggcgggaagggactaaaaacatctttaagggagggggcggaagggaccaaaaacatctttagtcccgctttgaaatctaaattcgggcggctgggcggaagggagggggcgggaagggactaaaaacatctttagttccgctgggcagaagggaggggggctttgaaagctaaagtcgggcgggaagggactaaaaacatctttagtcccgctgggcggaagggagggggcgggaagggactaaaaacatctttagtcccgctttgaaagctaaagtcgggcggaagggagggggggcgggaagggactaaaaacatctttagtcccgctttgaaagctaaagtctattaaggaagggactaaaaacatctttagtcccgctttgaaagctaaagtcggacggaagggagctaaagtctattaaggaagggattaaaaacatctttagtcccgctttgaaaaagtctattaaggaagggactaaaaacatctttagtcccgctttgaaagctaaagtcgggcggaagggagaggggcgggaagggactaaatagtcccgctttgaaagctaaagtcgggcggaaaggagggggggtgggaagcgtcttgcttagcttggaaggagggcggaaggaagggaggggggtgggaagcgtcttgcttagcttagtcttgcttagctttgaaggagggcagaagggaggggggtgggaagcatcttgcttagcttggaaggaagaagggggattaaggaagggactaaagacatctttagtcccattttgaaagctaaagtcgggcggaagggagggggggtggaaagcgtcttgtttagcttggaaggaggaagccaccttaaaaaggagagccacccttcccctattggactagtcttttagggagattgggcctttccccgagtgggtgtgcctatgaactgttggggtccgagcaaccttaagttattacttattgggcctcgaccaaccccacctgggcccttgtttaagggggtgggaatgatgaggacatcctccactatgggcctcagccaaccccacctgggcccttatttaaaggggtgggaatgatgaggacatcctacactattacccactgtaagggcatcctccaatattaaggaagggactaaaaacatctttagtcccgctttgaaagctaaagtcgggcggaagggaggggggtgggaagctttgaaagctaaagtcggacggaaggaaggggggtgggaagcgtcttgcttagcttggaaggaggaaggggggtgggaatgatgaggacatcctacactattaaggaaggactattaaggaagggactaaaaaacatctttagtcccgctttgaaagctaaagttgggcggaagggagggggaggaagggggggtgggaatgatgaggacatcctccactattaaggaaggactattaagcgctttgaaagctaaagtcgggcggaagggagggggaggaaggggggtgagaatgatgaggacatcctccactattaaggaaggactattaaagaagggactaaaaacaattttagttccgctttgaaagctaaagtcgggcggaagggaggggactattaaggaagggactaaaaacatctttagtcccgctttgaaagctaaagtcgggcggaagagagggaggtgggaagcgtcttgcttagcttaaaaggaggaagggggtgggaatgatgaggacatcctccactattaaggaagggagggggtgggaatgatgaggacatcctccactattaaggaagggactaaaaacatctttagtcccggtttgaaagctctatcaaccgggaaaaaaattggcataagcggggtggttgcacgcggatcggatcaatacaatctcctcctctccttttttaactcatctcctcacagagtcacccttatctcttcctctccctcctcccttcctctcctcctctcccccctccctcctacccacctccccacctccctctgcaacgaagggacgcggagggccgggcgaggcagcgtggcgccgcgctggcggctggcggcctcgcggcggcggccgaggacgcggcaggtggcgcgcggcggctgccggccggcgtggtggcgcggcgcacggagggccgggcgaggcggcgcggcggcgtgctggcgcgctggtggcggagccggggacgtggtgggcggtgcggcggcggccggcgtgtaggatcgagatgtcgactagaggggggtgaataggcgatttaaagaataaataacacctaatcaaatctaacctaagttgctagtccaccgctcaaccacaaagccaccgcacgcccccttcgtc

SEQ ID NO: 9390 - DNA, 20140 bp, Oryza sativa
tcttattaaaaaaatttgtgcaaaaaaaaaaaatgaaaagttgtgcttaaagtactttgaataataaagtaagtcacaaataaaataaataataatttcaatttttttttgataagatgaatggtcaaacagtgtaagaaaaaaaatcaaaatcccttatattatgggatgggagagtactaacaagctggagcactgcacaaattactgttttcatggggtcctggcagtagaattttgcttgtttttgtcattttcgttgttattagctcgtactgcctctaattatagacatgctaaaagcatgaaaagatgctctacttgtttaagtttaacttggttgtcttttcagattccttggatctgaaagtaggcaacagagaggtgaagaaaaggggtgacaaactgaggtggcttgctatggcagatcaggaccaactagtcctaatccccaagagaggcagtggttttgagcaccttttcaacgcagatgtagattaaagattttgccaccagctctttggtagcattattttcttcaagtagggaattaatcaaactaatgtgagcggagagagtagggcagtcttcggctgagttcatttcagcaacataaaacaacaattttatcgttcttcgttggcacattttatgaatttataaatagtatgttttgtaaacaaaaattatatataaaagttttttatgttcaaaatcaaataaactctcttttgaatttataattgacggagcgtggggctcctcaccgggagaccgcgcgggcccccctttgccggttcggccaggggcgctaggtgaggttctaagccctcgatctgtggaatgtttcgcgagagagcaaatgcgcaagacacgggcgatgtagacaggttcgggccgctgagaagcgtaataccctactcctgtgttctggtggatctgtgtatgaaggagttacaaatagctggagagcaagagagttcaaactctaaagaccctcttcctctttctctcctctccgagctccggtgtttttccccccctcttctctcttttttctcttaagtgggcaaggtcctccttttatatctcaaggggataccacatgcaccacttctacctactcttcttttgggtggggactcaccttatcttccaaaaaaaagtggcttgcgccttcgcctagaagctaaatcacagcttgtctttgagtgaggcccagcgtcatcactcgcctgacaccggggatctccctgttactccctcattaatgggcggagatttgccatggctgctgtccgaatgaccctccgatgggatgggccatacctacctccactccgccggaagcaggcgcaacgtgggagcacggttgtctgccgatgacgtgaccggcgtcagaccagtcacaaaccggtcattcttgtctaccacgcgtcagtttagcatgccacacgtcagcccttcttcataaaatgacttccttgtaatggttgcgatgaagcctggtatgaatctagccgggactgacgtgctaactccaggagttagcatgctggctccggctagggacgagtgcctagaggctctcattattccgacgggacggggcgaggcgtgcgaaaggccgcctgttgccacctaacccgcgatctgaccggtctgtgaccggtcacactgtgacctctcacggaccgaacgagtgtgctgcgctgcattaaatgcggcgtggggcgctcgtccaacccgcaataaacgcggttaggtgagcgccgctgtgctcacctaacccacacacgtggcgccaaacccgcagggggtcggggcgccctagccctcagggccgaaacgggagcggcccaacccctcggggagacagagggaggggcggccacatcaccctcgggcccgacccccccgagggggtcaggccacgtgggtgaccgcggctgccccaaacctctagtcaagatacccccggtcccatgtcaccgacaataatagttaatatgtaattaatcacgcggtagtgattcattctatgtttcgaacaacgaacaacttcaactgaaatgctccgacaaacacaaccttcgtatgaattgatacacgtatattaatatataattttattgcgaataaccagagttccctaaatacatgtggcttcatatttaaaacaaattttcgagaaactattggagtttcagcctaaaagggaaacctgtccaaatacttgtgcatcagattgtgcatcagatgattctatattgcttaacaaactgtacaacagaaaataaactaatcctaacttttcaaaaaaaaagagaaataaattaatcctaaccgagcctttttttctgcagtcagtatagtcacggactcaattttccgtcagtagccttctttgcaatccaatgaatacattccgttagcatcgcgccggcgccccactatgcagtaccaaaacagctccctgatgggtatacacctgtagcgatgttctgtacgttgaatcgtgcgttattcgccatccccattcaccaatcgccacctgaacgtacgtgaatcgcaccgtccgaaatcaaagcccgtttcttctgacacagatctgtgggagcgcggatatataaaagtgtcagcgataggtggggtgcagctgtgatgtgagggctgggttagttactaactttttcttcaaattttcaaattttatatcacatcaaaatttttctacacacataaatttttaatattttcaaccacatcatttcaatttcaattaaactttcaaatttaacgtgaactatacacacactgagctttcagatctgcgttttagagcaggtacaatagcaggctataagccagctgcaaacatattttaagtagataaatgaggagaaagaagggcggtgggctacagatttatagccagctgcagtacggactctaagacgcagtgtctgtatgacaggtggaaccatatattaatagtgtagtatgtaaatattgtatgaataagctattagattagctatagataaattgaagctagtagttggccatactgttgaacttgctcttacgggggccttccgcacacgaagattggatgcggacaacagcacgagcatgctgtttcaggaatccatccgttccacagttcccagccgcgtcgctggcgtctccctcgcgtgcccacgttcgctcgcggatagggggcgcgtacgtgcgcctcgaacgacgtgtggacgcgatggaagatgcgttctgtaccggacacatgcacgcacgcggcccgtgccacacaaaaaccgtctcgggctttgggcgccgcgcgagctggtgggagtgggacaccgcgacgatcgatgcaggcgattcgcccgggccgttcgtgccgcctgggccgttcctgcggccgcgacggcgtctcctcccgctgccttgctcggctccaccgtagcagcggcagtagcaacgggggcggaggagcagtgaggtgcgcgaaggcagccgcgcagtcgatggaggccgtgaagaaggacgaggaggcgagggtggtggcgctgcgggcggtggaggcaacgcccgagtcgttcgcgccgttcggccaggtcatcgccgccacacccgacggcgacgagttcggcccccacgacgcccagctcgacctcacccgcggcatcccaaggtcaggatgcaccacccccaatcttcttgcagttccacgaactaggaatacacgcgtcgcgcgggcacacgttacacgtagggcggtgatgcggtggccggtaggtgggacgggatgatgcaggcgcactgggcctgggtcaaccgtgaagccttctccactccactgatccactccatcgccaattcgccgtatcaactcaccaactggggaaaacgccgaagtcgaggaggggaggccgcccggtccgcgcgcgatggccatggagggggtgagggtggtgacgctgcgggcggtggaggccacgcccgagtccttcgcgccgttcggccaggtcgtcgccgcctacggcggcaagcgcttcggtcccaacgatgcccagctcgacctcagccgcggcgtcccaaggtctctcaacccacacgctgcctagctagcatcgatccatcgatcccgtctgcatctctggttcctgcacctgatttaggcgaaaggttcccacttcctctgatctttttttttctctcctctacttggcaggttctacatcatgaggttggagaagcggccgctcaagttctggacgatcacccaccacgcgagcgtgacccagtgcctcggctccatcggcggcgaagattggtacctcggcgtggccaagccctcgatcgtggaggatggggcacacgagcagggcggcgatgggaggaagcccgtgcagtcgcgtgctggccactactaccttcctcccgatccagctgaagtctgcgtcttcagggtttccggcgctaagtttctgaagctgcacatcgggacctggcatgcggggccgcagttcaaggcggatgcggtggatttctacaacctggagctcagcaacaccaatgtgagttctaagctgttgaattgaacttcgacttattagctattggttcttgcgttcagtaatactggaaaaaaatggcttctcaactttaaaaggtaggaatgtttttgtttgttccattttgctatgcacgggcgcggtgcgtttacgcatggccatacagttgtgtttgtttatatatgtcttagagcctgatacaattttaggaataaaacttattcaacttttaatttcaccaatccttatcactgacagaagtgtgtgatcttgcttgcaatactcagtactacaatgtttggatagtccagcactatgaaaacattcttttgagtaaatttcacaaaactacaatttagcaactttagtaaggtatttcgcagaacagcaacaacagaattttatcagaaagctataactttatccccataagttgtatgattgtatgtaggaattgagaagcatgagtacttcatatgtgtatgacacgccacccaaacttggcacacaaataagagaaattttacactacttgagaaagtaccttgaggtacctaaatttttgataccttgagatatacctagagttaccaaattttactatagaaaatatggtatctctaagtaccttctcaaggatggtaaaattaccccacaaataaagttgcagttttatgataaaatcatatactgttgtcacagttctctgtaatggctagctaaagttgtagaaaattgatagttttgataacaacagttgtagttttctgaaatttactctattcttttagaatagttttctatggtgctgtgggaaatactatagttgtgcctccttaatagatatttcatgaaacagtgcatgaaaatttcatctttgtgcactgtttacatcaaattcttaagcccttactcatcttttaggcattttggagagtttatcaggttcaatctggttgcatctgtgtatacagttcattgaagcagtgtgctctgtggttgcatttgtcttttagactaaagcagtttattcaatgaccgatttggcaatttctattgtcttcctagttaataaacttggttctgcttattgctgacttatatgcatgttttcgtaattgtattcttgccaataaatctagggtgccagtgtggtaataatcttctctaaatgaattattgtcagttagagttggaaacttatctggtagtctctgattgctggtgtgtccagaaccgaaatccacagagtcttgtttctgtgtcacaagaatggaccaactgaacctgccggttctaaattttgcgatggactccagatatctgatgcttgtctaatctaaaatgagttagtaattatctgctagttggaggccaatgacaggacccatattcctacttttgttagggtgcagaaataacaaggacattctttcgaaaacaactcaatatgttgtagcactaaagaaagtccaacaatctagttggtctgccaagtttggtggtcgtccctctttccataacttctgataagtgtctttcttttttagaggaacttttgtatacatgtcaattagtagcatatatttatcatcatctttttgggatgtgcagttatgttactacaacatgtcattgctaccatcagacttatgttcaatttttatttgacaaactgccatttctatctcgaagttaaacttttccttttcccccttgtgaacctttgaaaagggcagggagttcctgcaattcacctcgaagttaaactgagcatatggtgtttgtttcagtcataatacttttgcttatttcttttcagattgtcgaccacactacgcacgatttcaagaaagacgacggggtaacttttgtgattgaggactgagacacatttcacaacctaaggctgggtaatgaatatgctagactgtttgcatgtcttgtctgtttcctgagtttttaatgaacaatcgatatgcaaatgtgatgtacaatatgcacatatgagctgcttgttcaagtcattgtaaaaaacaaattaagaaaaaagaggcaaggggagtctctagtgggtacacccaaaagggcaaaaagccgtccagtatgaaatgatgttgctcttttctgaaaacaatatgaatgatttgagtcaataagtgatgtatttccagagagagaactatcagacaatggactttctggtatcgtggctgtcatactatgtttgtgcttgtggtgccgcgaaaaatcttactactcgagtattattgacataccaaaatctcgttatcaaggaagtgacattggacgcgcaattctgaacgcggagagatcggcagggggcgccagggggatcgacggtgacgagacggaacctcgacaacgacgcgccctgccgatccgggcagcgtttggactttttttttaaaagccccgatttggatcgatcgcggctaacgattcggccacctgtccgctgggtcgatccgtagtaggcgcttggccggccatgacgcacggcggcgccggcggcccggcctctcgccccatacccacggcggccgcacgccgcacagtcgcggtcatacgggcgaacgcggtggaagatccaggccgaggacgatggcgcgacgtcggcccccaggctcaaaaaaatataggaaaattattcgcggctttggcctccaaattcctctcgcaagcgccacgtttccccgacgtccacgtccattatccggcctggtcagagagaaaaccgggcacccatgctgattagccgctgcttagcaattgattatggattaattaacaggataatactggagtactagctctagctgctgctagtagtaatcagctgctcataaaaagcaatcgttggagaagcaaaagcgcacggcacgagggacgcccaatcctccgtgtccgttggctcaactcgaccaaacaaccgcctttttttttagtctccactctctccacttccccccctccattgccgccccgtttctctctctgatcggcaaaaaagtggatgctccggctgctcgaccgccatggtgaggtctctcgacagctacccctccatcaaagatgtcacctacaggttcgattctgcttcccctggtcgaaaaattggttcttggatcaaaaataactgccaaattcggttcttttcgtcagttatgctgattttatctttagtatgattcaccgagtatgtggtgtagtttccctaatttggatttagagggaatccaatttctgaagtgctgttgtctacttggcggcagctgcggatactgcgggtacgcgctgaacctgagctcgtcgacgcggaacacggcgaacatcgggtccaagtacgggaagcagatcaagaagggggtcgtctccttcttcgcggtggacgagagccggttcacgcaggccgacgaggtcacctgcgtgccctacttccactcgcggcgctcctgggggctcttccggcggaggtcgcggctgctgtgccggaagtgcggcggccgcatcggcagcgcctacgaggaggacgaacccgccgccgcggcgctgcccgcgtgcgacggcccggacgacctgcgcaccacgagctccgggagcagcggcagcgcgtcgagccagaagaactacgtgatcaagatcaacgcgctgcagccctcgtcggacgattctgatgctgttgcctttaccctatgacgattctgctgtagcctgtcatctcttccggcccggttgaatttgctgctgcagtcttggaattcgcattgggagtgcaaaaagggtgatattgcagtcaaggaagggatcgccatggcagtgagcttttggaagggtttgataccatcatgatcttgagtcacctttgctgtctgtagtagactagtagtgcttttcttttcttctgtgaattggtgggagtatacactggttgttaatttttggatctgttaatattggaaaatgacaaagtttgctgtatgtggcttggccctattgagtttgtaccatctcatgaggttcataggggttgcaattttgagtcatcttgctttactggtatgtcttaagtttctctacacggattcttcattagtcttctaagaaagcatgggttgttgcattgtgtcagttactgaatataaattctctgttaaactttaaattatagtcttttggttttccagaaataggcatgtatcttcagttttgttaagctgataaggtgaaaccataattctgatttctgtttatcagtgtaattttcctctggtgccagctcgtcaagaaatgggacttgggagcacagaatgaactcatgtaagcagggctccaggtgagctcatgttcatacaaagtttttagatataagtaacaacttcatacaaagcagtaactcagttgtatagcatggtaaagagcgttgtaataaccaagaaatatctgttctaatccacaaaatttgatatgcaaatagcaagatgaaggatcattttctgagaaagatgtaaaattgtaaattttactgctcaaagaatcactatcagtatcatatacaaaggagctctttagctggagcagtacaattgtcaggtttccctactagctagtaagaaacatacatacatttagtagagatagttgatatcatgttgtaataatcaaatcaaattaaaaaataatgtaaaaacactttagcactttatatgattgtcgtagtttactctatcattctgcttcaagtggctattgagttggcatgggtgtattctgcaagaagtgtctgaataatataagtgcttctcgaggccggtgtagtggtacctcatggcctgcgcctgctatagtgacgagagttaatcctttatacacttgactccaacctccaacctgcaagaggaatatatcatgtattcaaatgattcattctgacccagaatttgcttagaactgcaaatagtttttagtatactgacctttccgtggtcataccaagggtaccaattgaccatagttggaagcttaagagcatctattgagtaccttgttgcagtaacaggaactacagcatctgtatccccactgtgaaaaggagtaaagaaaatcacatagcaagttaagtcatctcactaaatgttagccagcacaatataatggattaactttgtagcagtagtaactcattagatcgtagtattgaatcaaacaatgagttgaagtactggactgacctgaaaacccatatcctgataccagctgcaatcaattcttggtagataggaagcatagatttcggggaatctgcccagtatgatccgacaatatcgctgtagaacagaccaaatgagtatatgtgtgtgtaagaagagcagaaattttaaggcacaattaacatctatatttattaaaacctgcaagttttccatgaatattgaatcccagtggtgttagcatgcatcgctatctgcacttctggccggttgtagtaaatacttgagtatctttctgtgcagggatcatatgctctggataaccaaggctgtggatggcaacatgatgttaggtacaaatagtatggccaacaattatctaccgatatacatatataggcatcaaatcaagctgaaaaaagacatgctaggcagaggaatgagaacaggaaaataaaacagcaaattctaaggttctgcaaagtacagtataatattgcagaaacatcaacccatgcactctatctgatctagatagggtgatataaccttttctgtattcaagaagtaccaaatgccacaataggaaataaacgcaatccattatctaaatatataacaaaataatctaactgaaatcagtaataacttcttaaaaaagaaattagttctagccaaaaggtatatttactaaacaataagtttattattgcatcttttaccacattatataatggatttccaaaaggtaattttcctcttttatgtgttgcaatgcagctactttcttattcttaatcagcacagttcaatgtgtttcgagtagtaaattcactgtttcatgaccatctaaatagatctgttataatgggtttaaatgatctaagtagtggaactagatctgtgcaacaaagtcaagagggtgatctaagttatcaaaagtcaatgagaaaaaaagaacacttacgtagcgtcctcccaagccaagtttgagagaggctgtattattgcagggctttgtatacaggctgtaaggatcgatattgccttcttctgaactggctaggttcaggttctttagacattcaggagaagggtgctcagaggactcaagcaagcatgtcttcttcaggttgtgataagtgttgtcagagatgaggccatgagtccaccaatactcaaaggtaccaagatagtcgtggtagtcatcagtaaccgcattacccacctaatttttcagaaaccaaaaaaattcagaacatacacatactcaaactagaacaggcagaacatggatttcagagatctaccatgaatcctttgagattaattattggattctgaatgcccttgttctgttcatagatgagctgggctaactggggaacgtaatgccctgaaagcaccaaggaaatacatccctgtaagtctttcatccaccaaatagcaagaacagaaaataaaataaaaacttatctcatgcaaacttacctgcatagctctccccagcaatgtagaactccctgtacttgtattgtgggaatctctccaaccagttcaccagaaatgcataagcatccgatgctacaagattaaaaaacaagtgacaagtaatcagtaactgaatcatggtaaatcagggcttagtggatagctcacagaaacaaatggcctcgaatttgtttacctgtcttagcatctcctgcgacgtacagatccaacgtcttgttcgagtacgagaaccccacgccggccggcgactccaagaacagcaaattcgccgctgcaatcaccaacagaaattaaaaacgaaattaatcaacagccagagccactcccagcactgccattgttagcagcatcacttgctgtaacaatggagctcaagaacaacaattgcaaaagctacgcacccttgttccaagaattggggttcaggtacagcgtcttcccgtcgggcctgatccggaacgggccgacctcctccgacgcgccgtacccgaccgacgagcaccccggcccgccgttgagccacaggacgagcggcgcgatgggcccggccgccggcaccgcctccaccagccagtagaagagcgcgcggccgtgcgcctggttgaccgtcacgtagccggagtactgcgagaacctcaccttcgccggctgcccggggagctcccggatccggtcgctctcctggtcgcccgacgccgcggccgccactgacactgacactagcagcagcaccagagccgcggccttgtgagccattacgagctccaaaatctccaatggccggaccacgggacacctgagcgtgccaagcaagaagccttgcacttgctcaagtacgcaacactgctgctgctactgaacaagatgagctataagaaatccagagctactagccaccaaaggaggccaggttgcttgcatggatttcagtgaggcggggtcgtgagctttgatccttacgccaccaccttcctgcactctcattgaccaaggacagctcaagaacccttggcaaccgctaaagaaatggaggcggcgggaggacggcggttgagctcattcgctctgaccagcggcgcgcgggacagagaggtagtgtgcggagattttctcttgctttccccgcgccggggatgattgattggcgcgagtacagctcagggacggaggaaaagggcggatcagatcgcgtactattggcacgccgaaccggatggattgcgagattaggtaagcggctgcgtgcgctacagatcgggcactcactggctcactgctagtgtgctagctcgctctagcgctgtagcgcagcgacgcggcggggcaagtgggggtgtcggcaactcggcattagtatagtggcagtggcggtggtggtggtggcggcggcgctggcggcgagcgagggcgcgcgtgtgaaacggaggtagaagaagctgaaacgagcacatgggatgggactgggagggaaacccccgcgcgcgcggcagcggcagcggcagcgaataacaaaattcgcggaggatgacgcgcgcgccttccttgccgcggcagcggcgtccgctcgtgcgcgcgtgcgcgatggaaagcggaaggcagaaacggagcacgcggcgcaacgtgattgagatcgtgagggtgatttgagatggtgaggcgtttgctaactttgaggcgctcaagacgggatttgcttacgagagacacggtgataatgacgagtcgtacgaaagaacgagcagtctcccagaagaacagtcaccaaactgacagcccgcatcattgcgtcacacgaagaaagcgagatttgtttccgtgagccccacatcagataggagtactagtagtactactctgttatcgatgctccattttaaaaattctccattttgaggaactcgtattacatgagcgcatgcaggcggtatctaggtttggcgtttggccccatgttgaggtgtcgagtgccgacgagctgacagcgtcgaggcaaaaacagtagaatagcatcgcagcatgttgcgacatcgagaaaggaacagtataatccctcctgcaggctgcaggaatcctaggtgattatcccataattccgggcgaagtggcaattccaatttcatgggtggaccgtggttctgaaacttcaccagaatcctagcatttgcggtcgaactccagaggaccacaagcacacaactacacattctcaatgctgcaaccagcaaccttggtagtaacaaatttgcagtaaagttcctgtcatgttctttgaaccggccagtggccacctagctgataaagtaaggcctgttttagttcctaactttttcttcaaactttcaactcttcagttacatcgtttaaatttcaatcaaacttctgattttggcgtgaactaaacacaccctaaaagaagaaatttctgccatttataactaactactgtaactgaactgactctcaaaattcagcaatgacaaagccagccgaccgcatatcgaaaggccagcaattttaacttgccaaatcggattcaggctcgatggcggagcggagtccctgccgaaccatcatctgcgcgtagaattcggcgtgttcctgttcaggcaagcaccaaagtagcaaaagaaaagttaactaaagctatagcaacatactactagtactagattactagtagcatgtgatgggagcgtgtgtgttgccgccattttcggttggtttcgaactaaaggaggcgggcgtgaagaggctgtggaatttatataccttcacggcgacaatgacgagcgcggcgcctttctgccgggacgcgtggaagagctgccgcgccgcctccgcggtcacggacggcaccacctgcggcaaggccttctccactgcacacaccgcacgcgtatcaacacaagtcacacagcgacgcagccacgcaggcacgcagcatgtttatgtggcattcacagcgttagcgatgcaggcgagattgttcagcttgcagacttgtaggttgcagcaatacaggttggccaggttgtttcgtgagaagagaaggatttgcgtaccaagcttctcggtgtggcgggcgtcgtctatgagcaaaactttgtagctgtcaccgcttccagagcccctcctgtccctcatccttccggtgtcccctcctgtgtatacagtcgtaaatgcgagttaagcaacactgcaaacgaatgacaaatctctctacaaaggacgcagaattgcaaaaagtacatcgttgcacataatcgataaatcaccttcttgtgtcacgggaagcgtgtcgagctgggactggtcgaaggccggccgctccagcagcgcgccgccgctgctggcgtgcggcacggccgccaccgccaccgccttcctccgccggtggctgactctttggtccacggagacgctccgggagaccggagcggcggatgcggtggtcgggaagatgagcgcgccgcacgcagctgctctgctactgatggccatggcagtggcaggcgttgtcatgtcggaatcggaagcagaggagatcgatgtatcgcgtttgatgcgcgcggcaagagttcgctccttgcgtgagggcaatggagggggagaggcgcacacgcacaattcgcaaccggtggaagatgtgagctttgttcttgtggcgatggtacatggcaggatttattcagggtttcagccaagaaagcgccaaaaagccattctgtcgtgtgcttgagagcatggtccatctgtgcgtactcggtagggcgaacgatctgtggctaagcatagctgacccggggaaattgggggctattttggattgaagccaaaacatgtccctaccaaaattttggtaacttaaatagtaaacgtgctagtttggattgaaggccaaacaattggtagtgtcgttgctcaatttggctatattctagaatcttcttcaccatgtatctatctatctatctatctattatattattaagacagctcgaaaaaaggcaccacgttcactgtggagactagaaattctcagattaatcgaagaaaaagaaaaaaaagagtccaaacagaaatacaatctgaaaaataactggaattcagaatttaaaaaaaggctatattgaaagaggagtccatctaaaaacccaatacgtgattaattaaaattcggaataataaataaataaattgttgaaattagaaaaaagaaaaaagaaagttcaagtaggaatacaaatttgaaattactaaaagaataatggtctagatttgttgtacacaagataatcatatcaatctaattatagatcatacaatccgtactaggagtccttgtccgtttagaaaaatcaattgcaaaactgtacagtatagagctatgattctaaaccaacatacattgccgcacatatatagggtggagataccagaccagcacgcttaggctgcagcagcagaaaaataatatagtgccctcatttcatacgagtaagaacccaatacgagattaattaaaattcaaaataaaaaataaaataaaatccgaaataagaaataaaaaaagaaaagaagagtttaacttggaatgcaatttaaaaataactgaaattcgtaataaaaaataaatattatttaaagaatacaccatctagaaaaatacgagattaattaaaattcgaaatgaaaaataaaataaaatccgaaataagaaataagaaaagagaagaagagttcaacttggaatgcaatttaaaaataacttaaattcataataaaaattaagactatttaaagaatacaccatcagaacactgtcagggttatggataccacatacctaatagtagttgactaaatctcggcaggatccaccacataccatgtactatacggaaacaacctgcggatataggaggagttccggataaggaaagacaaccagagttctacatggaaacgacaaggactactcggattgtatccatattggtttctttatttttacttggacaaggggacacctataggtataaatacaagcccccctaggaggagaggggagagaacatagacacggacaatcaacacacgaccacctcaatcaacacccaacacaatcgacatagaagcctacatacgccaagacacgccgccggatatcgacttcagggataagcacggctagtaccctgcggtgtctccggatactgtcaggagagacgaaagcgttatctctgatctcgccgggcacggattcgaggaggaaggctaccctgttgtcgactacgagtcagaacttcagaccgccatatcgacaacagttagataggctaccccaaacattgtactggtgtgattatggtgaataaaagcaacgaccggctccggccaacaggatgtagggttattacctgacaattcaggggcccgaacctgtataaaaatcctcgtctccgtctcttttacctcagtctcgcgtataccctagcaccgacgatcctcatatcatgcaaataccagaaccgcgacatcagacgtcgacaaacacataacgagattaattaaaattccgaataattaataaaataaattctgaaaatagaataaaacaactaggaatataatttataataaaatctatcggaacgaaaaatatggaaatttcaaaaaaaaaatcatctagaacacaacgatgataaatgataataaatatctgagaagcaacagggttgtaaaggagtagagtggtgacagttagggacatctaaaaactattaacaaaaccccaaatagaatcccaatgacaattaaaaggagtgacgacggacaggccgttaagcagcacggtcacgacggttgtgggatttctaaaaaattaaaaaaataaacctcaatgataatcacgttcgattttaaaatctcaaatataataaagagtgggaggaagtgggcgagccgtagaggagtaaagtgacaaagccactgacggtttggtgggactttagaaagtaaaaaattgaactcatacgataattatgtttgattttaaaatcccaatgacaataaagagaggaagcagcggatgggccgtagagaagtataatggcagcttttaatgggacttctaaaaataaaaaaaaatgaaaccaatgagacaataaactcaaaaaaactataagatccaaaatttaaaggttagaaggagaatgaatagaagccgtggtagatcgagcaagcaaacaaagaaagggtgaaaaaaaagtaagggatagcaactgatgtgacttttataaaagttataaaattagaaacatggggatgatatggtttggtctttcaaaatcttaagacaatgagatatgtattgaataaattataagtaaaattatattaaaaatagataattttgtatggtgttagccgcacaattacgcgggccacccagctagttatattattaaaggaatagaaaaaggagcctccacgttcgctctcatgacctagaaattctcacattaatcggagaaaaagaaaaagtagagtccatatagaaatacaatttagaaatagctgaaattcggaattaaaaaataaggaatattagaataggggactagagtccatatagaaataaaatttagaaatagttgaaattcagaattaaaaaataaggaatattagaataggagattagagtccatataaaaatacaattaggaaataactgaaattcggaattaaaaataaggaatattagaagtagagtatagagtccatatagaaatataattaggaaataactaaaattcggaattaaaaataaggaatattagaagtagagtatatagtccatatagaaatacaattaggaaataactgaaattcggaattaaaaataaggaatattagaagtagagtatagagtccatatagaaatacaattaagaaaagaatagaaattcggaattaaaaaataaggaatattagaagtagagtatagagtccatataggatttttaaaactaactaaaatttggagtaaacataataaaattaaaagtagagtttagaatccgtataaaaatacaatttacaaataactaaaattcaaaattaaaaaaatatgggaagaagattttaaagtcaatataggaatacaatttagaagtaactgaaattcgaaattaaaaattaaagaatattgaaagatgagtttagagtccacatagaaatacaattagaaataataaaaattcagaaataaaaataaataatattggaagaagagcatagagtctatatagaaatacaatttacagaaattttggaattaaaaaaatattaaaagacgagtctagagtccatataggaatatatataatttacaaataactaaaatttgatattaaaaataattaataactaacacgtatataaaatacaatatggatatttcacattagtagttttgtaaagttattgcaaaatttaaaattatgttgtcattttaatatattagtataatataatgagaaaacatatatgctattatatatgtgataatataatgatgctagccgcgtaatctgtgcgggccaccatggtagttatattattaaaatagctttgaaaggaggcaccacgtgcgctgtggaagctagaaattctcacattaatcggagaaaaagagaaaaagaaaaaggagagtccaagtagaagtacaatttaaaaatggttgaaattcgaaattaaaaataagcaatattggaagaagtttccatataagaacccaatacgagattaatcaaaattcgaaataaaaataaaataaaatccaaaattagaaaaggaaaggagagtaaaagtagaagtacaatttaaaaatagctcaaattcggaattaaaaataaggaatattgaaataagtttccatataagaacccaatatgagattaatcaaaattcaaaattaaaataaaataaaatccaaaattagaaaagaaaatgagagtccaagtaggaatacaatttaaaaatagctgaaattcggaattaaaaataaggaatattaaaagaagaatccatataagaacccaatacgagattaattaaaattcgaaataaaaataaataaatccgaaattagcaaaagaaaataaaagaagagttcacgtaggagtacaatttaaaattagctaaaattcaaaattaaaaataagcaatattgaaagaagaatccatgtaagaacccaatacgagattaattaaatttagaataaaaataaaataatatctaaaattagaaaaattaaaagagagttcaagtaggaatacaattttgaaacaactgaaatgaaaataaaaacattaaaataatacaatacgatattaactatttttttaaaaaaaatctgaaattataaaaagaaaaataagatttaaattaggaatacaatttataaataactaaaatttgtgataaaaataaagattattgaaagaaaagatcatttaaaacacatgacgagataaattaagtaacatgcctataaaggagtagagtggtggcggttgatacgagatataaaaattgctaataaaacaccaaatagaatcctaataacgactaaaaggagtgacgtcaggcaggccgtgaagcaaatgagtaaggcggttgtcgggacttctagaaagtaaaaaaaacaaaccccatattcaatttttaaaatctcaatgacaataaaaaggagaacagcgggcgaggtgtataagagtataattgcagagccgccgacggttgacgggact

SEQ ID NO: 9391 - DNA, 11684 bp, Oryza sativa
cagatgaggtcgtcgcggaaggactccggcaacgacgtgcggatcccgccagcgcgcgtgcgcgtggggccggtggcgcagctcctggccgccaccgcctcctcgttgccaccgcgtagccagccgcaatcgaccgagcctgccgccaccgcgccgccctccgccggagcccgcggccgccgccgtcgaccacgccagccgccaccacgccgccctccaccggagcccgcggccgccgccgtcgaccgcgtcagccgccaccgcgcagccctccgatccgccggagcccacgcccgcgcctgccgccaccgcgtagccctccgccagagcccgcgcccgccgcccgtgcggcggggatggcagggagggagctagccatggccgccggcgagctcttcacacgtgggatggaggaggaagaagagccatgggcatttccgtccgggatggcattttggcgaagacactctggttgaggatggtattccagcgaagcccgttttcataatagtattctagcgaagccattcttatgggatggtagatatgcaattttctcacaggcgccgcacgcccggactcctcacactcgcgctcacagcctccagactccagcaccatgccacgccgccgcctgcctccaccgcgccggtgccacctccatccgctcacggcccaccgcgtcggcgcagcctccagcatcgcgccggcgccgcctccgcctccgcctccgccctccaccgcgcggtccgcgccggcaccgccttcgtccttcctcggcccaccgcgtcggcgccgcctccacctccgcccgccctccgcctccatcgcgccgcctccgcctccaccacgccggcgtcgtccttcaccaccgcggccgtaggattcggcgcacctggtggagattgacgggattcaaacatagaggctagagcttgatttgtctttctgaatctgcatttgcatatgcatcttgatctattgagttgcttttgatttgtcaaccttatatttgttatttggcttttgtgatttttttgagactgctcgggttattcggtcatgaccgagaccaaaccgaactaactgaaaaccgaagtgctcggtcctcagttttttttttgaccgatcggtcttaagttttttatgaccgaaattttaaaaagaccgagaaacagaatcgaatttctcggttagaccgaatgcttatccctaagtgcgcttagagattggacaaaggctaaaggcgccaccaatcccgccgccattgtcaaccgcatcatcaccattaactacaccatcatcatctcactgccattttgccgctaatcctactcccctagcatccatctccatgtgtcctcctctcctctccatcgtcaccattaaaaaatatgcatttcgacatccaaaaaattgttacgtcaagcgcattttggcatccaaaaaattaaattcttaggacaagcgtgacacccaagacctgaaaatggtattaggcccaactcattcagtcgaaccacacatatactacgatacactacttttttgtcaacgcttcatgcaaaaagaattcgtaccctgtgttgaaggttccggcctttcgggcaagccagtctcctactccctccgtcccaaaatataaacatttttagaatagtaccaaatcaaactttttaaattctgagtattaatagcaaagaaataaaaaagattaataatgtaaatttgatgttactagatttatcattaaacaaactatcataatatgcaattttttatttaaacattttaaaattttgtaaatattgttggtcaaagtagcatctcgaaaaccgggtcgaagtctaaaagtacttatattttggaacggagaaagtatttaagctgctccctctctttcaaattggcgagatggtattaatattaaggcttgttcactttgctaccatttttaaacttaactttttggcaaagttaaaaaaaaagtgactacatttagtttgttgccaaattttagtttagtacatacgaaatcttgccaaaatttgacaaccttaccaaaattttgacaatcttactaaaatttagcaatgccaaaacttaataaggttgaaaatggtagcaaagtgaacaagcccttaatattggctcctcttgcttgccggttagcttgctgctgctgctaaacactgcttgctgctgttgcttgcggctatatggcccaaggccagctactgctgctcgctgtaggaaaaagtgcaccgaaggtccccaacttgtcatcgagataaaaaacgtcctccgaccacaaaaccagatatgcggggtccctcaactatacaaaaccggtcatccgaggtccctaggtggttttcaacccggttttgtctgacgtggcggctgagtcagcatgggacccacatgggccccacatgtcagctggccacgtcagcctcatccctctccccctcttctctcccttcctcctctctctctcactcactcttgtctctgtggctctctgggcaggggagcaaggcggcagcggcggcgggagcaggggagaaaggcggcggcggcggcggcggcctccggtctcccccgccctcttcgctttgggctgaggccgccgtgctcgccccgtcctcttcactctgcccaaggtggcggaaacccaaattgatggagcgatggagatggagatggagttgttggtggggatgtggaacttgtcggcgacccacgacatctccggcgcgcgctgccgcgtccttggccacgcaccggaggcggttgtggaggtggacggtgtcggcctggaggtggacgtagtggagcacgtcggtgacgtcggcggcaaccttgaggcgagactgccacgacgcgagcagggtgaaggacgggttgttcgggttgcggtggagcgcgaagagcggcgacgcgtcgaggaggagctcgtaggcgaggaagagcgagccgttgggcgacgcggagacgccgaggaggcgcgcgatggcggcgtggtggcagtggccgaggacggcgaggcgggcggtgacgtgcgcctggtcgcgcgcggagcgggcggcggtgtaggatccccgaatcacaagaactaagccaaccagagggggggtgaatggttggtatacccaaaaaccgaaaacttttagcggaaataaaagttaccctcaaaatcgacggagatcggtctgaccgaagttgccttgccagtctgaccgctcggatgtcgtcggtctgaccggtatagatcaaccggtctgaccgctgaagctgcttgccgcgcctgtcgtcacctccggtctgaccgccgtgcacccgccggtctgaccgccgcttgccgccggtctgaccgccggtagatcgccggttagaccgccgaaacccggtgaaacacaaattgaagaactcttaaagtagatgacgactttattgattctctctgtgtttacaaagtgcaccaacagcactccttacaaaaatttcgactaaactcgaaaccctaactctaaactcaactcaattgctctctaaagcgataccgggaagcctcacgctccccctctatttatacatgaggtaggcagcctaaagccacgaaccaaactcatactaagagtcctaaacaccttaggaaaccctctagtacaagaaagaaactttacataaccaatcgtaccaaatttggactccttccaaattcgactccgcatcccatacgcacacaacacctccatcgtatgccatataaaatctccatcaaccacgtgcatcaactctagcctaagtatcccgcatgatctctgaccatcacggacgtcgtcttatccccaagccgactcccggtccatcaccgcaaatactctcccaagacatcgagtcacctacacatgaaacaaacaaagaaaccatattccgataccaagctatctccaacttgactcattagcagcaaacaatagtattacatacgtatagtatccatctagaagccataatcatgaaataaactcggatatccaaataaacaacccgaaaccgaaaccgacacagtgtcggccagtcagaccgcgggctgcgccagtctgaccgcgcattacacaccagtctgaccggcacacactgcccggtctgaccggtcacatgaaataacgatcctgcgattcacctgtaaatccaatcatctccaaaaccacttcgtgaataaattccaaataacaaaaccaataatctccaatgtccaattgttcgtcacagaataataaccaaaaacacctttaattttacaggcggaagaccgcggcggagtggccgcggagggagcagcgaaacgacgaggaagaactcaccgcggcggcggcggtgaggcagtgggaggagaagtcggcggtggcggcggcgacgtggaccacgcacttgtgcacgcttgccatggcaaatggcaatgatgccatctccgttgctttatatgcttgcagcgcgcgagcccacgagagaaaccggaagtctcttttgagcttgcaacgcacgcacagtttgcacatgcagcttagctagtgagtgacgagatcatagggtatgatgagtcctggtgtttcggccaagaagcgccacgccggcgtgaggttcacgctcggctgcggctgcaaggacgcgaagagcgtgtccgtctcggcgccggtggtggggacgccgtcgacaacggcgacgcggcgcaggagcgctgggatgaacccgtcggggtcgacgacgaccgacactcttaccataacgtccgcgttgtcgtccttcctgtgggagcgctccgtggtggagttcgacgatgacggcggcgactacgggccggagagcttctccggccttctgcgcgagctcagcgagctggagcagagcgtcgcgtcgtggggccggaagagccaccaccagaaccacgacaagaagcactcgccgccgtcgtcatcgccgttgccatcacaggaggacaggaaggagaagaacggcagcaacggcgatgccacggacaaaccaggagactgccgtgacggcgacgatggcgtcggtgtggggctcgacggcagcgtggcggtggtgaagcagtccgacgacccgctgggcgagttccggcagtctgagcgagccaggcgccgacgtggtcctagcactcctcggcgggttccccttcgtcgccacaccgacgctgctacaagatcgtggttgggccctcggcgacgacggcgagagctcccctgctcccacgccgtcaccgccgccgccgccttgctcccctgctcccgcgtcgtcgtcgccgtcgccgccaccgccgcgacgtcgccggccgccggacctcctctcccgcatcaccctgtcggccggcggcgccggtctacccagagcaccaaacgagaagagtgagagagagaggagaaagggagaggaggagagagggtgatgatgtggccagctgacatgtggggcccatgtgggtcccacgctgactcagccgccacgtcggacaaaaccaggttgaaaaccaccaagagaccttggatgaccggatttgtatagttgagggatcccgcatatctggttttatggttggaggacgttttttatctcgataacaagttgagggaccttcggtgtactttttccctcgctgtactactactgctgcagctagtcgccatgggctaggcccaagaacagcagagctgttgctgcatgcacggttagcgaattttttttatttatacatttttttattaaaatatttacaaaaataattttttgtttcgaaaatttacaaatctaattgcctgccgcccttaagaagggcgatttttaaaaatcgccctctcaaagggcggcaagggacctaaatacaaaatttttatttgtgatcaaacccttcccaccggttttaattgcttaaaaactaataatgcttattcgatactccaaatgattttaaatggaaaagtgataaactacaaagttatagatctcatcaagatctacaactttatataaagtttatctccatccaatgtcgtttgaaatgtagatctgagattttttaaaatgtgttttatattttgtaacgaatatttggatatctaaaacatcttaaatgaaaaagttattaactacaaagttgtagatctccttgagctctacaattttgatataaagttttatttcatctgactttatataatataattttaaattgtaaaattatagagctaacaagttatgctggaaaatttacatttaggtcccttgccgccctgtggaagggcgatttttaaaaatcgccctcccaaagggcggcaggcgattagatttgtaaattttcgaaacaacaaattatttttgtaaatattttaataaaaaaagtataaataaaaaaaattccacggttagctccctgcttgcttttatttttcttttcttatctaattattacggggcgttacataagtcatgcagaaaaatatttgagtttgaggatcgacttgaaagcatattgtaaaagatagtcctaaatgtaaaatccttatctttgtcagtgcccaagctacgtcatttgtaccatgaacttaaatatgatacattatattaaaccaagtttataaatctagatatacttcaatctaagtttatgacatgcaatctattttaataaaaatcttaatgctggaatggcaagtaatctgaaaggaagggagtacgtaagttcacctcataaactttttgttaaccagataattctcatgttttcgatgaactaattcagttaacaataacagaaactacaccagcattacatcaccgaattaacactaaacgttgaaagtaacatacatcagtgccatacatcatcagaatcactggaacgagcaagcacacccttcccgtcttctacaactgaatggtgacacccctggctcccatgttggtcagcctctgctccatggtgtcctccctgcccgcgccgcctgcacctcccgtcctcgtcgtctccggccgcgtcacgtcgaacttctcaccgtccccccacagagcgtaggcctcctccccgtgcgccgcgtcgtcgccgatcatgagctggtcgtcggacatgcggagcgggatgaagaggccgatgcagaggagaatggcgctggtgacgatgaggttccagacggtgacgaacagcgcgccgccgagctgcttcccgagctggccgatgccgctgccgtagaagacgccgcgcatgttcgggatcgggcaatcgagagcgcagagctccggcgtggcgaggaggcccgtgaggacgccgcccaggatgccggcgacggcgtgggtgtggaagacggcgagggtgtcgtcgaccttcatgaggaaggtggatttcttgtgcaggatcatcatcgtgaaccacgggacgctgccggcgaacatgcccatcagcatcgctgaccacgtgtgcaccagccctgcgtccatgcaaaacgtacgtgaggatttggacccatgaactgtgtgtgtgctgtggttttgatcggacgaaagatttgttaccggcgccgggcgtgatgcagacgagccccgtcatcataccctgcacggcgccgatgacggagggcttgccgaagaagatgacgtcgaggcaggtccaggtgaggaggctcgtcgcggcgctgacgttggtgttgagcacggcgaccgtggcggtgacgttgggggcgtacggcgcgccgccgttgaacccggcccagcccaaccacagcagcccgccgccggcgatcatgagcaggatgttgttcggcgagaaccgctccctgtcgctcttcagcctcgggcccacctgtcagagtcacgttgtaacatggaggcgtgtgaatagtgcaacaaacagtcgaacacgatgcatgcaatgcacggttgcacgtgtgtttacccagtaggcggcggtgaagccggcgacgccggaggagaggtggatgacgtatccgccggagtagtcgatgacgccccactggtagaggaagccgccgccccagaggctgaacgcgccgacggtgtaggagaagaggagccagagcggggtgaacgccatccacgccttgatgttcatccgccccaggagcgacccggcgagcagcaccagcgtgatggccgcgaactcgaactcgaacagcaccagcgccgcctccgcgtagaacggctcggtgcgcggcgtctcgagcgtgccgtcgctgccgtagtgcgccgtcgccgggaacaccgcgcgttgcaccaggaagtcctgcgtcagcgccggcccggccttggcccagaacgggagcagccggtcgccgaacgccatgcggaagccgacgagcacccacacgataagcgtggacgcgtaggcgtacagcgccatgaaggcggagttgacggcccacttcttcttcacgatgctgccgtagatcaccaccagcccaggcatcgactggatgccgacgaacgtcgccgccaccagctgccacgcggtgtcgcccttgttcagccacgccggcaccgccggcaggtccggcatgtacggcccgggctgcggcggcgacgccatccttaggtgcattctcagctcgaagcaaagcgagagagcgagcgagcgatggaacgcgaagtggccggctagctacgttgtgatgggcgtttaatagccgcgccgagatggcgatttgtgagtttaattattggtttgagacgagctctcgcgagtcgtgatgacgcgcgcttgaaccgatgcgaggtggggacgaaatgtggggagccgtagccggtttccgggtcaaccagggcaactctggcccatggttagactatggagggatacatacagtttgttcttccttaacctcttgttaagtctttcattgatttcttaaacttctttgcgattttttgtgcaaacgaactgcttgtcaaccgaggtccgatgcacgggaggatacaggagagaacgtaggatatgctgacagtacatgtgagtggtccactccagcatgtatgcttgtgggggcagccatgcggatgcccgctagatagcctttcagctgagaatctccaattttggaatgtgttaggggcttcgatttaagatacataacagtaaagtcgccagctttagttgggaaattcatctatttatcggtactgtgtccaattccaagttgtttagatgcatcaaaattagtcttcggtattgagtatgtacattttacaaaggtacattcaaatgatgggactaacctattaatctttcgtcagatttatagcttcaaatattatagaatttttaaccaatgaatagggcccgtattaaatgaaataaacaaataaaaaaacaaacatgtaactataaatttttcggtgtgagtgtaacaaatcttgatgcaagatcctgtggatgaaaaaatgaaagataggagccaaaaaaagctatcgcaagtgaaacagaaaaaccatttgattaaactattgtaaatttataaattcaagacagtgtataacataactataaatttaacaccaaatttattacgaaactacctgtttcgtctctaaaaaagtgtattttcagctatgaacttggacagtggccatagctaaaaggttattgttttagagatggatggagtacacattaatataaagtatcacaaaactacatatttaagacataagacatagtttcgagaatccaattccactacgaaataaagataaaaaaaaaaagagagaccgtcaccattgataagaactctcttgtatacataggtcaatgtaggcatttttttccctagcaaaaataaaagcaggcaattgtttgattaatcatgtggctgaatcatgtcatgtacgctgtagctaagaaaaccatgctattcagatataaatttccatggcatcctgcttttcttatctgaaaaatgatctgtacaacggaggtacagtttgcatctgaatactggagattggtcccatgggatcgctcttcagtatattccccctccaaaggtcctcgaaatggagaaccatctcttttatcgtaaagtgaccgtgtaaggttgactgtgatggggtaacagctggggattggatctcaacgggacattctaagtcacagtcatgtcatcctgtcatatttgtaaccacaacttggatcatgcgagttgtatagtgcacacgaatgcatgctgtggcgaaggccgaagcataaatataggctagatggtttagggttaatgatttgcttgcaggatccaacacaaatatgaaggtgaatcccaacaaggagttcagagtaatcgattaggtatgctcaatgcttgccaggattactgaaatgctgggaggcttgtctacctccgctgtagcatagccgaattatcaacttaccaacttgagagaaacttctataggttatcggaataagggaaccgtaaagttacactgtttcataacctgcaatagaaaaaaagccttacaaggagggacatgaacctaccgtcctggatactgaaaatcgatgctagttgaacagatccagtgcatcacttaagcgtttgggataagccagtaattcaatggggatcattttagaatgcttattcgcacatcaacctagggagcaaatggaagaaataaaaagcaggttgtttttttgacatacttcaaatatctagctaaatctgtacaaagtatataatgttttctttttcacaaggaagtacataatgctagttggtaaaagtaccagtgggcaattttgttcataccattggaaccaaagttccttattgaaatattccttacatgtcagaagatctcccagtaattttccttcaaaggtaaacatcagaaaacaaggctaccaactaggaatgatgttaaaggaacagtcaagttgtcatccaaatgtgtgctgatgggatgggactctacaagtgctgcagttacagaaacaacaaggaagccaaaagccaaggaccagctttcttcaatgaaaccgaatgactggaagtaatgcatatacctgaacaatatgcgaatgaatgacttaaaaacacatatgcaacagaaaacttcagtaaaagcctctcaaataattacccaattgaagccatgaaaccagctagtgccattgctatgctgcctgcatatgacttgttggggttgtatggaagcttttcttggccaagacgtctccccactatgtctgctattcctgaaagtgtagtggggggggggggggggggggagggaatgtcagcaaggaaagtatgcatagcttgtttacgctaagctaaggactggagatatacgcacataccgtccccagcacataagttgcaaataagggctatagcgattggagaggttctccagaatatagaagtggcaaaagttatagtggtagcataatacagtggacccttgagaagttccctgtgttcatgagaaaatgaagtctaaaggatcatgacctgaagcagcagcagcagcaactatagatattcaacagaaacaaagaataagcaaatctgtgccaaaaagaaggcatagaataggaaaaaggaaaatcagagtgaaaaatgcaaagaataaaaggcaaatatgagcagaaa

SEQ ID NO: 9392 - DNA, 24130 bp, Oryza sativa
tattagaagaattgaaaatttggttctgctcttcaatataatatgtaacttggttttggtaacactacagaaatgaaatgaatctggatttaaaaatgcacatttgaggagacattttttaacaaagaaaggccaaacctattttattatcagtcttgctgaactgttgtttgtttaccaacgtttgtgtgaatttgcaatttaattccagtcatcttcttatcctgtataaagatcatttgctgcttgcttcattaggtttactgtaaatgtttgttgtctttaggtcctggacttgtacacgatatcacagacaatgccaaactggatgatagcattgaaaagaatatgaaaaacagtagcgacaaatatctgaaggaaggttatagcatagagcctttccctgagagttctgttgatgatacctttgagtttggagatattggaccattgaatactgatgcgcaaaactcaactgctgctaaagctgaggaagaaaatccagagacaaatgttgatctcgctctcgctaatttccatcgagaatatgaggtatttgaactgagaattgtccaccgcaagaacaggttcacaatcacttcttgtttctcccttctcttcttccatttttggttgctaaatgatacttccaagttaattcttatgctcatatagcatgtcttcactgcaggaccggctttgaagtaagcaaagatttccccattgtcataaattcagttatagcaggaagatattatgtcactgaataccttggctcagctgcattcagtaaagttgtgcaagcacatgatcttcagacaggaactgatgtttgccttaaaataattaaaaatgataaggatttctttgatcagagtctggatgagatcaagcttctgaagtttgtgaacaaatacgatccattagatgagtatcatgtgttgcgtctctatgactatttttatcatcaggtatatcacttaagaaataaagttgactaagatactccctttgcattgatgttatgctgcatactttttggctattcggaagctaaggaagtttgaaagggatatattgttggtctttggcaactttgaaaaggatctatgatggctaaaagcaatatagcttcttattttcagttgatttcttaaattgcttgcatgcttgtttaattgtagaaaaatcatagaatttattagtactttattttttgcggttgcaaaatcatagaatttctgtaacggcatattgacattgcaacaggaacacctttttattgtcactgaattactgcgagcaaatctatatgagttccagaaatataatcaggaatctggtggtgaagcatacttcacattgcctagaatacaggtatgtttgaccgttctatactaagatgctatctataattgttgcatatgcatagacacttacagttcaatttgtagtatgcacgatatgcaatgttccaaaccaatttaatatgcttcatttaaacataaagtttttgaaccgtaattgatcattttcttggaatgatactgctgtaaataaaatgattaactgttttaagtgcaattaaatttaacttaagaaaaaaggttttgatgaacaaaagttcccccttttctttcaggcaatagctcggcaatgtttagaagccttggtatatttgcatcatttaaggatcattcattgtgacctgaagcctgaaaacatccttatcaagagctacagcagatgtgaaattaaggttatcgatcttggaagtagttgcttcttgacagacaacttatgtctctatgtacaatcacggtcatatcgagctcctgaggtcattctggggcttccttatgatcagaggattgatatttggtctcttggttgcatccttgcggaactctacactggtgaggtaagaagcttctgtaccttgctaatccttctttttggacacgtgctgaccttttagctgtgttaaacccatagtggcctgttgtcatacagcacatagaattttatggagatttcaacacactgcattaatagtgaagtgctgtgttggcatgtttgataccttctttcttgtctaaatgctatgcaacatatagctccaaacagaaaatagagatcaaacttctgtgccagaattatttttttttgaacgaatgcctgagtaaattttggggcacaaggactggctttaataaataaagacaaataagaacgttttacatggaaacgaataatgtgcttcaagttgttttgttgttatccatatggaaacaaagttgttttaaaatttaaaaatgctaatcgtctaattataattcctaactggtacacataacaggtactatttcctaatgaaccagtgcccataatgcttgctcaaatgattgggataattggcccaattgacatggaaatgcttgccctgggagaggagacgcaaaagtatttcactgatgattacgaccttttcaccaagaatgaggtacactattcttagtgctagtggaagtagcctttcctgtgaccactcgaatttcatcatgtccatctctctctgtggactgtgcgagttataacacattgaacactgaactcattttgttgtttacctcatttctattcaggaaacagatcaattcgagtatttgatcccagaaaagtcttctctgcagcatcacttacaatgccctgattcagagtttgttgattttctatcctatttgctgcaaataaaccccaggagaagaccaacggcaagtgaagcgctacaacatcaatggctttcatttgcatactaatgactaatgagaaaccaacaggtcatttcgtttgttttaagtgctttgttcaactgctcctaagctggatccctgcaatcttctaaagatggattgattttctgatgtttccccatgagtccatgacatgaaacattttacactttccttgagttttagaaggatttacctttgtgcttgctgaactagcatgcggcacaattttcttgtttcgtttcttcagggcaattcttggagtggaagccctgctctcagtgttaagattcgtgagtgtatgtaaatatgaggaaattttcctgtgtacatgtacagttgaaacaggctcttgtaagccatctgattcatctttcataacatagtgaaaatatgaaataatcatcctgcatttcttcagttgtcgccatacttctgtgaaaatttcccttctaatctcaatcccgtggagatatgttttgttaaatgcacaggaaagtacagaaggaattttattgtccatgagaaatttttagtctcatgagagagtttttagtatctttgagtaacccggaagagccgaaggtaccaccattgcagatttgcaggcccatgaagttgcacaacgcggcccagcaagggcagtgtaccgtgtacgtccagcccaacaactcctatccatccgatcttgaaccaacgtctcggatcagatctggtcgcgacacttcgctctgtcaccggcacgcaaaaatctccctcccttctatccattatccccgtgccccaccactggcgccgctcaccggtcacgaccaatgccgccgaccgccgccgtcgccgtcgccgtggccgcggccaccgcgctcccttctccctcctcctcctcctcccaccgccgcctccccgccaccgcaaaatccgtctgggtaaaccccagcctcccgagctcccagcccttccatcgccggaaacccgccgagccccagcaccagcgccaggaccacgtgcccgacctccccgcgctcctcgcggccctctccgccgcgcgcacggcctccgacctggccgccgcggtctccccgcaccgccccgtctccccgcgcctcctcggcacgctcctctcccgcctccccgacgcgcgccgcggcgtcgcgctcctcgacctcctcgcgccagacctccccgcctccgcgctcctcatcccgtacaacctcctgctccgctccgcgtgccgcgccgggatgctccgcctcgcctccggcctcctcctggagatgcgggacagaggggtcgcccccgacgcgttctcgtactccacgctcctcgcggcgccacccgcgcgggccacctcgaccacgcgctcaccttcctgccgctcatggaggacgacgccgtagcgcccgacctcgtgctcttctccaacctcatccacctcgccctccgcgggggcgacgcgcccaaggcgctcgcgctcttctcccgccttcggggcgccgccgggatcaagcccgacctcaaggcctacaacgccgccatcgccgcgtactgcaagtccgacctgctccgggacgccaaccggctcctcctccacgacatgccctccgacggcgtcgcgcccgacgcggagtcgtactcccccatcctcgccgcgctggcgcgccgcgggcggcacctcgcggccgtgtcgctcttcacgcacatgcgcgccgtggctcgcgtcaagcccgacctgtccgtgttcaacatcgtgctcaacgcgtacgggcagctcgacctcgcgcgggaggcggaccggctgttctggtccatgcgccgtgctggtgtcgccccgagcgtggtcacctacaacaccatgctccgcgtgtacggcgacgccgggctgttcggggaggcggtccacctgttcggcctcatgcgtagcgccgcctccgatggcagcgaccgcggtggcagcgtcatcaagccgaacgtggtgacgtacaacaccatgatcgccatctacggcaagtcgctggaggacgagaaagccgggagcctggtgcaggacatgcaggccaatggcatccagcccaatgccatcacctactcaaccatcctgtccatatgggtgaaggccgggaagctcgaccgtgccgggaagctgttcgagaagctccgggaagccggcacggagatcgacccggtgctttaccagacgatggtcgtggcctacgagcgtgccgggcttgtttcacaatccaagcgcctgttgcatgacctcaaagactcagaggacgtccccaaggagacagccatcaaaatcttggcgaatgccggccgagtggaggaggccgcatggctgttccgccgtgcagccgacgccggcgacgtcagggacacatcggtgtaccgaatgatgattgacttgttcgcaaagagccggaggcaccggagtgtgatcgaggtgttcgacgaaatgaggaaggcggggtctttgccggactcggagacgatcgccatcacgatgaatgctcatggtaagctgaaggagttcgacaaggcggcggcgctgtaccgggcgatgagggaggaaggatgcgtcttctcagacagggtgcacttccagatggtcagcctgctcggcgcccagaaggacttcgacgcgctggaggcactgctcggtgagcttagcgatgacccgagcatcgacaagagggagctttaccttgtggctgccggcgtgtacgagagagcatgcaagtttgatgagtcgtcacagattatcagccagataagaagccccaacgccattggtgtccagaagttcagatgagaacctccagtttctctgacgacaaattcaggtgtattgccagacagcaatacacaccatagtgtcattgacaattcaaggttgtaacttgtaagtgcgcgtggccactgtggaagttctttttcaattaaattttagacaccaaagtgttatcactgatcggtgctgtttgttgggcttaggcctttgtaaatataaacatcagataactacatttatataaatacatgttttttggttggagtgaagtgatggtacagtgccaagaacatttctgatgctgaaccctttgctgaacggaacaagcaggatgctggcagcataccaattagactaactgaactatcaacaatgaaattttacaacagaaggtgatatacaactggtgtttaaatgccccactacacaaataccaatctaacattctgctagattacaattccttttgtcttcagacatggcaattctgtacgaaccttgacttgatttttatcaggatccaggaaacctaaacgaatatataaataataatgtacaggtgctatcccctgagaacggacttatggcgtggcaggcgtttcagccttcatcaaaacaatttcatgtagcggctgcaaaatttacactgcctgatcagtttgggggatgccatgtttttggaaccattcaggcatatgaaatctttcgtatagtgctggtctaacatctctctggatagagagatgcttcagaagtggaaatataacttccatgagctgaaaacgtttaaacaagtcagaattagtaagtagtggaaactcaaacatggctaaagactggtggcagttatcagctacctgattatcattatgttgtccagctgaaaatggaacacagggtattccattcaaaggttgcaatatgaaactgaatgggttgttgtcaacaatgacaactctgcagaaatcttttgacacgcaagaaagatctttgacatgttctctgtattccctgaaattgtgcatcccatggatatcagaaagcgcattggccaaacaccaaataggtcctatgcgacatttccagcaagaaaaaaagccacttaacacatagccctcaactaatttggcacacatctcagcaagcatagtaatgaatgcagcagcactatgataatatggtaaaacaccatgtgtatccataggaaagttaacagtaacttacgtagtaacagttgatggacgatatagacggagtttgaatctattatggacatctattctgtcaactaaaggtcttgcataacctgagaacaaacatgggcatgtgaggtggcgctaattgggttcaaatgaatgaagaaaaatagtagcaagcacataccttccaaacctgctgtaaagagaataagatctgcaaattcactagttttctgcaagaactcgtgcaaaccaggacgttcaaaaacggtgacatgattcactttgtttctcccttcaacatcctttacagttcacacaagcaaaagatcctttagcagtagtgattaaaatcattacatacaataagagccaaaagcacaagttctgtaccttctcagtggatatgcactccatgtcaaagcaatgtaatccagcttcaacagcttgggtgcgtacaatagctggaagactggatgattcatatgcagaaactaaagtttcatccaaatcaagcacaacctgaatagataacccaaatattttcagaaatggtgaatgaataacttataattatcatttcatttttcgttttatgtaaaactgttatcatttcatcttttgttttatgtaaaactgaaagctcaacataaaaccatccaagttcttcacccactaaaacaaaatatgctaacaggaaaccctgctatgagcaaattagccaatgttaatcccacatgataattcatatataatcaccatatgtataatctcataattctgattcaattacagtcataatgtatcatcaccaaatgcattatcccacaacactgctcaaatatctactcatctacacatcgatttcaacggacgttctaaattaccatccacagctctgctaaagactgcagcaatgtattgtcccggttaagtaccaacaccagcaccgttgcaattttggaatattaaatcatcatttcatgaattatccaagcagtataattcagagagacggattaacgccattgttggctgctaaacgaggacttgattggggattgcaggacaacggattgcccatgctcgtaagccaagaaaacaaaatcatcgcaattcaaatccccacaaaaaaggtcagctttacaacccacacaataattagcccccaaaacaaatcgaattgcctgaattaagccggaataacacccagctaacctcaaatcaatcactctacgcatctaccaaatcctaaatctcccacgaagaccgggacatcaaaaatcagatcaagaggctcctcccacatctactgtttcatccaaatgatgcccatatcatccctaaactagccatttccccccttaccaaactaccgaggaaccccatagcgtcaacgaatccactcaaaaccgaatcttcgtaccgtgaggcgctgcagggattccggcgggggcgtcggcgcaggggccgtgtcggccgggatctcggagcggagcggcatgaaggccaccgacggcgactgctcggagtcggccggcccggagaggagcgggtagcggaacccgacgaaggagaggagctgggcgcaggatggggtgccccggaggatctggagcaggacctggaggaggaacccgatccaccccaccaccgcctgccacgcctgcgccgccaccttcccccgctgctgctgctgcgccgccgccgccgccgtcggcgagtacacctccgccgccgccatgatcgccgcccgcggcgagctgtctccccgcaacgtggggcggttgggaggcggggaggcgaaggcgatggcggtggcgaggccggagaggcaaccggaggagggaggagggggggaggaggacgtggtggtcgactggtcgtggtcgtgtgtttgagggggaggccgcgggtgccccgagtccgtattcgtctacgtgtgcgtgtgtgtgttggcgcttcgtttgcccgtgtccgtgtggacttagcggagttacaggagtagatttagcgggcccagttgtcagtgagaggctcggctcgtctggcgagctgccgggagtgtgattatacttacgtgcacacgaagttttctcctaaatttgtctagaaagaacatgcaaaccgctcacactcacacccatgtgatgcggacacccacaccctatctctatatgccctctggaagactaatatgatatatctcgcctaccaggctacctctatatgccctctggaagactaatctgatatatctcgcctaccaggctacctctaaaaaataattagacataaatacaaacgtctgtgtcaagtttagtacgaatttactattagactaatttctcacaaagaatttaatcataggtcctgtttagttcacatcaaacttctcccaaactcccaattttccatcacatccaaaactttcctactcacataaactcccaacttttttcccaaaataacaactttccctgaacttctcctcaatttcagaaactaaacacagccataatcgtaataagttaagctaaactcacttcatgtgtttctccatctcctgtgtatcatctactccctccgtcaaaaaaaactaaattaattggggatgcgacattgcctagtacaacgaatcgttggatatctaatgttctattcctaactggattgggttttatggaacggacgagtacatactacttgtgtatgtattttcctgcttgcgtatgtgtttatcctatctggtttgattttgacaaagtatcaatcgaggaacagtaacgttgacatattattatacttgagtacatgttaacgaattcaatcatgcgaattgatttttccaggaacgcatgtgtttttgttgttgtacaatttgttactgtaatcttgagtaaggcatggatttcttatacagggcaaaactgagtgaacgattagaatatgattaattaaatattagcttaaaatatttttcttattttttaagaaagcgtacctttaatagtttgaacgtatgtgcgaaaaaaatgagggaatggaggttgaaaaaattaagagaaaaacacagcctaattgtatacacttggaaaattataaatggaacagttataacctacatttgcgcatataattagaaaaatataaatggaacatgtgcatgctatctaaaatagcggtcatattgctttcagaaaaatgtcccagaaatattgcttcgagaaaactaaaccaatacatttatgtagtactagcaaaatggttggttagacataatgagttctgtaacttacgaaaatgcaatcaaatatttttcttagctagtgtacacagagtatttcctcgcctcacaaaaaaaaatcatttcctcctaaagatgccatgccttgcattgcaccaaaggcatgctttgctattatttctttcttgttgattatacctaagcaaagcagggcccctttgatcttttttagctataggggcaacggaaaaacaagtgggacatgctccatgaatatcgtttggtaaaagacacctaaccaaagcaggacaaggagagtacaataaaaggggccttatcttgttcagttgaaaaataattaccatcacgtgttgattaaagtttttttaaagaaaaaagcctgagaaatggcctctctaggactgaatattgtcacttgctgtcatttagggcttgtttagttcacgaaataaaattttttaggtgtcacataggatattttaccggatgtcggaaggggtttttagacacaaataaaaaactaatttcataactcacctagaaaccgcgagatgaatcttttgagcctaattaatccgtcattagcacatgtgggttactgtagcatttatggctaatcatggactaattaggctcaaaagattcgtctcgtgatttcccccataactgtgcaattagtttttcttttaatctatatttaatacttcatgtatatgtccaaagattcgatgtgatgtttttagaaaaacttttggggatctaaacggggcttagcttaaagttactgtggccatggtgtgtagtaggagtactagttgttttcagatgaaacatgctgctgattagagcatgcattctctgaaatctgtatagtcagcgagtcaggtactcaggttactatacagatgatacagttctgaagttttcacccatgaagttttgaacggcagaagtttcttgagggtaaaaaaaacgagttaaggcttgcatgtgtttttttttttttgaaaccaggcttgcatgtgttttatgagttctgaatgtcttcactatggtccctcaactcattagtttttgtcctgttcattgttcacatatgcttgtcatctttcatccctctttattgcagtggtcaataactgaacttgccatcaatgaataaacccaatgttaccttacctacgacaaaaaatgaaattctgtgacaccgaaaatactcatcatggagaggttgttggtagctctgaagctgtccaggtgaacgaattgaatggattaatttaattttagtgcggagactctcccaaatttctaatagcacaaactgattcattcgttttagtaaattctttgctgagaaagcgtcttctgcttggctacgcttaccggccactcgtagctagctgtctggctgctttgtaattggaacatatcaatactgttttgatgtcacaccatggatgagtccaaaattttatcaggatgtgcttctatgctgttcattggttgcaccatcgtctgtttcgtgctggaacacgaatatgcggagcgttgcgagcaacttaggatttaactaatagtttattgattttctttaagatttacttgatgttttaagatatttaacctatatttgaagataagtttagagctcaagcccttggtattataggcctacctccgcctttgattgcaacattggattataccataaacttagaataaaaatgaaaatgaccattagcttttcaggcttatctatactacttcatccgttttatattacaagtcgtttaacttttttagtgttaagtttgatcaaatttatagaaaaatttagcaacatctaacatatcaatttagtttcattgaatctaatattgaatatattttgatagtatatttgttttgtgtcgaatatagtactatatttttctataaacttgatcaaatttaaataagtttgactagaaaaaagtcaaataacttattagagtagacaaattatatttagcaccatattcatgcccaggaattatactactccatccgtcccataatataaaatattttgactttttatttacactgtttgatcactcgtcttattaaaaaaatttgtgcaaatataaaaaatgaaaagttgtgcttaaagtactttgaataataaagtaagtcacaaataaaataaataataatttcaatttttttttgaataagatgaatggtcaaacagtgtaagaaaaaaaatcaaaatcccttatattatgggatgggagagtactaacaagctggagcactgcacaaattactgttttcatggggtcctggcagtagaattttgcttgtttttgtcattttcgttgttattagctcgtactgcctctaattatagacatgctaaaagcatgaaaagatgctctacttgtttaagtttaacttggttgtcttttcagattccttggatctgaaagtaggcaacagagaggtgaagaaaaggggtgacaaactgaggtggcttgctatggcagatcaggaccaactagtcctaatccccaagagaggcagtggttttgagcaccttttcaacgcagatgtagattaaagattttgccaccagctctttggtagcattattttcttcaagtagggaattaatcaaactaatgtgagcggagagagtagggcagtcttcggctgagttcatttcagcaacataaaacaacaattttatcgttcttcgttggcacattttatgaatttataaatagtatgttttgtaaacaaaaattatatataaaagttttttatgttcaaaatcaaataaactctcttttgaatttataattgacggagcgtggggctcctcaccgggagaccgcgcgggcccccctttgccggttcggccaggggcgctaggtgaggttctaagccctcgatctgtggaatgtttcgcgagagagcaaatgcgcaagacacgggcgatgtagacaggttcgggccgctgagaagcgtaataccctactcctgtgttctggtggatctgtgtatgaaggagttacaaatagctggagagcaagagagttcaaactctaaagaccctcttcctctttctctcctctccgagctccggtgtttttccccccctcttctctcttttttctcttaagtgggcaaggtcctccttttatatctcaaggggataccacatgcaccacttctacctactcttcttttgggtggggactcaccctatcttccaaaaaaaagtggcttgcgccttcgcctagaagctaaatcacagcttgtctttgagtgaggcccagcgtcatcactcgcctgacaccggggatctccctgttactccctcattaatgggcggagatttgccatggctgctgtccgaatgaccctccgatgggatgagccatacctacctccactccgccggaagcaggcgcaacgtgggagcacggttgtctgccgatgacgtgaccggcgtcagaccagtcacaaaccggtcattcttgtctaccacgcgtcagtttagcatgccacacgtcagcccttcttcataaaatgacttccttgtaatggttgcgatgaagcctggtatgaatctagccgggactgacgtgctaactccaggagttagcatgccggctccggctagggacgagtgcctagaggctctcattattccgacgggacggggcgaggcgtgcgaaaggccgcctgttgccacctaacccgcgatctgaccggtctgtgaccggtcacacactatgacctgtcacggaccgaacgagtgtgctgcgctgcattaaatgcggcgtggggcgctcgtccaacccgcaataaacgcggttaggtgagcgccgctgtgctcacctaacccacacacgtggcgccaaacccgcagggggtcggggcgccccagccctcggggccgaaacgggagcggcccaacccctcggggagacagagggaggggcggccacatcaccctcgggcccgacccccccgagggggtcaggccacgtgggtgaccgcagctgccccaaacctctagtcaagatacccccggtcccatgtcaccgacagtagcccccggcgttatgccagggcgatcgccctcctcgaggaaagcgctcgggcgtgacgccactccttaggcctggtgacaggcggggccggtctctacaggcgggcaggaatccagtggtgcgcgcatcggcaagggaaaaccgaccgacaataatgagcggctttcttcaagaccgctacattacttgagcagcgcgcgaatcgggacgagccggttcgtttcgcctggagatgtgatgatggtgcatcggtcggcgcgcacgatatgtcccatctcgactgccacggccgcacatccgcctcgtgcaccgcaaacgggcgagcgggattagtggaggagtgggcgtgagaaacgagggggcgagatagtgggcccgggaagcgaggagccgggcatagcgttggcaagggtataaagacgccgaggaagagactcgtttccttcctctcgccattattccccttgccttcgccgcttgcgctctaacttctcgtttcctgtgccctaccctcgccacactcactcgctctcaagcccctcctccgctggcgtcatggcacggggctccgcaccgctcgacggtagcatgctgccgccttctcgcatcgtgagcgagaggcaggccgggctgccgcgccgattcatgccggaatctgccaccggccgggaggtggtcgcgctgggtgagggacgcccggcgccacactacccggggcggtccgtattcttcctttcctttgcaatggcagggctggtcccgccattctcttctttcttcatggatgttctggagctttatgatctccagatggcgcacctcacccccaacgcggtaatgacgttggccatcttcgcgcacctgtgcgagatgttcatcggggtgcgcccatctctccggctgttccgatggttcttcaccgtacagccggtgtcgccaccgtcggtagtcggtggctgctacttccagccgcgggggccggtgctgaaccgctacattccctgcgtccttcgcaagaagtgggacgactggaagagcgactggttctacacccctctcgccgacgaagcgcgcctccgacttccgaaccagcccccggcgcaggcctccagctggcgggcgccggtagatctgggagacggctacgacgccgttcttgaccgcctggctggtctgcgatcccaggggctcacggggaccatggtgtacggcgattaccttcatcgccggatcgcgccactccagcggcgcgcccggggcgcctgggagtacaccgggtccgaggactacatgaggacccaccagggggtcaaatgggactgggtccctgaagacttcaagatggtgatccaacgggtgctgaatctcagctccgtggaggcatccctcatcccccaaggtgtcctccccctctgcagcgatccagagcgcgccaacatcctgaccatcatgcaggcggtcggggcgtcaggggagcgggctcctcgaggccacgatggcgcgggcgggagccgcaggggggaacaatctaccccgagagggggtcgtgcttctgggccccgtgacgggggcccggggggcagccgccctgccgacgcccgggggaagaggaaacaggaggataccccctccccatctcctccccgagggggcggggcggtgcgtgccagcagcaggcgcccggagggtgctgtgccgacgtcgcagcccgaggaggagcgaaaaaagaagcggctccgcaagatgggggggaccgaaccatgccggggaaacctcatctccccccccaaggtggtcgtttagccgacctcctcgcaggttcgtccccgcgcccactgcggccgtattcattctcccatctcccaaggcaagttttcactcacccgtttttcgtcttctggtttttcttctgcctcagcgagatcccgtcgcgcccttcccgccattccaagtccggccggtctgaggtcgaggagacggcgaccgcggaggcccggaggcgggaagctgaccggcgagaagccgcagaccgcctccgggaagccgaagaagctgcccaggaggccgtccgggctcgccaggctgaggaagccgcttgggaggaggccagactccgccgggccgaggagtccgtccgggagacggaggcggcgcgcacacgccgggcggcctgccaagcccccgacccgactccgcccgaggcgacaacgacttccgaggccacccacgacgaggccgcgggcgcgccgctcgggcccgacccctctggcgacgttcgggacgagcccgcgtcgggggacgcccccgagttcggcacgtcgatcggcgggccgagccgcgcggcgcccacaccgaggcggctctcccctctgccttccgctgccccactgagcgcagagcccctcctgcaggccttggccgctgcgaacaccatggtgttggacgggttaagcgcccagatggaagtcctgcaggcagagcgggcggaggtcgatgcggcgtgggcgcgcgtcgaagagggacggcgctcggtggaagccatggtggaggcgggccgcaaggcacaccgccggcacgcctccgagctcgaggcccgtcgtagggacctggcggagatcgccagggaggtggaggaggagcgggagactgccctcatcgccaccgccgtgttcaacgcggcgcaggacgacctctgcctccaatacgggagccgggcggcggagctagagaagaagctcgacgcgtcccggcagcgcgaagaggcccttgaggctcgcgccacggtgctggaggagcgcgcccgcgccctggacacgaaggagagggaactggcgggtcgcgaggccgccgtcgccatccgggaggcaacgctggcggcgcacgaggccgcctgcgccgaagaggagtccgcactccgcctccgtgaggacgagctcactgagtgggagcgagctctcgaggaggccgaggccgcggcgcagcggcgggaggagcaggcgcgcctcaatctggaaggcgcccgcgcagagagggccgcactggatcagcgggctgctgaattcgaggcgcgggtgaaggagctggacgcgagagcgcgcagcggcggggcggccgcgggcgacggcgacctagccgcccgcctcgcagccgccgaacacaccatcgccgagctgcagggcgcgctggactcgtccgccggggaggtcgaagccctccgcttggcgggcgaggtagggcccggcatgcttcgggacgccgtctcccgtctagaccgtgccgggcggcaggcgggcctctggggcgggcggaccgcgaaatacgccgccaaccaggggggcctcgcccagcgcctctcagagatggccgggaccctccagcggctccccgaggagctcgaggagacgatcaagtcatcctcgagggacctcgcagggggggcggtggagctcgtactggcaagctaccaggctagggaccctgacttctccccgtgggcagcgctggacgagttccctcttggaaccgaggatggcgcgcgcgcgcaggtccgggacgccgccgaccacatcgtccacagcttcgagggtacggcccctcggctcgcgttcgccctcgactccgacgaggagggcggtgacggtggtgcggacgtcagcgacgatgaggccggcgacccgggcgcgtcggcgtgagcccccaggcccccgccaatcttaaatagctttttctttcttcttctgaggccttcgggcccccttcttgtataaactaatttaatctgcaatcaaataaagaggaaatttttgtgtcaatttcatttgttgtgtgtatgagacgaggatggtctgtgccacggtccttctgtgtctctgtgtcttagcttaaacaagggctcgtgcctaggtcctagcctcaaatggcgcgggtcggggctagtgcctggggagatccacgtgtcgagactggccaggccgggaatgtggtgaccgagggttatggatgacccgattgtgggcctttgccgattcccccccggagttcaccacgccccggggcacggctcggttctgggccccttttggcgattttagccggcccgggccaccgagggcaggatcgagcacgagcgtgctaattcaagccaagattcttcgaaaggaaacaatggcacagacacagtccttaggaaatcgaaaatgcttttattgaaatacggaagagaaaaaaatataagtttatgcatgtggtagcccccggccaaccctgcacgcctgggggggcgcggggttggcccgagcccgagacctgacacccgacccccactaggggtagaagcgacgaaggtgttcgatgttccacggattaggcagctctgtgccgtcgcccgtggccagccgaacggagcccggccgggggacgccgatcactcgatacggaccctcccatattggtgagagcttgctcagtccagcacgcgtttggacacggcgtaggacgaggtcgtcgacgcagagtgatcgggcccggacgtggcgctgatggtagcgccgcaggctctgctggtagcgcgcggctcggagggccgcgcgccgccttcgctcttccaagtagtcgaggtcatctctgcgaagctgatcttgatcagcctcgcagtacatggtggcccgaggggacctcagggtgagctcggatgggagaaccgcctccgcgccgtagacgaggaagaaaggcgtttccccggttgctcggcttggcgtggttcggtttgcccagagcaccgctggcaactcctcgatccacgagtcgccgtgcttcttgaggatgttgaaggttttggttttgaggcccttgaggatttctgcgttggcgcgctccacttggccattgcttctggggtgggcgggagaggcgaagcagagcttgatgcccatatcttcgcagtagtcaccgaagagttcactagtgaactgggtgccgttatccgtaatgatacgattaggcaccccaaaccgagcagtgatgcccctgatgaatttaagcgcggagtgcttatcgatcttgatgactgggtaagcctcgggccacttaatgaacttgtcgacagcgacatacagatactcgaacccgcccggggcccgcctaaacggacccaggatatcgagcccccagacagcaaacggccatgaaagaggtatggtctgcagggcctgggccggctgatgggtttgcttggcgtggaactggcacgccctgcaccgccggaccaggtcaaccgcatcgttgagagccgtcggccaatagaaaccctggcgaaaggccttgccaaccaaggtgcgtgaggcggagtgggctccgcactcgccttcatggatatcggcaagaagctcgacgccttgtttccgaggaatgcacttcaggaggactctgttagccgtgcaccgatagagggtcccttccaccagcacgtagcgcttggagatgcgctggacgcgttcactcccttcgcggtcctcgggtagagtcttatctgtgaggtatgcctggatctcagcgatccaagcaaccaatctaagggagctgggagcgctcccctcgggtcccgaggcctggactccgacgggcctcaggggccgttcaggcgcgtccgtctcccctagggggtcgggccgcgccgacggctgggcaagcctttcttcaaaggcgcccggtggggtctgggcttgcgaggaagcgagcctcgagagttcgtcggcgaccgcgttatcccgtctaggcacgtgccgaagctctatcccatcaaaatggcgctccatacgccgcacttggcgcacgtaagcgtccatctgcgggtcagagcaccggtactccttacagacctagttaacgaccagctgggagtcgcctaacaccaggaggcggcggatccccagtccagctgccaccctgagtcccgcaaggagtccctcgtactccgccatattattgatcgcccgaaagtcgaggcgaaccagatatctgaggacgtctccgtttggcgaggtcaacgtgacccccgcaccggcgccctgaagagatagggagccgtcgaactgcatcacccagtaggcggtgtgaggcagctacgaggggcccgagctggcctcggggacggagatgggctcaggggccggggtccactctgccacaaagtcggcgagggcctgactcttgatcgcgtggcgtggttcaaagtgcaaatcgaactcagagagttcgattgcccatttcaccacccatccagtaccctctcggttatgcaagatttggccgaaggggtaagacgtaaccaccgtgacccgatgcgcctgaaaataatggcgcaacttcctcgaagccatcagaatagcgtaaagcatcttctgggcctgagggtatcgggtcttagcgtcccggagggcctcgctaacgaagcagacgggccgctgcacctttcggcggggccgatcttcttcgctaggggccacatctccagggcgctcttcgtccgagaggccgcgcggggcgcactcggcttctgtgccgacgacctcggggtcggagggcgacaggcgcggccttcccgcagtggccccggggccatcctgggggtcgggggtgcctggcaccgtcggacaagcgggcggagggccaactccggccgtcgggggcctcgggccgccgttcgactcgggggcctctcctccctgctctctcccgggtcgagtcgacacagggtggggatgcgcggagtgagggttgtcctcgtcgcgctccaagaccaacgccgcgctgaccacctgcggggttgccgctaggtaaagtagcagcggctcatctggctccggggcgaccaggactgggggagaactgaggtacgccttcaactgagtgaaggcccgctcagcctcctccgtccagataaacggcccggagcgtttgaggagcttaaataggggtagcgccttctctcccagcctcgatatgaaccgacttagggcggccatgcagccggtgacgcattgcacatccctaagcttgctggggggcgcatccgctctatagctcgtatcttctcggggttggcctcgatgcctcgggcagagaccaagaacccgagaagcttgcccgcaggcacaccgaacacgcacttgtcggggttcagttttatgcgggcggagcggagactttcgaaagtttccgctagatccgagagtaaggtctcttggttgcgcgtcttcacaaccaagtcatcaacataggcctcaacattacgtcctatttggctacccaaagaaattcgagtagtacgctgaaaagtaggacctgcattctttaacccgaaaggcattgtcgtataacaataagttcctatgggggtaatgaaagcagttttttcctcatcctccctagcgatgcgaatctgatgataaccagagtatgcatctagaaaacacaaaaggtcgcaccccgcggtggagtcgacaatctgatctatgcgtggcagggggtaagggtccttaggacatgccttgttaaggtcggtgtagtcgatgcacatccgaagcttgccgttcgccttgggaacgacgaccgggttcaccagccactccggatggataacctctcggatgaatccggcctccagaagtcgcgccacctcctcgcggatgaaggcttgacgttccggggcctgccgccgcactttctgccggaccggccttgcgcccggccgcacggcgagacggtgctcaatcacctccctggggaccccgggcatgtccgccggtctccaggcgaagacgtcggcgtttgcccgcaggaaggagacgagcgcgtcttcctatttgccgtccagaagaccaccgattcgtgtggtcttggacgggccgtcgcccagggcaaccttcttgaccgggacctcgtcgcacgtgatcatccgctgcctcggggcggctgggatggaggtgctgagcctctcgttgccaccctcgggcttggacgcggcggcgaggtggtccgcgcgctgctccatacaagcaagcgcgactttgaggtcgccatggacagagatggggccaccggggcccggcatcttcatctggaggtaggcgtagtggaccgccgccatgaacttcaccaacgcgggcctccccaggaccgcgttgtagggcagactgaggtccgccacatcgaagttcacccgctccgtgcggaagttggcggatccaccgaaggtgaccgggaggtcgatatgacctagcggccaagtgtgccccggcgtcacaccgataatcggctgggacggccgaagcaccatccccggggccttgatggtgtcaaaggctgcgggggaaaggatgttgagggctgcacccccgtctatgaggacacgccccaactttacgttgcaaacggtgggggaaaccaccatcgcgatctgtcctccccgggcaacgcacggcgggtggtcggtctggtcgaaggtgagggcaacctccgaccaccgcgtcgcctcatgggtaggggccgcggccagaagctctcgcttcatggccttgaggctccgacgagaagcgtgagcgcacgctcccccatcgacggtggcgatggtggccccaggctcctggaaccctaggtcatcgtcgccatcgtcgatgtcctcagcgggggccttttgcttggcctcacttcgccggttgccggagggagccgccggggccttgccctcacggcgctcctgcctcctctcctcctcccacttcctcgtccgctcagccaaacttttgaccgcgcggcagtccgcgaggtcgtggagggaggtgttgtgcacggtgcaccacttgccggtcgggcgctccctgctgggagcgccagcctccttctttttgttgctcgcaggcctcccctttcgggtggcccgcgaagcgccctcgacggcgaggacgtgaccctcgtcgtcggaatgggccgacctctttttcctcctcctgtcccgccgctctgaccgagcagcggatccgggggcggccgaagctgccacaccggaaccggtggagttccaggtccaggcctcctccttgcgagccacacggtccgcgagctgaaaaagctccgcggtggtctggggctccttggaggcgatcttttcgagcatgcggttgtgccgcacgccccgcctgaacgcgtagattaccgcgtgtgcagggatgcatggtatggtgttgcggacttgacagaaccgctgaatgtacgagcgaagagactcatcgtcccttcgctgtaccgcatgcaagtccgcttcttcacctgggcgtggatatgtgccttggaagttcatggtgaactgctggcacaaatcctcccaagagtggaccgtcgcgggcggcaagttcattagccaaccccgcgcctgtcccttcaggtccatggggaagaaattcgccatgaccctgtcgtcacccccggcggcctcgatcccggtcgtgtagacctggagaaactcggcggggttgacacttccgtcatatttttcggtgatagtgggccggaaccttgggggccaacggacgttccgaaggctcgccacaaaggctcgacagccgacaccaccaaccgggggcacggggggctggcccccgcgcccaaaccgaagtggcgctccggacgaggaagcgccttccgttgcgtgggcagcacgacgaccattgcgccggcgctcgatactgaggcgggcatccggccccctacgcacatcttcttgggtcggaggcgttgacgaggaaatggcagacgaacggcgggtaacggccgccgctcgccgcgccctccgcctcgacgacacggagccggcggtagcagcgccagaggccttggtggcggaggaccgcccaccggcgcctaggcgctgctgcgccgtcatgaccaagtcggccacgtcatccagccaacgtcgggct

SEQ ID NO: 9393 - DNA, 86058 bp, Oryza sativa
gcgcgctccgcaccctccaggcgccgcacgccgccgtggccgaggccgaccgccgggtggtgctctacttcacctccctccacgtcgtccgctccacgtatgaggactgccgcgccgtgcgcgccatcctgcgcggcctccgggcctccgtcgacgagcgggacctcgccatggacccccgctacctccaggagctcggcgcgctcctcccccgcgcgcgcggtgtcaccctccctcaggtcttcgtcggcggccgccacctcggcggcgccgaggaggtccgccgcctccacgagtccggcgagctccgacgcgtcgtagccggcgccggcgcaaccgccttcgccgcctgcagccggtgcggcggcgagcgctacgtgctctgcggcagctgcaacggcagccacaagcggtacagcctcaagggcggcggcggcttccgcacctgcgccggctgcaacgagaatggcctcgtccggtgcccggactgctccccgccggccgtctgatccagatccaaaggtcacaatctcatgactactagattttaatgtttttttagctcaaacttgagatatgaaatgagctgtgtgtgtagctgttactcctactacttgttattattgtagtggtgtttttgtgtgtgacagtgcccaattgaaacttccaagttcttagcatttgctaaccaacgtttctaatgtttgattaggatttagtaaaagagttgttgtttccttacttcttggctatagtaccaagtaccgcttttttaccctctcttagctcagccttgaatggcagattgtcagtctgaatcggtttgttctatactcttattttaacttttgagtaaatgattgataaatgccactagatgactagagtagcagttaagaaagatatataaatctactagtagatgcgtgaattctactgctgttaattctcacttcctctgcaatatttggcctgatttcaaaactgttcaccgctctgatcactgagctcgaatggctggtgcgatgttgcttgtttctttactgttgaagtttctagaaagctgctactcctgcttgccagtcgccatacacgccaacggttgctggcgatatctatggtgggctgctgctacgctgaaaaagcaagcgccttgctcagaagtcagaaagcttttctttcaaggctgctattcattcggaaaatggaaagggtgcggcccgggtttgaatgcaatccgatcggtgaagtgtccgttgcataggacaggtttcagaggctcagcgtactaacctccaaagtatcatcgaactgaaaacttatgtgaaggcttaacgagtcgccagccagccaaccctttttccataaccatgaggtagtagtaccttttcaggtttaagagcttcaaaacagccggtacgagcacctccaacaaccatttcaaatctagctctccaaatccaaatattaataatggcagtgtttagttcccttcaaacttctaaaaattcagtcacatcaaatgtttggacacataaatagagcattaaatgtgaacgaaaaaataattgcacagtttgcatgtaaattgcaagacgaatcttttgagcctaattacgccatgatttgacaatgtgatgctatagtaaatatttgctaatgacggattaattaggcttaataaattcgtctcgcagtgtataggcggaatctgtaatttgttttgttattagtccacgtttaatacttcaaatgtgtgtctatatacttaaaagaaatttggcacatgaactaaacacgaccaatatctctttgatcagcttgtaaaaaattaaagagccaaatttacttttcagtcattccaacatgactgaggatttcacatgtcaatctctatacttcttcctttctccatatctttcccctcctcacccccctcgggggtctaggcagaggtgttgacgacgatagtgtgtggaggcggtggagccagcgggaggaagttgggacgacgtaggccaaggtcgaccaacggtggggatgctacctccggtgacaacctacaacacgtagatctggacgtctatagtggagtaaggcaaggaagctggtctcgagacgacgatggcgacaacatgcttctcatcgacgccgaggggagacgaaggaaggaagagttgattggccacctcattctccgcgccagttgccggttggccctcccacattgctagcgctagggggcgggctccggcatggccgttgcctcatctcaaccaccacaccaccccggatttgcccaatggctgccatcgacgcttcctctcctctggcacaagagggaagaggggagtagccatgcgaagaggctgttggatcacaattttttttgctagacttatcaaaatttaacttagagaactgttcggagagaccgttgaatatgttctaaggtacaattcaaagtctcagattgatcctaagttcctaatcttctctttccttttcttccacttccatacatgctcggaaaccttaaataccagcgagcgtgtgactcaagatgcagcgatacaaaagtgctgttcttctcttctctctcaccggctcccaaaccccaatttgttgaagcgaccaagcgtcgaacatgatcaggcagcacattgaccacccatgtggtgcttttacttgccacattgccatctcgtgccctgtgcccgcaatgcacacttgcacagtgctagctgctagttagcgcaaccgtgctccgtgcaaagcgcgcaacgcgttgatggcggcgcacggcatggtaccgtgcatcagtcaccacaccagtcagagtcgcacaactcacgccagtggccggccgctcggcgtgttgcgcgtggaagtggaaccttgcggcggttacgcttggcgtcaagggctaccggagcttggagccgcgaggggcgcaagtcccccacggcacgtggtggtgggactcggtgatccccttccccctccggcttcccaagtcccatccatccacccagtcgcgcaccgcgcacacgcagcggtaacgtgcctccgcgagggccccgcgccttgacagccttgttgattgcggctccgctccgtgcgtgctccatcattgtggatcaagtggccgcttcacagcaagtgtagactagttgtagtaccctgctagtatgtcctaatcctgctgccctatatgatgcctctctttccatgactttcacgatccactgtttgtcggcgatgagggttagagtgaccacctagccgtcaccagcggtggccgctgctattgtccttcagagcttgaggtgaaggtgttttaaatgctggctcattagcgcttgaacctcatgaatgggccggcagcctctgcgtgtggaagcattattaagtgtaccgtgcatatgtgcatgcaacacgtcgtcctgccacgtatgtacgttcacgcacgcatgaatggctgcctttacggtttgctagcctgtggtaccagaaaggcaagaactttgaatcgagtaaatttctctgttctaaaaaaagagtagtaaatttctcaggctatcgtcaataactgaacaggaaaaggagcactgcagagccggccatttactctaggcaccctttgtcccttttcctgcccttacgcttgtaattttgccactgatcaccaccggtaatggtacaactggaacactgtaggagtaacaaaggacacatataaggacgcacggatgcagtaacttgccggaaggacgcctaggattattggaagtttggaggcaggcactcgcagatgggccacaggtgggagcagccccatttgcagcggccgtcgacgttgccgtgatcctggcatgtctccctgcacttgtgggtgtgggtgcatacgaggtagcggacgttgtccacgttccagcagtcctcaccctgaacagaccacacctcgcctgacatttaaaaaagaaacagattaagcagcagcgcattgaggatggaggtggcgctgatgggcaaggggtgatgctcattgctcactggaagcaacgatgagcagcacaagtgcacagcggagcacaaggcagtctttctccaagcgaaatgcagatgaattggtgaccaactcgaagggtaatgcagcaagccagcaacattgtagtgtgttcatgtatagaagttgtgactcgtaggccgagagaaaactgaaggctcagatcactggaggtcaagcgggttatccgagacaattataggaacaagaaaactgaatattgatgatatagagatcagttctagatttatactaatagttggtattaccaatgatttggctttaatccaaatatacactatcaatattcaaattaccaaattgatatgacatattttgacatcaaaccagaatgacccataaatttcacaacttttatatggctctacccaataagcaagggatacagtccaagcaaatcgggtgtattcggatgccacttttcccaacctctctcattcgttttccacgtacacgctttttaaattgtttaacggtgtggtatggtttcaaatttgagagaatgacatatgggttcctaggctaagaaattgtagtacgacatagttgcggcattgaaataaacacatatctaagaaagtgtagcttggtaatgtgaggcaactaaccaaacacctccttgctgtctcaccacaatgccactttacattggctatgtaagaagaagaagaagaaccaagttatacatagaaacacaattccctcactagatcgccacagtaacacaaaacatccattacaatcctaaaaagatcatatcaatagttgcaaagataaataccataattactttataggcataacaccatgattaacatgtttataggcacatctgatttattctagctgtcaggagatgagagcagtcctacataaatgcatagatatacatgctccacgcgcagttgttcttgcaactaccgatcaatctgaatgatctgaccttagtttctgctagtcctgagctgcgtcagcttggtggccatggccggcatcgtcgacgaggggtcctgcttgccgcacttcctctccctgctgccaactctcgggctgccactgccactgccgctgtccgttcctaacccgatggacagcttgctcagagccttccgtgcgtcggtgcagtacttcttgctcgcgtcgagcagcgacgacacgccccatccacggcttgcggcctgccattcctcgcggctcctcttctcgccacgcggccgcggcaagtctcggccgccgctgccggtcttgttctcctcctgcattgcgtcgcgtagggtgacgaacctgcggctctgtgaggacgaagggttgctggcgccggcgagaggggacggcgcgtactgcgccggcgggctcctgaacccgcaaacggcgggcttggcgctccaggggaagaacaccatgagcccgcaggctctcggtgacatctgctcgtcgcggccgttgatgttgatgcgcggcaaaagctgcacctggacggggtggtcgttgctttgcctggccgtcggctgctgcccgtcgtgatcgcggcgcgtggtgcgtcgccgccagtgtttcgggcctctgcccgaggacgaggacggcgtggcgagggaggcttccgctggtgcacggcgggaggaccggtcattgacgaagctcgtggcgcggccgaggaagatgtcctcgaagcgcttggacgtgatccggtcgaacgagccgacccgctgatcgggcgtggagaccctgtccagggcgtcggagaacgacgcatcgtcgtcgtcgctgctcgcggcggtcgagttgccgtagccgcaccagttgctgccggggcactgcttccagcgcccaggcggcggcttcggcggcggcatgatctcctgcgccatgtgcatgcacgcgctgctcctcttgggcaccccaggggagctctcccaggaaaacggcacctgcgtgcgcagcggggaggcttcgcggcggcaccgcacgctggccgcgtccgccgaagcgcacgaccggcgcggcgtggggagcggcgagtcgagcagctgcgggagcttctcgccgtcggcgccattgcaccgcagcccctccttgtcccgcctggtgacgatttccatgggcattgcgccgactgactgtgtcggcagcatgcatcgtctcgggcgttcaacgtgtggaggggacgacgtataagagtacacgcgaagactgtaggtagaggtgcttttcccgcgaaaagtggcagtagcggcggttggacagtaaccttcgtgtatggttgtgtgttcatctcacgtactgttcttttgcctctcgctagctcgttcccgtgatcaaggtgcatgctcgatggccttaatggtggaggttgccgaaaggtagcagaggaaatcaggctaaaacttgcacacattacataggctaaaagcttgtgatgtgaaacgtacgcgtgtctgcattggccttgccatgtgtatagggtggttggtggccgccttggggattcgtccgcggactcgggatgcactgttcaagtgtccagggcatgtttgttcggcgatggaatcccggtgatcgccgtggcttgaggggaaggtgagagagacgccacaacgggtttagctctgttccgctattcggcccattaacatttgcttatgggccacctatcttgtggcgtgggccagcaggttagtttggtgcacgacacgactccacgcaccgttccacctagcaactgacgtcgtagtcagtagatgggtcggggactctcggagagcggttcgagggggccgtcgtttgcgaggccgcaagtcgccgtcggcggccgtcgccatcgccgcaacataaaaaaagcgagcaaacccgttgctgcgcgctctgcgcttctgcccttttacgaccgaagaggtagccaacccacgcatcccccccctgacctgccccctccacagccgccgccgccgccgccgctacggctcacgagagtaccgaacgatctgctgccacccccaacccaagtgaccaaccgaaggcggagggtagcaacttcggtctgctcatcccaaggtactagactgtttagtcgattggaggatctcccatgcccgtatttgtgtcgattgctggtggtttgggacgagatctttgcattgggcggatctgttttgtgtatcgttgttgcttgtccgcgcaggtggtgggttcctactttcgtgttgcttccttggtcctgatctgttcgcgttggtgcggtttgggttgcagcgtagttcttagttctagcgtgaagctttgcggattggtgttgtctgtagatttgtgagatttacaaaggattggcgccggctgtgctggatcagtagattgtgaccgagcagaattgagcgggctgcaacggcgtactagagaaaagaggaaccgggacaactaaagattctggtatactggtattctctggatgctgatggattggaggaagacgatcgtagtattttttttttttttgatgtagaaaggcatcaacaccttagttactttaggatggatatagataccttgtggggaaacggtatggaagatactttagcacccccaattttctcatcttgctcataagttttgtaacttggatgtcaggtgatgataatgctagaatttagcttcagattatatcatctcatgcttctcgtgggctcatttcttctgaaccttttgtttgttatgaccaatatttaaatgataatcatcagcttgtagataattttcatactaaaagtttttagaaaatttctaagaaattcacaagctagtaatttattgaagttctgaaggatccagcttttgtgtcatgtcatcagttgtttcactgctatttgcaagaagacatttcatcatgtagtccaaaagataaagaatcgctttaatatgtattaccattacttgtcagtgttttagatgcacttccctaatgatatacaaatgattcatgtcacgacctgtctattttctattcggcatctcctcaatataaatctaatggaactgttcctgcagttaggcatggcatcaactgttgccatcaatttgattggtgctcaggctggcattatctcaaagttaaggaattgcgacatcacaagctacagtggcttaaaggcaagatcatctattagttttgagtcaaggtcatcattcctgggtcagaatgcatctcttcgatcatctatctctccaaggattgtaccaaaggcaaactctggatctcacatttctcctgaggcatcttacaaagtggcagttctcggtgctgctggtggcattggtcaaccgttgggcttgttaattaagatgtctcctctggtctctgcactacatctgtatgatattgcaaatgtcaaaggagttgctgctgatctgagccactgcaacacaccttctcaggttctggactttactgggccctcggaattagccaactgcttgaaaggtgtggatgttgttgtcatccctgctggagtcccaaggaagccaggaatgactcgtgatgatctttttaacatcaatgcgagcattgtcaagacacttgttgaggctgttgcagacaattgtccagaagcctttatccatatcattagcaacccagtaaactcaacagtgcccattgctgctgaggttctgaaacagaagggtgtctataaccccaagaagcttttcggagttaccaccctagatgttgtcagagctaacacatttatagctcagaagaagaacctgaagctcattgatgttgatgtcccagttgttggtggtcatgctgggattactatcctaccattgctgtcaaaaaccagaccatctgtcaccttcacaaatgaggaaactgaagagctgacaaggaggatacagaatgctgggacagaggtggtggaggcgaaagctggtgctggatctgctaccctgtcgatggcctatgcagctgccagatttgttgagtcatccctccgtgcattggctggtgatccagatgtttacgagtgcacatttgttcaatctgaattaactgagctgctgttctttgcatctagggttaagcttggtaagaatggtgttgagtccatcatttcttccgaccttgagggagtgactgaatatgaggccaaggcccttgagtcattgaagcctgagttgaaggccagcattgagaagggcatcgagttcgtccacaaacagcaggctgccgctacttcttgaagtgtggagaatgactatcggcatgagagaagataataaatgcagaaatggttctcaatagcttttagttttgaaggcggaatttttcgtgtctagttgttgcttgtttagtctcttctgatcacatgagggcgtggatgcccaaactgttgcctgttttcatgagctatttgacccttgtgcctgcatcttgatgagatacacaaactaaggaataaagtagtttttgattgttgcctgatttatgttattatatataccttctgggtagtgcaacatggcattgcgccattgcctttggcaaaatagcaacctcattgatatcatctctcactgtgtcactacttaccaatttcatgccaaaattttctgaacagctagggcgaggagctgctgctgcaatgccatggcacgtctgtttctactgaatccgctacaagcctacaactctggtaagaaaacaaggcaaaccatgttgaatttatttcggctgccatagtatgttcgttggattgaaatctcaactgtttgaaaagcacaaaaagtccatttcgctctacatgaaaagatcagttctatcactaaataatctacaggtgttggaagaaaaagaacggaataaacaattgtgcccacttcttcctcgatcaagaattcaggatcatccagctttagccttactcgccaagaaagcgtccagcttgtcgttctgcacccggccgaggaacctgatgcagatgggcggcgtgacgtcgtacctcgcgagcagcgcgtacggtatggagaagaggccgtcgccgcagatgagcccggacgccagcaccggcccgaacacctgcgatcccagcttgtcgttgcggttccacaggaacacgatcaggctgccgatgcacatgtcgatggacaccgccggcaccagcaggaacgacacggccatgccggtgacgctcgggatgtacggctcggcgcgccacttgccgtgcgcggccacctcccgcatcgcgcagacggccagcgccagcacgaagaaggtggcgctgatggcgaggcagtacttgggcagctcgaggccgccggcgccgagcacggcgatgccccggtagatcttggccagcggcgcctggtacgtcttgttggggttcatctcgtagaagtggtggaagacggtgaacacggccgggttgacgacgcaccccatcgccgtgccgatcacctggctcaccagcgtggcccgcggcgaggtgagcgtcaggtagctcgtcttgaagtccgacatgaagtcggaggcggtggagacgatggacgacacgatgccgcagatgacgaggctcccgacgatcccgccgttcttgatcccgatccacgacgcgaacatgaggatcaccagcttgttgtactgcgccgagaagttggtctccgcgacgcccgtgccgtaggcgttgcagaaggccaggacgggcgcgaacgcgtacgcggcggcgacgtggtagtacctcacctggccgtacatgagcgggatgacgacggtggagacggtggccaggacgacgtacccgctgatggcgaaggtgctcgggatgtgctccctgaggaacacctgcgtcctgcggcggtcgtcgaagctcatcaccggccgcggcatggcgtcgacgtcggagaaggacctgagcgtctccgccgctacctggtggtggcgcaccgtgtgtatcgtcctcagcgagatcgcgacgagctggaagatgccgtcgccgaggatcattgctatggcgcaaaacaccttctcgatcacaacaaagtgaagtctgactgattcttgatgcacatcatcgacgtcgtcttttttttttttttgtctaacaacaaatattcgatcattggtagtaccttgtatccactgaagctcttcaagttcgtctcctggagatcggcgtcgtaccagattcctcttttgctccggatgtacggccgcatgatcccccaggagatgatggacccgaagagcatcgagacgtttatcaggtgaggactgatcatcccgattcccacataagttccgttcaaactgatgtagaaactgcaacgcaacaaacaacgaaacacaagtcactcaagccgatgatcgattaatttctccagcccgaataaaaactttgcatgaattcagtgttcgaattcgtcggtttcctcggttcgttgcctagctcaggctcggctcagcttacccgcgattgaaggcgctgagcccaaacgttgggaaggaagtgaagccgcagtttggacctccggtgtagaaccactggaagatggaccagaacaagctcgccaacgacgaccggagaacgagcgagacttgcctcctgtgatcacaagtagacgtagatattaccgtaaatcatgtgacaacatggctataactcaccaagctagtgataatctgctcacttcgcttgtctagcgccgtgaggggtatggaagctgttgatgaggtgagccgtcgccgagccgcttgggaacgtcagccggtggcggatgatcattgtctacggacggatgaaccagtaaatcggcgaagaatcagggagctatgatctcttcttcttctttttttttttgtatttttaggtgcgttcgtggatcgtaccttcctcatggggacaatggcgaggagaccgacgaagctaacgaggaagaagaaggccatcatccgaccgaactccggctcactgacgctcgcgctggagtcgtccccggtgctcgtcttctccgccgtcttccgatccatggccagcagatacgatccaaacccacctaagaacaggccagccgccagcgacgtcggcgttacgacggcgagatcaatggaagaggcaatgcaggaagaggcaagagcgcggcgtcgtgtcgcgcgcggtggcgtaccgctgtatgtcatgctggcgcaggcgacgacgcaggtctggacgacggcgttctcctggcgggtgaaggggcggcccggcgagccgagctggtcgagcaggcgcgtccaggccttgaggaggaagaagccgaggaggccggcggagatgttgagcgacgggatgatccccgacgtgaacaccaggttcatcatcacgctgctcagggccacgcccagcgccacgctcgccaccacggcgcgcagcgtcacctgctccgtccacggcgggacgggctgcccctcgaacgcgcgctccgtcgacggcccatcccgcgggtcgccgaccgactccatcccggccacttttcctcctcctccttacgccgcgctttgcctcgccggagtatcgtcggtgcggatcgagctggcagccaatgcatctactgcgttcgatcgtgcctgcgcatgcatgcaagtgatggtcgatctggaggagggcaaggggaagaggagaacggaggaagaggaccgaacgagtgaacacgagaggcaggaaggctacatatgctttggctattcttggcagagcccaagaggcaagagatggtaatgcaaccgcgaaatgttagatttggaggtgtcactgctccttcgcaccctcttggctcttgccatgcatgaagccagaagcagaatctcgattagccggtaaaattcgagctccaatcattttttcgctgatttcaatcaatttttgataaatttcgaacgaagttcaacagttgaacagaccattcgaaatgatggctcgagatggtcgaaattcgtggagatcgtgacccttggctagaagttactcaaataccaacagcgcaacgttcttgccatgcaaataagtagttcaattaccagcggtgcaatgcgagggatgatagtcccaaaaatcagtgaatcgtcgtcatcttggttgttttgaggaatggtactcaggaaaagggaatcgtaactattgtgactttcatggatcctcagaccaaacaactctagacattaaaacaaaatgtttctataagcaatcatgcatgctcaggtggcgctcacacagatacaatgcaaataagtctaaaaaagcagattccatttcttgtgtagcttttttggagacatttctagtgtggctacgcattctaataagggtttgtttacaacagaagaaacagaaacaaaaagggataaaacagtagataagtaacagaattttctttgttgccaaggacatccctagtggtagacaaggctaggaaaacgtccattgctcatgcaatttattcttctcatacttctgtacaaaggacatctaaataattgttgtgttgtactgcaaagacattttgctccatctaattaaccaactgatccctcaagcttcaggttcataagtgcatccatctcatgtgcaaactcgtaaggaagattctcgaaaacagccctgcagaatccaccaatcatcgctgcaacagccttttcatggtctatccccctttgttggaaataaaatagctggtcctcccctatttttgaagtgcttgcctcatgctcaacacgactagaaatgcaacccacctgttatcacgcaagttggaacagaatgttagtgtaaatgtaatttcagccatattagataaagaaatagatgatacgcattttaggcataagtatagtactggaggctcattagttacacatctgtattcaaaactgcaaatacatgtaattgcagattatggaagtgcttgtgcataggacatgcgtgcacagagataactcatgtctagctcaagatcacaatgggccatcaagaataccatgagaaacattaactgctggaactaagcgagtagcctagaggtgatggtaagcaacttaaaggtacagtgatattgcagaaagaatgcatgacactattagacaaacgaggtcaacccagcggcttctatgaggaaggcagcgcaaaggaggcccgagcgcttgttaggaaggccgaaggcggctagggtgctgaagggcggaaagctaaaaggtcatctaaaggtgtatttgaatgggagcatgatgaaacctgaagcggtactaaagttgtgctggctatacgccatcagtgtcatataaatgttccagatgaataagtatgagatttttcctgcttttgaacatgaaaacgtgcatggcaggagattttctaaccataagataaattggactaaaccaatagtttgactcttatagtttttagccagcataaaagttaaattcagtaatatggaatcaacggcgaccatatttcttctaatatatggaacagtgtgtattcccaaaaagggtgtcattaccatttactttgcatgtcaatatattgaaacttaaatggagaagactgattgtaaccaaggactacgaagattaatatgaaaccctccaacttgcaaaattatcaaagcccctattaatttatacatgctctattgcttttgtaaaacagaaactgaaaaatgacatacagaacaaaggattaacaacctactcttaatagtttgcattataaaaatgcaattggcccttcatgccaggcaaatcaagaacagcagagcagttacctgaatagtcggataggtgttggcagcagcgttatccccaatcagcaaagaatcacactgtgaagaattataagcattttctgcgcctgagtttatctggaccaacccacggtagcaattccgtgacttcccagctgagatacctttggatataatccgactccgcgaattctttcccttgtggatcatttttgtccctgtgtctgcctgctggtaatccttcgtcagtgcaactgagtagaactctccaacagtatcatccccaagaagctccacacttgggtacttccatgtaattgctgaacctgtctcaacctgtgtccatgagatcttagagccccgccctttgcaccgtcctctcttagtaacaaagttgtaaatgccccccttcccctcctcatcaccagagtaccaattctgcaccgtagagtacttgatctctgcctgctcctcacacacaagctccacaaccgccgcatggagctggttggagtcataagctggagcagtacacccttccagatagctaaccgtgctcctctcatcagccacaattagagtcctctcaaattgcccggtctccttgtcgttgatcctaaagtatgtcgatatctccattgggcaaaccgtatccttgggcacatagcagaacgacccatcgctgaacacggccgaattgagggcagcatagtagttatctgccggcggcacgacgctgccaaggtagcgcttgacaaggtccgggtactcgcggatggcctcggaaatggagcaaaagatgacgcccttcttcatgagctcctcccggtgggtggtggcgatggaggtggagtcgatgacggcatcgacggcgacgttggcgaggcgcttctgctcgctgagcgggatcccgaggcgatcgaaggtgttgagaagctccgggtcgacctcgtcgaggctgttgagcttgggcttggtcttgggcgcggagtagtagcagatggactggagatccaccggctcgtacacgttgtcgctccaggtgggctgcaccatggtcaggaaccggcggtaggcggcgaggcggaagtcgagcatccacgccggctccgccttgagctccgagatgcggcggaccgtggcctcggagagccccttggggatggagaaggactcgaaatcagacacgaacccatacttgtactccctcttcagcaggttctgcagcgtctccgattccgtccccgcctgggacgacgacgacggcgatggcttctgcgggcccgtctgcacggccaccaccgagaggcgtccacggcgcgtgcacggcctccgccgggatccgtacgacgacgggcacgccgccccgagcttggcggtcgcggcggcgcagcagggcgagaagaggggcgtggacgacgcggcggctgcggccatggtgcggcggcgtggcgaggccgaggcgaaattagggatgcggatgggatggagagcgcaggaggggtgggttgttgttcggtggtgtggacccgtgctacgtgagcctcagccgcgcgtgaggccggcgcgggtgggcgcggtccacgggaagcccggcgcgatgggggcacggtcgtgtggcggccgagaggcgtggcgcggcagtggatgtggttcgcgccgcgtggcgggccatgcggaaaacgccgtggttttgtgcgatttctccccgtttcttggcctcgccactccgccaccgcaaaaaattccaccgcacacgcgacgacgaaaccgcctctggctgggggctttagaccttcaacggtgcccgttcacccgcgatccgacggtgggggagcccctcgccgtccagatctcagcctctcggatcggacggagcgtgaggtcgtcgggtcacccaacattttctccacacgcggcgactttctagcaaaaacgcagttcgtttaacgagagtcgctcacttctcgttcaggttcagcaatcgcaatctcgtctcatcgtcgccggccatggcggcgtcgtccttgctccggtcgctctcccgcatctcgcgccgcggctgcgtgggaggcgcggggccgagcccgttccaccacagccgcctcccgtactcgccgttctccaccgcggcggcggatgcggtggagaggagggggttcgcggggctggggccgacggcgaagggggagaaggcgcgggtggtggtgctggggaccgggtgggcggggtcgcggctgatgaaggacatcgacacgaccgggtacgaggtggtgtgcgtctccccgcgcaaccacatggtgttcacgccgctcctcgcctccacctgcgtcggcacgctcgagttccgctccgtcgccgagcctctcgcgcgcatccagcccgccgtgtccaagtcccccggctcctacttcctcctcgcccgctgcaccgccgtcgaccccgacgctcacacggtgagacccccatagcagctctgggttggtgtgtgcggccaaatggccactggttttacagacgtgcctgcgtggggaatgcctgtttccaacattcttggaggagtgatcaaaatgtgggaatgatcgaagctcgatcctttctatttttcctcgtgcagaatcgatacttttgacctttttgaataggggagaggagtgaatcggatttctgggctttgctggaggaatcttgactttactcatctgcatcgtgatccatccacagcatgtgctgcgtgtctcttaagtagttgattgagtagttggtgagctgccttttggtcacatcgaaggagaagaaagttagaccaataataatggggaaaatagctagagaacgctgctgaacttgcgtatattcacgaattcatctatggttcgtcagattctatgtgatactgtatttattgtttagtactccatccggcccaaaatgtagcaacctatctagtagagtactaggttgctatattttaggacgaaatagcttttgcctggaaaagaggcatggtacttcgtgaatattcaccatctagtgcatatttagggtgcagttttcatttaaactttacaaacccactggatggttaatacatgaatttcctataccaatttttctctgaaaagttgtttcacctatttattcatcgtcctttgacctttagattgattgcgagacagttactgaaggtgagaaagataccttgaaaccttggaaattcaaggtagcgtatgataagctggtctttgcgtgtggagctgaggcctcaacttttgggatacgtggtgttactgaccatgcaatatttctccgggaagttcaccatgctcaagaaattcgcagaaagctccttctgaacctgatgctatctgatgtacctggtatgccacagaaacacaaaacaactcaaatcaagatatttgtgttacttaggtaatttgtcacattgacaactatcacacactcacacttcactggcacaaaggaatcagtaattactcgttacttttacattttgtttgtctcttgatgaaatttgcaactacattaacctgggctcttattgctgtttcttgtttttctctgtttgattgagcagaatttagaatagaactattacattttaggtatacttgttttttacaaaataccttgtgtgctgaaatctaattttgtttatatcctccttattataaccaattggccaatgttatttgttaaaacaggaatatcggaggaagaaaagcgcagacttttgcattgcgttgttgttggaggtggtccaacaggtgtcgaatttagtggtgaacttagtgattttatcatcagagatgttaaacagcgttattcacatgttaaagattatatccatgttaccttgattgaggttagagctgttggcatctctccctctctctaaactttgaccacacttaacaaattttgtttcattttattatttcaggcaaatgagatattgtcatcttttgatgttcgcctcaggcaatatgctacaaatcaactaactaaggtatgtaatctctgtctaatctagtgttgtactgttgtgccattttaagccatcatgtaccaagactccaagacctaaaaatatgtgtggatcgtataagaaagctggcagtgaaatactaaaaataacttgtgatcatccaacagtcaggtgttaggcttgtgagaggcattgtgaaggatgtacaacccaacaaattaatcctggacaatggagaagaggttccttatggtttgctggtatggtctactggagttggtccttcatcattcgttaagtcgttgccatttccaaagtcaccaggtggaaggtattgtaaattggcttgaccgtatggagtttcatgtatatgcatcatatactgaatgggatttgattatatgcacctgcgcaccttctgtactttgaggaatagggatatatatatatatcttctacatgtagttcatttgtgaatcaggtttcaccatgcactataagaagcttctactatctataggcttttggtatccacccaattactggtgtaacatggctatctacatctttggtacctgtgatagatttactggttgcctggtcacaggattggggttgatgagtggttacgtgttccttctgcccgggatgtgttcgctattggggattgcagtggatttcttgaaagcacaggcaaggatgttctcccagctttagctcaggtacttatctgaacatcttcctacagtccgagtcaatcacaaagtatttggcaaactaatatttgggcttccttaatcttttctggagtaccaagaacactgggaggaataggaaccagaaaaaaaaaagacaaaagggccttacatcaacattaaacagattcttggccatgacaaacctcatctattgtataagggcctgttcactttgatgccaaaaaaaatcttaccaaattttggcatgatttcttatatagttaccaaaatttggcagcaaactaaatgtagccacttttttggcaactttaccaaaatttggtaaggttgaaaatggcatcaaagtgaacaggccctaatttctgttctttctcatacaaatactttctgttgtttgaagtagatgcactctctcatatgattacttaattcaattattttctttagaagaaacttccaaaacagtatcatccctcattttgtttaaagaaaaccaagtagttccgcaggtttgaggtaaaggaaaacatgcagggtgtggtataagaccctctttaagttcagaaaacgctttacttaggccaggctaagtagtaacttaaaaggctaaagggtttaacataaaccgaaacaagatctttcggtgaaacaattcccaatcctttcactatcttggattattgatatcggttagaaagaaatgggcatcttctcgtattagatatttatacattctactgcacttgtactctggaacaggttgcagaacgacaaggcaagtatctagctcacctgcttaaccatgtcatgaaagctggaggagggcatgcgaactgtgagatcgacgttgatctaggtcctgcctttgtgtataagcatctggggagcatggcaactgtcggaagatacaaagctctagtcgatctgaggcaaagcaaggctggttactgtttctgtctgtaaaaaaaacttgcattgttctaaacttctgacgagttaactgaaattgtccctttattgtcaggaatcgaaagggatatctcttgcaggatttgtgagctggttcatctggcgctcagcatacctgactcgtgttgttagctggaggaacaggttttatgtggctatcaactggctgaccacactgttatttggccgtgacattagccgtatttaggtgcctgtttgtagatatctgaacgatgaacagtacagtgcatcctttcccacttctttttttttgtcagatatgtgtaatttccacagaatttttttcttaaataacactatcaaaacaaaccaaggaagcgagttcaaactttaaatactgatgattagtatcgctatctggagaagtctaagaatcatggaacgtccgtgcaacttatcaccatcttttaaaatccgtgggttctggcctccatcgcgattttgtgcactgtccacttgttcaggcttcatttttacccagagctgacttaagaagtacagaaaacaataactagagtgattactatctgtgaagaccgcatgtgaacaatatggttacttgtttcatataatttataaaatccttataaacctttacaataataaaattatgacatcttgaagtagttaaacctcaaaaacagaatccaagcaaaatttgatgtatgatcactctatcttcatatttaaacttcaaaattaatactgtactgggtacacatctacacatagaaaacataatgtacggactacaaacggcgcctgaaaatcaacatggatttaccttctatttagaaatttattaggtcatgtacaacctatattgtatcacctagaacttgggttaaatcctggatgatcaactgctgcactacataagtacaatttcttaaggacggaacatcattactgtcatatgcaagagttcaagaacattgagcatacagcaaagccccaccctcatccaacagtaggtgagagtaagatggtgcaattgattgagcagtcaaacaggatctgatgcagctcccaatcaacaaagcaaagcatactaaagtagtacatccataacatgagcttgctgaagcagatcttcatcatcatcatcatagcagtcataactcatgagcctcgttgtccacattggtgagatccaaatcttttcaggttccaatatgctgcttcattgctagagttctggtgacatgtgagtaattgttcacccagtagagctgcagcagcttgcaatagcaccttcatttcgcgccaggaggtagccctgaagctcttcacagctttgcttagagattccactgtttcatccgtttaaatagttgtgacaactaagacaaaaagcaacaatgttgagatgaactgtgtttggttctataatatgtttagcacattctttgaacagtatacacagtgatcttgtgttttctaattgaacagactcaatgcattttcattttacatcttggggcagttctgcagaaaaatagcattgaatctgttcatgtaatactgcaaaagagtaaaatatttacatggaagttattgaggtaattctgcaagccaaaaaaaaaaacaattaactggcttatgtgtgagcttttggaagatatgtaggatagatgtactgaaaacccaaaaacacagagttgtctcccttccctgccaagagcacctaagcaccacccaaacccttccgagtttgtttccatatgccaatctactatccatgccagtcatagatgcagaaaaatacctgttactctcggctagagacaggcatacaaatctggaaaatcaaccagacctctttgtgacagctggtctgggagctttgtattttgtccgaaatggaaatcaatcagaagaaatctcttcaaattctcttctgccaagttccacatgaaataaatgttacatggtcataaaatagaagtgaccaaagacaaacatgatatatataactcacatgtcatataaagttcaatactatgaacttccttattactacgagctaagcaattttgttccaaataataaacccctttctatgcacacaatcagtacttaaatgtattaagctctttctatgttaaatccgttcctcaatatgtagttccaaaaaggggagtaatcccatccccacaaaaagtgtgctattccttaaaagcaagcaagtaatataaaggttatcacagttacacccaccactgctcaatgaaacagcttccatggatcataaaattcacggcgatggcaaagtttaccttgtctattgaaacaatcaatgcgtgagtattttcattggaggataaacaaggactaaagatcaggctatgtaccttctcccaagcaacaaaagacaattgtgtccatggatccattctctgggtattccttccaacttcaatatactacattattgacctgttagttttctatatgtctgaaggagcttattgacacaaataaaaacacaatgtttatgcctattatttgatgcacaagaataccattgtgttggatgcacatttcagcatccaatttattgtcatggaaatgcagttgaaccattcattacctttcgaatgcaaaaatgtcttgatcaataactttccataaattaaacaggtacaggctacatgagaactaaacagataaacatttcagtgcaacctacgggggaaaatgaaaagagaagaaaaaatgttacactacaacacaggagacatcacccgaagaaatgaaatgcaatagttgaaaatcagcgagcatggcatgcagagtttagatcaacaccacaacacagaatgttcagtttatccttcgcctcttgttccgttggaggcccccgccatcagcatccaaagaacccagggcactgctcctccctctcctcctcagggatcttgatgaccccgcgttacttggttctcctgcactctcagagataccagcatccccctgtatcactgcagcagtgcttgagttagatgcttggtctgcagaaggtgctgcaacaacatgagttctgtcaaatgttgactcgagatttggaggattcgatgatgaagccgatgcaccatattggcttggtccagttatccttctaaaatcactcatggcagatgcaaatctttccgtgtcttcatacccaagaagggtaagtccacgcaaccagtcaattccatctggtaataatgagctcggaccatttctggatggatccgatgcattgtttctgatcaaaccactgtcaggggaagtggatccgccatcgggagggttagggttgtctgcttctctcagcaaccgtcttgctctcatccttgacgccaatctacttaggcgactggtgtgctgagcgtgagcagtgtcaaccatttcctgcacagctgattcaggcggaccttcaaacctactcgcagtattcataatctgttggtccagaaggcgcctccatgatgacaataacccatgagcctcaccaagccttcttgagatcggtcgcaaatggtgaaactgctgcctgaagctttcgagccgatttccatgtggtcttggtgggatagtaggacctgtttgtttcccaccttccacagccttctcggcatccaaacatgaattccctctcccatagatcggagtaatattcgcctcagtcacctcgcctttgcagactgggcattccttgtgattggaataaacattgagccattggtacaagcaaggccagcagaagagatggccacaagaggtgaccaccggctcgctggccatatcgaagcatatattacactcaaatgtggcagcgctcctgccctgctcctccgattcctcggaggcgcctacttccgcgccatcggcagctaccttattatgttcaacagtatcattcatcggttcatgctgcagcactgggactgcggcagcatcacgcccagctgggtaagcttcagaactgagtggcggaaggtccgacctaaaccgcctcgcacggagccatctgcttccagtctgctcgagaagccgccagtaacgggctgcggtgtcagggaggaaagaggacgatgccgtcgacgaagacggccggtcctcccaacctagcagttcgctggcacgcaccagcggcggcggggggtggaggccaaactcgaggtcgtcagggagctccgagaccaccggagccggaggcggcgcatacggcggcaggtgcgtctcggaagcaggcgggtcgtcggggttgtacagggagtagacctcctgcagcggaggggaaaggtcggcgtgagagggggagtacgggggatgcgacagctcgggcggtggcggcggcgcgtcgacggaggctgcggaggaggacggggaggagggcatcggggtgctgagggcgaggtcggagccgaggtcggagcggcgcgggcgcggggcgcgtgggaggccaaggtagaggttcagatccatcctcctgctactccccgcggcctcatcggcgtccatccgacggcgacgagctccagcttcctccggacagcaccaggtcgccggcttcagctccccaccttaccatagtaggtcgtctcccccaagaggaaaaccctagctagagacagaggcactgcgcgggagagctgcgttataggttgggtagcagtaacacatctccgccggtgctcacgccggcagattagcaggcggcgccgccggtaagcggcggctgaggtgggaggaggagagggagaaccggagaagagaaggggagagagagtagcagcaatgtggtgccaaaaagaggtgccctttttattgggtttggttaccgcagcagagaagaataggtttgcggcttgcaagttgctgaaacgtgctagcgtcaggtgaacgtgggttaatttgggatttggaaagccattagccgtagaaagaaatactttttacctgtgttattatcttgcacgttataaacccatctctctcttaatagcctaaaagaagcaaatgaggtggacccagttgcagtggctcatgtgtcatgtgctgttgctgttgcctttcagcagtcagctcaaacaattttacagctaaaaaagctgaaaaggtaatagtcatgattacatacgctgagggaaacaaaacaaattcacgatgatgatttacatttaagaacaacaatcccgtgccaatataaagcttgctaagacaaaccatgcagaagaactgtaacatcgggttctcctgaaacaatgcatcatttctactttggcccgctttagttcgcacacaaaaattttacaccgcatcacatcgaatgtttgaacacatgtataaaatattaaatataggcttaaaaataactaattgcacagattgcgactaatttacgagacgaatcttttaagcctaattgctccatgatttaacaatgtgttgctacagtaaacatttactaatgatggattaattaggcttaataaattcgtcccgctgcttactggcagattctgtaattagtttttttattagtgcccgaatgccctatacgacaccctatataatatccgatgtggcacgccaaaactttacacccctcgatctaaacaccacctttgttgattgagacagagatgccatggtaaaatgctactcccttcgtttcaggttataagatattttgacttgccgcttcaaatttgatcaagtttatagaaaaaagtaatattttcgacctaagataaatttattataaatatatatttaattattaatttaataaactaatttggtaatgtgaatattattgtatttgtctataacgttagtcaaacttaaagtagtttgactttggtaaaccacaaaactgaacaacaaaacctaaaactggagggagtataccacaaaaaaaacataatggacaacaaaactctcacagtagccattagccaaagaagatgtcacggatgtagacaaattgaacagttgttgattgagccagagatgccatggtaaaatactagcaccatattggacgacaaaactttctcaaagtagtagaaggaaatgtcacgggtataggcaatctcatcatggtaggaaaacagcatctgaggtaagttgctctacatgttgtcatttgccccgatgcgtgcactcttctgctgaatagctccaccagaaagttggtgttcattgttgtgggctaacaatgtcaagaatctgcaaacacagaggaaacaaaaacgtgcaagtgtctggttaattaacttagagttaacaaggaatatcttgtggatagaagagcaaatgcaacggaaagagaaaccttattggtgaactgttgaaaaacttgtccttccatcaatttctctaattcctgaggatgaattaatgagggagtgggcatcataaaataaaggtggtagagagaggaaaaaaataaatgtaagtgagaaaagttatattcgtatcagtattcagcagactatagtaaaaggaattaattcatcgaacgtgcccatttgaagcttctcaactactggtaggaaaatgaagtcatgatggtggaataagaaacagaagtgttgtactataacagtgacaatgttcattactgcaaaccattgtcctcaataggtattggcatattatgtgcatgttatttgagcagccggacagaaattgcaaacatagttaacttgttaaataaacttgcagttatcacaagagtagagaattaccttttctggctctgcagagccatcaatcttaagtagcatttgctgaagcttacaatctttcagagcatctcggatctcattagattccgctggcatggatacaaaaatcaagcaatgagttaattgatgatgtttatttctttttgcgagacaagacgatgagtattactatgattaattaaataaggtagaaatgctagcaggttatgaaatttgtacagggagggatgtggaaccaatatacaaaattgactagcatgaagcccatattctgcttacagtactatccttactaactatttgtcaactcttacgaataaccactctccaaatgccacttacgattgtccttacatttttgccaccggagagaaattttcttaacaatttgcccctttcaccgatgtggcataccagcatggactgaggacgtgaatgtcctttttgcccctgccactccccttcatctcattgagatcatccacagcggtgcacgtatgcttctggcttcctgcttgcggggtcacctcctcattgagaccatccgcggccacaccagccacgctgtctcatcaagcctcgtcaatcatgtgtcagcggcaagaaggttgtgcactgcatctgcatcatcttcttcggcaggccagataaccgcgaggccctcaaactcactgggaggatggcggagcaccccggtgcaggtcgtcatgcggttcattgatggcaaggccggcaagtgaggagcacgttgaggtacaaggagaaggtacatccgcaaggttgaaggttgtcatcgacagccacaaggagaaggtacatccgcaatcaatagcagccaaagaacatccatgcacgcacctaagtgttactgctacctaatggcttgtcactacacagcagtgcagaagatggacgagaaacagcggcggaggtgagctcaaatctgaaaaggaaagggagagaggggggaacacaagggaagggccatgggtaaaatggactttttgtgtctcttgtccacattggctgtcctcactagcatgcttaataggtgaaagtggcaaatgattaagaaaccttctctctggtggcaaatccgtagagaaatgtaagaatggcaaacggagagtagccatttataaaagtggcaaatagttaaattccccattactaaatgtgcatgccaatattttactcctatactgtaggtctgtaggattgggattaggttcagataattatgaaattgaagtcgatattcttgggttgaaatgctggactatactaacatggagacatttgtttcagctaacaaataaagccagaaatcaagtaaaagcaaaggattcctttttaaaaaacacaaatcatggtatgaaatagtcaaacataggcaatacctaaagatcttaatccattcttgtcaacaagccagcttggatcctcaacttcaagagattttgcagagtgcaatgtgtttggatattgtgtgggacaagtcgtgtccgatactacagacaaaaaattgagcttaacataaattttcttggccttcaagattcacaatgaataatattatagcccttataataaattctagagaaactaatttaaattattgattaaaaagcatagcatatggttacttcttcttctttttttgcgaggatagcatatggttacattgtttacaactgaaggtagtcatgatctataaagttttgagttcaatcaattattagtgaaaaccaaatagaagaaatggagagttaacaacagagataagtatggtgcatttttacataaagacggggtttgatccttgtcattaggacaatttgttgcttcttccagtgacctagagttccttgctgaaaacaatagaaggcacaactgtaaattccagtagattattttagaaacatgttagtaggacagaacaattgacaatttaatgaatgactatatgataagataattcaggcccttatatatgggcaagtacatgccctgcaggacttttaggtgtacacagtcaaatgctcatttacagtatattgatgtaattttatgtaggacccctctattttaatgatcatggtttcaactcaatttccatatatagcaggactatatagctgttgcaaacaactgtattgagtcaccaaaagctagagcacttacaaatttcctcctgaagagatgacttgctaacttcttccagaggtattgtcttctggcaaaatttatctgttggcaaaacgatatttagcacaaatactggctatcaagataataaatatattcctctaaaaaagggagatgaagatatttggtggccatttttgtttgcataaaggcaatgcataaatgatagttataatttgtgctgtgtttagtactgttcagcctttccctaatctcaaaccaagtacaatagtaaaattgccaaaatttcaaaacaaaaggtcccccgcagacttggacacttggagtgtgataagcagtttatcacttgctatatttttttaagacgtttggtttattgagctatgtttaaaaatgcggctggcaaagaacgctggccaaagagagaaaaggcagtacagggaagcttgttgatttaaaatacacaactaagaagcaacagagggaacacggcagtttgctacagccccctcgcgctacttgagctactttcagatcgcagcactagagctatatttagaaactaccaaaggatagcactgagtacctttgtgatttttaaagcatgccaccgagcaactgcaagggataatgaaaccgtttgtaaggcccaactgcattacacaatagagaaaaagaagccagagaaattgaacggaccatgctcttaattggtctacaatatgacatgtgctcttttgccacatatgtgtgtataacatgtagccctggccccagttgtcatacaccggactgtggcaaatgagccaatgccattcaactttagggcaaaagagcaattttaccaaacaaatctacaggacacatagaagatgtccaaccgtgattgcatcgctgaacaggtatgttagttcagtagtccatttagtttcagggaatcttgaaaaacagtttgtttagataatcatatttggcaatcctaaggttacatccttgaaacaattgtgcaagagaagtcataaagtatgatatgtaattctcttgcgtattcaagaaaaaataagcaaagtattacagattattgaatgatggacgtttgcctctgaatactaattcaatacagcttagtaccaaaaccaacactgacaccagatatcaggagaaaggtttacatgtcttgttttgctgctgcctttttttttttttactcatgcaaaaccactccagcagcaagctaccgagtcaaacccaaaatatatcaagctaattctgatgtaggctcatattctaaaaagaagctaatgcttccaaccattaatcatcaatctactctattgacctagcaaacccgtactctcttttcaagcagtaagcagtgaagtaatcgatgtgaacacagcaagtaggacattgcactaaaaccgtaacaagtgttcttcaattcaattgttatgctagctagtaggccattactgagcaccatgatcgaagcgatttcccaaattttaaggacagtggtatgcgacgacgctacccatggaagctgtaagcacagaagggtggagatatccggtggctggacttactatggcgtgcggcaagcggagcacttgtacttggacggcgcctccttgcacacgtcgcagctcccaccagccatctccagccacctcccctagcccctagggattcctccaggcgcgacctgcacccccagacccgtctcaggtgtcctgtggctgctgcgggagcggcgaaaggagaggaaagggggaggggacgcgctgaccttttaggtgctttcagctcgtgcggctaggctcgctccacggcgcgcgacgggcgccctcggccggcggcgagcggaagagggcggcggcgccgcggcggcaaaggtaacgggatatgcgagtggaggaatgggtgtggccgggtggctccgttctatgcctgggccagtttagtgggctggtccagcccgcgtggccgcccgcggtggctgttgcggaataagttcactttgggtccctttatttgtcgccctgtccgatttcgtcccttgaccgcaaaactggatacgacccatcccccaacttataaaaaccaggtaaacaaggtctctcggcggttttgatagcggttttggctgacgtgatgcctacgtggctaatttgactcggtctttatttgacgtgacactgaggcacttacgtggcaattcgatccggaaaaataataaagcatgtgggacctacatgtcattttcacacataaagtaataaaaaatagtgggacccgcatgggccccacatgttatactcacccctcatcttcttcctccctctccatctccatctcccctccatctctctcctttcctctctccagcggcctctaggcgccacggctcacggggtgacggggaggtccggcggtggcggccggcgacgtgacagccgccggcggcggcgagctccacctctcggcgcagccgtgcagccgagaggtgagtaggtgatctgtgagcaattagcaattaccagttactgacgaaaggtgagtaggtaaaggcattattagcaaaaactgcatctatcggaacaaagttcattccggtggtcaaaactcaaaaccccagcgagctgaggtgtaagagcgacgtcgccggccgtcggatcgcgggagggggggctacgtgctggcgcaggattagatccatgaatccatccgtgccgcctacgccatcagacagccacgcgcgcgcagggtcagaaacgcgcgcggctgcacggctgcacgagaggtggagctcgttgccgccgccggctgtcgcgtcgccagccgccaccgctggacctccccatgaccccgtgagccgtggcgcctggaggccgctggagagaggagaggagagagaggggagatggtgagggaggaagaagatgagggggtgagtataacatgtgggtcccactattttttattactttatgtgtgaaaatgacatgtgggtcccatggctttattatttttccggatcgaattgccacataaacgccacgtcagtgccacgtcagatgaagaccgagtcaaattagccacgtaagcgccacgtcagccaaaactattatcaaaaccgccgaggaacctcgtttgcctggttttcgtaagtttggggacggttcgtatccagttttgcggtcaagggacgaaaatcggactgggtgacaaatagagggacccaaagtgaacttagtccggctgttgctggatcgtccaggcttgcaaggccctggcccatctatataattctaagagttcctttttttttcgaggaaaataggagatgttttctgatttccaacaggaaatggatgatttatttgaaatttcagcgtttgaaacaatgttttaactatgtattgagttgatgactgcttttgctcttcttgggtgtggaatataggatttcgcactaatctgtgacattttccccgcgtctggaatacgcaattcggtatcactttactgtattcttagtttctttgtgtttatcagtgatcactggtccataatactccctccgttttacaatataaatcattctagcattttccacattcatattgatgttaatgaatctagacacatatatctatctagattcattaacatcaatatgaatataggaaatgttaaaatgatttacactgtgaaacagaggaagtagctcgcaacgaaattggagaaataatgtgaggattattcgaagtaccatcacgaaaatgagccatttcctggttcagttcgtatatttttttcacacgatgaatgattcactcgtgctcaaaccactccaatactaggattacaaccaatccacacacacaccaacaaacaaaacaaagctatgcaacatgccgacgaccatggacaaatcttatatccgataccggaccagcgggtccttgaactgaagccgcccattatacaccctccacgcaaggtcctcgagtaaaaacgagtgaaatctccacccatccccatcatcgccggctccatccacctcgtcgtcgccgccctcttctccggcatccgtgaccgggaccaatggcgagatgacactgtccaaggggagagtgatcagcacggtgactgacaagcggtcagcctcggcgccgtgccctgctccgggtgcagaagaaacggggcgagccatccctctcactttcttcagctttccattgctccacacctagcacgcgtgccataaaaaacaagaggcattaaggcaaattcaagcaagttgttactgctttgatgctgctcaaagagtaaaggaaacaacagacatgacatgatggtcactttgtggtttctcttcaaaagccgagatctttgactcttttttaaggtcctttggtggattccaaaccgagctgtgaggcagtgatgcaccggttgatgcagacatggggcctaaatgggtccaaattgagtggtgacgcacagcctatactttagaatttgatgccttcgcaaaataaaaatggatgctttttagtacatgtctatgcttcttagagacagactctgccactcacgaacaatcaacacatcttttttctgtggtgaacgaccagcaaattcgtagctgtaaaacctgtaattaattttacacgtttgccatttgtttttttaatgcaaattacaaactgaatcaataatatgagtgtctacatgtcaatcatttatgtgttatctgtgcaaaaattaatgctctaatgtccttccgtttgcaaactagtcaaaatgagacatttgcacgcaagtacctgagcaatgttgccgatggtgacaaggagtgcgccgtcgcgcgcgcctacggccgtccactcgccgccgtcgtccatcacccagctcgccggcgccgcctccttcccggacgcttcccactggcaatggatgcccacgacgtacgggtacgccttcgccttcccggcggccggaggcgccgcctcgccagcggcaaccttggagacccacatcaagcacctcgccttcctcctcccttccgcgaacggcgcctccccgaagcccacctcgggacacccggacatcatcgccaccacctgcatgcccacgtcccgcatccgccgcgcgtactccgccgccgcagccgggagcgcgcccatctccccctcgtcgtcgacgtcgaacaccagggcggggtcctcggcgccgtccgcttcctgctgatcctcctccgtgaatccgagcgtgaggaggttcgacgcgcggcgcgcggacgcgtcgacgagggagagctcggcgagcgcggaggacggcagctgggaagggacgccgtgtccctcgaggtggaagtaccccacgtcggcggcggcgtcgagacgaagggtgccgctagagccaagcgaaacgagaggcggcagcgacggcggggccctggagcgagaggagagcggggagcgtagaatcggcgccggagaggataggagcaggcgctggaggatcgtcgagagcgcggcgtccgtgcccccacccgcggcgccggaggacgggagcgcgtggtggtggttcgacggcgtcggcgggggagggcctgggaacacgctccctcctcctcctcctccgttggcgccggacatggatgacgctgcggcggtggaggaggaggcggccatggagacggcggccggagcggtggactcggactcgaccgacgtggaggagaaacaagtttttggtaggaaactgggaatcgtggctggtgggaggcgttggcgccttggcggcgtggcgtgggagaggaggcgatttattcgggtctagttggtctgtcagtgtgggcccatcttacgcgagagtggtgggccaccttaggagattgagccgacctggaccggcgaagcaggggatgggccggaacagggctttattcctgacctcaactactcccacaaatccctcttctcagttctgcttagttagcttgctttttgtgaatttgcaaataaaaatcctccaaattttcagttgtaccttgtttttctctcaaaatgtagcagctcgtactttttacttctacgagacaatttgtattcttttcggtggttcattatctctgcactagcatgaagaaatggaaacggaatagcctcaattagcttctgtgcttgagaatttttcacatttatagcccataaactaggaaaatgttgaaccggataagtgaaggaaaaggaccaatagtccaataccactccacagcgactgacaggtatatctatctcgaccattggattgttgcttcttccacatagcccggcagccggccatgcgtgtcgttcttgtagctttcatactgcgaaacaccttctgcaaaatgaaaaaaatatgtcctaaatacacgagcaacgacgtctgagaaattgtcaagtaattcaagaaagcaaccgtttgccttagcagtttaagagctgaccccagtgattagttaggagtagctttctatcgctgaacacaaaatcaaaacgcttcgtgtctccattggacggagagaccagcacgagacgtgaaaattcgccatccttcagagatcttgccacgtcgtgggacttgtcggatacgcacacgtacgtgcgattaatctggcacgacgatctcttttctcctgtcgtttcaatatattattatacggtcgaatggatcgacagggacaaatggcattgtagacggtgacacaaaatgcagggaaagaacaacatgtttggcgaatcatgcagagccgagctctcttttactagtactagtacatttcaaggacttttgcggctgcgatgcttaaattatgggaagggtgtccattctattatcgtcttttagtgccctgttagaatcttgcatagtcagtatcatgtactagcatttgctattttattgcccgtgtgtatgctgtagtctcggctgttaaagagaactgtttgctttgtcttcatgcacgggcgatatttgagaaatttgtagttgcagtcctttagagttgatatatattggcctttgataaaaagaagtgcagggacaaattcgtttttatgggagaccttcccccggaaacaagcttgtctgcagcgatgtgacgctccagtttcatgcgttttggtgttaggttggacaacatctccatcagtgacagacattatacaagtagaatttctttacattaattcatcattttccagcgatatctttatggttttgtaagccattattacctactagtatcttaaataatcaagaagagaatgatctcttctaccggaggaaaaaagggagaaaaatatatgcctcgcgtgcttagtcgttggatcatggattcagaggtctagattaaaccagcaaccgtgggctactccaagaagaatggttagcatggaaaattgttccctcaactatggtttgagtttcattcacgtcccccaacagctcaactgtaaaccagttatataacatcccctaattactaacacaagtgcaaatcaagtctctcgacgctttagacaacggtttcatcttacgcagcatcatgtgactcgttgaccaaacgttcatctgacgtggctggaaacggtacgtgacttgatgagatgtggttcaggctagggccatgggtaatcaggctggggctcctatctctagcatcgccccttagaccaccaatatggtggtgtggagcgacgaacgaggatattattgctacggttgctatcttgccttgccgccaccctcgagcgtcgactgaatctcttccacccacgctacaatccgtgataagttgctcgaatctctcttccacccagagctatgccaatgtgttcactaactatggccattgcctggctcctctcgatggacgcttgtcacccgttttccactgctacaaaattatcggggatacaatgttctattgatggcaaatttagtcacacagaggaagggtagacgaagaagaagggaggagaaggatggcatggttgccatcgtttggtgacttcttggccagcaatcatccgtctaccgctcgtcacattctccactccaacgccgagctatgacctcaaatcctctttctccactgcccttgagtcccccttctctagtacgaggagaggagagttggacacccgcagcgccagctgtccttgttctcgttcgcaatagatggtgggcaggcaacggttgggacacctaagaggcgagagtgaggagtcggggtgactggccgggtcgagagagaaaagaagatagtagaaagaaagtatgaaatgaaatgtggaccctataatttttttattaactttttgttggttggattgtcacgtcagacgaacattaagttaatgtgccacatatatgtcacgtaggatgagtttgtcgtccacaccgctgagggactcgatttgctctggttttgatatttggggatgctctgattgcacatgcgaacgttaaaggaaactcagaccccggtgtgagggacctacggtggacctttcgctggttagcattgctccataagtaggtccaaaattctggaaaggtgtcctaaaggaaaatgtatactttgactcccatgattcatgtcctccaactacaaaaccgggtatatcgactactccaactccaattatcaaaaccagttttggaggtggttttggctgacatggcgcctatgtggcggtcttgaccgagtttttgtcctacgtggtgcttacgtggcattagaataaaaaaaataaaaaaaatatgtaagacccatatgttattcacacaaaaaaatattgtgggacccgctgtcatgtgggtcccacatgtcatccactctctccttcccttcttcctccccctctctctctccccccggcctttctcttggccggaatggcggcggtggcggtcgagacgacagcggtggcggtggggacgaggatggcagcagccaaggagtgcaacgctgtggcgatggggaggaagaagggaaggagagggaggatgacatgtgggtcctacaatacttttttttgaatgacatatgggtcccacatattttttatttttgtttttattctaatgccacgtaagcgccatgtaggacaaagacttggtcaagaccgccacgtcagccaaaaccaccgagggacattgtttgcaccggttttgatagatggaggagtcgatatacccggttttgtggttgatggacatgaatcatactcgggcaatagttgagggagtcaaagtatacttttttctgtcctaaaagaccatttgcagcaactagcaaggcccaaacgattacatgttgagctagcaggccaacttctactgtaccatatggagtaggaagagtatgaatgtgggccatcaggcccagaaagaagagattttttactgtccagcagaatttttggtaccgcgcggtactgcaatcgtaaccgtccattcagccagatcaaacgacccacaatcgtcggtaccgcgaggtacgggaatccggtgcggggtacctccccctttgttcgcgtgtatggaactggtggaagggcagaattggattttcgcgtggttagtcaattttcgtagagacggtacaagtccccgacccgataatctgtctcttcccgatccccttccgtcgtccctggcggcggcgcagccaatctcgccggacttcgcttcctccctcactgcaaccagccgtcgccaacttgcccattcccaacttgcccttcctgtagccagtctaggtccggccgccgccgacttctgggagtcgatctatccctggatgacgacgacctcaatgcgcaaacaagaagaggtgaccatggcgacaagctcagcgtggcgaatatggcctcgacagctcatccgccgacaccatcgcaagcctttgttcgtggaatcgccatcgctgtggtatgcattggatcgcgagcactagcaaccctggaaggaggggacagaaagaagaaaaaaacgaagctagatattgagatgtctgaaaggcgtttggccatggatcgcacaagcaagaagaaattgggcaagcaaagaaaagagatcgaagaatttcagaagtttgtttatgggatcactagttgtaatagtgtcccttttattcaagatagttgacaatttgttcaatgaccgccgatgttgattttgtttaagatgaaacagtaagcttaaggtctacaacgaaagaacagtttacacatcagaccaagaaactacaaactttcagaaaatctacttcttttttactactattacattcatactttcagcaaaatcaagtaggttcattacatatatcaaaagacaaggaactaggtccagaacttggcacacaacataaatcaaactcagcctctcccatcaacatagcatattcttccaatgaatatagcagcaaagcaatgtttcgtatttctttcctgctggacattgctttgctggtcgtcgtcatccagggatagatcgactcccagaagtcggcggcggccggacctggaccggctacaagaagggcaagttgggaatgggcaggttggtgacggttggttgcagtgagggaggaagtgaagtccggcgagattggctacgccgccgccagggacgacggaaggggatcgggaagagacagattatcaggtcggggacttgtaccgtctctatgaaaattgactaaccacgcgaaaatccaattctgcccttccactagttccatacacgcgaacaaagggggaggtaccccgcaccaaaaattcaaaaattctactggacagtaaaaaacctccagaaagaaatttctccaccaaggccgtcagggcccataccagcaatacaattctccgatcagtggaaaacatgagtataaaaatacaaaattcggccgaatcggccagcatgcttcgtttgccatgctattaattagtcaatccttaactcagttttaaactcagcccaggtgagttcgaattaccctatcataatttataattttaccagaaaaaatacccgtgagttacaacgggtaaacgctattttaatcatattattgttggtcggtttaactaaagtaaaattcactgcgggaatttgcatgatcgaactgtaattagaagtccaatcatctcaaattagtatgcaagtttttaaaagagatttcttatatgtctccttctccttctccttctgtatttataaaagcgaatgaactcaaaaaccgattcaaacacggatttgtatttccaaatgcaaataatgaacttaaaaactaactcaaatatggatgacgtaccaaagtaacagcaaaaacatattcaatttttataatagcagagatatgccctcgttttccatagtacgattcctaaattggtaaaatgtatgtttttttaccaaaattttctataagaaattatattaaaaattcatatcaatccatttaaaaaaattttaggtaacgtttaattaattatgtgtttaataacttgaagttagcatagctcaactgattagattacatttggttaaaccagttcacccggttcaaattctagatttgaaacgagtgttcgtatttacggttaattattcttttaagggtatgttatgcctgtgtgttcatagtggtacagaaaatgcactgtggctaacccacttctggttaagctaaacacacctgctgaaccatcgagcaatcgtgggcggcacgcacggctgttactctgcacaagacaaaaccagggaaaaaaaatctctccgatccggatactagctgtttccctaagatgcgaagcggttgataagttgattcattccattttccaagcatgactacgacggaagagcagatattcacgtgtgaccaaacctacacactaaaaagaaaactaccaagccacatcacacttaagaaatgtttgcacatttcctcacaagagaaggctccagctcaacggaaaaaaaaagcatgcctccccccaaatcccaatcagtaaagggtttgcttcagcaaaagaacaaaaggaattatttcaacaatactatatacaaacgaacaatcctaatgaatgatagattacattatcgcaccatgttagagacgttttgctggcggcgatatgatgcacactacctagaacataatacgtctctaaacaaaacgggaacatgccaaggtccaaagaaccacacataccttcagattacttatagaagtaaaatcgaatccatgtaatgaaatcatcaagaaaggcactgctacagtgctatttaacctgaattatattcatcctctgccaaagcagcgactgatcgatgggtggcacgtccaatccctgatcctgtcaacacccaactcaaacgcgggcgtccttctccttccctcccggtgaagctgacgcagtgacactccaggttgcgcgcgcgcatgcgggcggctgggaagggaagccccgtctaatcaggaccagtgtcgtacgtggtccttccagcccgcatgacggagaggccatgtcgtttacgaaccaccatcggatgggtacaaacggaaccctcctcgtcccggctgcgccctgcccgtcccttggttagccggcacttgttgaagatctcatttgcgagctcatccagccatcctgatgaacttcacgcagaagaaacttggctcaacagcccgaagcgtatgttacactcgatcaactaagaatagagagatgtttctctgtaatcctgctgctaaatttttttgttagatccccacccatagagtactaattatagtattagagcagcagcattgcagtttgtacttgctaagttgctggtacaacactacaacttgctggctgtcctggtcataggtcaaaaaccgtactttgctcacagtgtccaaaactgcacctgttcacaattgatcagcttctctgaaccgaggaatggaagttgaaattaaagcggtgtctctccaatcatctcccggcggggccatggatgaaacagtaaaccagcgaaagaaaagcatcggtctatcagatcggaataggaaaaggaaattcagattcctcacattaccacttgcacttgggctaccagactcggacggccaatggcgttttcttttctgctcccggtcgctctctaatttgcccccaaattaaccaacgccggttgcgtcccaggacagcacaagtagagccaatcggtcaacaaatcatcttacaagacaaggaaaatgcaatagtaggagtccattagcaaagtgccggtgccatggacatcgctgtaatggcgaacacgattttcggacgatgcaaattatcttctggccggtaggcagagcaaagaaaaacagctataaaggggccaaaaaccaaggttcctggagatcacaggactacaggaaccgatacaaaaacagtgttttccttcaggaaagctacaagaatagtgctagtgagagcggcgacagaattgtcattactacttcgtattaggtggttggcaatctggtagaccattagaattgacagtagtttagctccaaattattgcgtcaaagttctcgacgggttgccgtaggtccgaggagaggtgcactctgcttgtcatttcaaagttacgaaacagcaaattcgtcaggttttgagtgccttcaaatagcaactcgtcgatcagaaacggctggacaagaagtcatattcagctggctagcacggccttgctggtggccttatttcctatttgatcgatttcgtgagttaataattcaagattcagtacgttccaggacgaaaaataccggagatgacgaagaaaagtaaagtacgtgacacccgagaccaccggaggtgtatccttttctctctggcattttgggctattggcgtaactggaattgaagtgtcaccccacaagtacagcgacgccgttgagccgaaaaggatattgcaaccgaactgcgagatgtataattgatccagattatagaacaattgatcttgtttgactgaatcaacatacattagtattactttttagttactggctagctcggtcagcctggtcaatggactgcagagctcttaggcctggtttaggccctgtttagtttcaaagttttctttttctaaatttccaactttccatcacatcaaaccttttatacacacacaacttttctatcacatcgtaacaatttcaaccaaacttccaaacttcctaggctgtgtgtttagttcagcgcaaagtttgggttttggttgaaattggagatgatatgactgaaaagttgtgtgtgtatgacgggttgatgtgatggaaaaaaactgaagtttggatccaaactttggatctaaacacagccctaactttttcttcaaactttcaactttttcatcacatcaaaactttcctacacacataaatttctaacttttttcttcaaacttccaattttagtcaaacttttaattttggcgtggaactaaacacaccttgatttttttgactttggcgtgaaaacgtaaccttcttctgtagtcataacgtataatcgagcgatgacaatgtggagatggtatacatttgcagaagcaaactccgtatcttaggctaaggaacatatacatgtttactgaagaaacttggtcaaatgggaataactaatgcagtggaatgcaacagagtaagagacagcccaggaaatcagatttagttgctacaagtagcagtaacaaataactcgcttaacaacagatggcccatggtcctgtcgatgcatgagaggagaacaggagaagcgacagagcgacaccaacatagcggaatcaccaacatttctggcattctattgtcgctttgtacgcccggacaatgcttaccctgaaagtttcttgaccgaaaagctagccaggtaaccctttcataaaaatataagaaaatttcgttttcaaaagaagaagaaaggttgaatggtgatctaggccttgactccactgtcaccaggatcatattcatttatttctgaaaccaacccaaatcatattcaatgctataatatatagttcctccgttttaaatacacgatgccatcggcttttagacataccgtttgaccattaattttattaaaaaagggagaatagctactttagtctctaaagtttctatgtatgatcaatttagtccctaaccttttaaatggtctaaaaaaatccttaacctttgtcataaggtctagaatagtccttaggtccaccaaaatcatcatatggatatgccatgtcatcattcatataaaatatatgatgaattgtctaatttactcttatgtatatcatagaaaaataaatataagggtgaattagacataaccataggaaaaaaatacttatcttttcccccttttgaggtatatttttgctcttacatataccatatatttttttaaccttttctttttgtttttttattttcatatgcgtaaggataaattggacaaatcatatagattttgcataggaaggtgacatggcatatccatgtggcgattttggtgggaccaaggactatattagcctacatgacaaatttaaaggacttatttggagaatatgaaagattaagaactaaaatgacccaggagcgaaactttagggaccatattagctattatcccattaaaaaatattgaaatttgcaaaaaaacataagtcatgcttataattaatataattaataataaaacgaatcaaaacaaaacatacaatattttttaataaagcgaatagtcacacttcatgtaaaaatttgacaacattatatatatttacaaacagtgtttcttcaggtctagaagtctcaaaccggcagttggctcgacgtgtggtaccaatagtcacaaagctgcaagaactccacgtctcgcatcattctaccaaaaataaacccaaaggaggaatcaaggcctcaagggccaactgcttccctcgcaaaagaaaaaaaagggggccaactgcctcatgtgaaaacgtcaccatgtaatcgtgtaatgtgtatgcatgtttgttaattctctgctccctcccagccaatctgtacccataagccaccacgttgaccataatgatttagtaccatatacgataatacgagtagataaaccgctatatggggtcgcgcggagcaaatctgctcgtcgccgaaatcaagtatagtaagcataattaagtttcctaaccagcccaaaattttactaaatccgttctggagagaacacctaatcctcaccaaagcttaacagtattgtgccgcagatatacacagtacttaataatggctcccatgagtggcgtgctgtaccacgtttctgcatgcctcgtattggccaagtctgcgaggctttgaattggtaaggaataaaaccctccctgtttccgatccacccgtccaattaaatcatgcttagtggccgattcaacgcctgatcacggaggagaagggagggggaagcatcacgcgaaattttaagtgtgagatggcttcccctcaccaaatccccagcctccctctatagctttgctatgctgactacttcctcgccatctccataaagcttagcttgcccctctcgctcgcgtctctgtctctcacgcacgcgcaccgtgcagagcgaagaggagagggggctagctccgggtgccgtcgccatggccaaccggcgcaagttctcgcaggcggggggcggcggcggcggcggggtgttcgacccgttcggcacgaaacaggccgtgtcgtcgctgcggaagggcgggcggctgccggtgtacgtggctggcgtcttcttcgtcatcttcgtcatcatcatgtacggcgaggacatccggtcgctcacgctggacccgatcgcgcgcgcggggacaacgccggcgcggatcgtggagccggtagtgacggaggagcgccacgtcgcccgggtcaaccctcctcggcgcgaggtctcgtccgcggagaaggccgccgcgttgccgctcgacgtcgacgagaggccgaagctggcgacgccgacgccgacggaggcggcgaaggaggtcccgaaggtcgagaagatcaggaagccgaagaaacccaagacgacgaagaagaagccgaggaagccgcggccggcgaagaagacggtggcggcggcagccgggggcctgctcggcgtgccggagacgtgcgacctgtccaagggcgagtgggtgttcgacaacaccagctaccctctgtaccgggaggagcagtgcgagttcctcacgtcgcaggtgacgtgcatgaggaacggccgccgcgacgacacctaccagaagtggcggtggcagcccaaagactgctccatgcccaggtacgcaaccacgacgagccaccaatcacaatctgtaatttgcaccgggcgggaaagcatgcgccgtttcttctgaaatggaaacgctccagccagctggacacgcaagtataaacggcaagttttgaatttgtacgaattgattcaggttcgacgcgaagctgttcatggagaggctccgagggaagcggttcatgttcgtgggggactcgctgaaccggaaccagtgggagtccatggtgtgcctggtgcagtcggcgatgtcgccggggaagaaatacgtcacctgggaggaccagcgggtcgtcttccacgccgtggtgcgtactccgcccgtctccatccatccatccatcccgtctttaagattcgtaccgagctgctcgcatgatgaacgtgcatacatacccatccccatctgtctagtctagccaagccagccaacggcgggccgggtccacgcgcgcgcgcacggctgctgcgactagaccagggagcagttggtgtgtggtggtggcggcggctagctagaaccggtgaaccaacttgtgctcgatcagccgccgggtcggtttctgatagtgtgttgtcgtggcctgttgtgttctgaattgtcgggacgcgtgtgtacgtgcgtgcaggagtacaacgcgacggtggagttctactgggcgccgttcctggtggagtccaactccgacgaccccaagatccacagcatccagcaccggatcatcaaggcggacgcgatcgcggcgcacgcacagaactggcgcggcgtcgactacctcgtcttcaacacctacatctggtggatgaacaccctcaacatgaagatcatgtacgctaaatttacgttgcacgatatatcgatcgatcacaacgccgtgccgtgcaaccaacggcgatcgatcgtgggatgacagtgactgataggggtgatcttgcaggagaccgggcgggcagagctgggaggagcatgacgaggtcgtgaggatcgaggcgtatcggaaggtgctgacgacgtgggcgagctgggtgaacgacaacatcgacccggcgcgcacgtccgtcttcttcatgagcatctcccctcttcacatcaggtacgtaaaccagcctacctaccttgttacaattcgcattttttgtattctaccgtacgatcgatctcaagtatttggagtatagctggcacgtacgaacgcacgattgagcaatcaattaagctagtgtgtcagtatatctcaagtctcgacggtagtacggtagagtgggaaacgccaaaatcttggaacttttgcatgcaaaaacccaaagtaaaggtacgcacgcttgctgttggcgtcgcactgccaaagaaaaagaacgagacggcatgcaccgcatatggtgcgtgcgtgtgcgtcctgcagagaattttacacggattggtggtggagtgggcgccccgtctcggccggctacgcgcgaccgagtcggttcccgtgggcgaaacgaacagtacgaatcgaagcgggcccaggccaatagaaagagacgagtcacccggccgcctcgagccagattgtagttgtgcgcgcgcgtggaaatgtcagagaccctacatatgtgtcttgacttgtggtggtaattataaagattaaaccgtgcaaacgattcgtgttaattagtgtcaggcgactagcacaccgtgagcaccggacgcaacacatggattattcgtcattggcgttggccatgagaccgtcccttaattacttcaacgtggccgcggtcctgctataacatgctaccgcgacaactgtagcaaaccaactcccattaatttacttatagggtttgacatttcagttagtggcgtatcatctgtagactaaagtagagagagtgagtatctaacacgctcacacgggatgccttgccatgccggccagcaaatgactcctgccagtacaccatagcacggctaaccgacacacagctccgttgctgaaaagcttaaaattatctgcaaaccccaatggtgaccacacttgagcagtttgcacaaccacaccactgttgaaaactacgcttttatatgtatcacttggagcggcatcttcttagctaagctgtggcttctttccagttctcacttagcacgcactttctgcgcccaagaatgtgcgtcacataactgacccggtctgcaaatgtccaatcaaatgaggttactatcgggcgcccctattattgtttctgcttgttgtggccatctcgcatttcccaaaattttaatactcctactcccctactgcgccatgggtatatatgcatagttgtgtgtacctgttcgctcacatgggtaggagaattatttgcacatgagtccgagatggaagcttctccgcacgatctttttttcccatttggccgccgtttgcgagccgtggatgagtgaatcccacgatgacgacgacgatcccagacctgcaggacgggcaccgtagttcgtgatgacatattgaaaaatactagtatcatcgttgtgagggctcatcatcttgtgaccggaattctaggatctcggagtacagaacgcattgaaccacggagcaagtagataaattatctaatctgacacatatataggggttgaagattagtagaggggaattcaaatctggttggctgaacctagctactacacgtcgcttgtggttgacgatttgcttttcttcttgtgcaattcagcttgagagttcctcaaccccgtgttctactggtggagaattcaaacttacaagactgaacaaaaagaaatggtggtttgcaattgatatgtgtgatgaaacataaataaggcctggtagatcgatgcccatacgtgtattattgcgtactttacgatgaagggacagatgctgctttgttagtatcggatcgaacagaaggttgtgctggttactgttgcggatcgatgtcaattaggcttgataaggattggcatggcccgcggatgacgccttacgaaagctctccctctataaaaacttttaggacagtcccaacccataacactagatatggtttcaactctacatcatcaagaaactagtactagacactactcttctaatgcaaacaccactattccgtacttcaatttaatgctacttatctcacatgatgtcttggatgttgtgtaaaaatcatgtctcatacaagatatggtttccttctctttcctcatttattcacttgccacattattttttgttctacgtggcaacttatttaattatatggacaccatactagttattgggttgaaaatccctaatattaggaacagtcttatcctgaaactgataggtgcttagggtcccgtgaagcaaaccactttgatttgtctgcgaattttgaagtcaatgattcccttttgtatactacctccgtcccacaataagtacaatcatgagttttcgcgcccaactttaatcgcccgtcttatttaaaattttttataattagcatttttgttgttataagatgataaaacatgaatagtactttactcgtgacttatatctttagtttttttaaaaaaaaatttaaataaaacgaatggtcaaagttgggcgcggaaaaccatgactgcatttattttgggacggatggtgtaggaaagaggatgcgagaatatggttaactagtaaccggacaaaattgccgaggttcatgtcacatctggtaaacaaacaaatcaccggggttttatcgtcagttaattactagtagtattactgctttccttcttggattaggaagaaggccgaaaaaacatttgccgtgtccagctgtgtgatctcgaaagttgttgactattccgagtagggattgcgtctacaactgaggaacctacgcttttggcttctttgggttcggaggcatgtcacgtcaacagatacagttaaaagtttggtcaaccaaagcacaattactccgtactaccgatatcatgtactccctctgtcccataatataagtaattttgagtttttgcttacaacgtttgaccactcgtcttatttaaaattttttaaaattattatttattttatttgtgacttattttaatatctacagtactttaagtacaacttttcgttttttatatttgcaaaaaaaatttgaataagacgagttgtcaaatttatcgtgggacggagtgaggactacgatccccatgcttatgctactatgcataggtctgctaaataatttgcccatgatttcaccgttatcaaactgacaaaacttacatcctggtcgttaattcggtttctgaaaaatctgttttcgtggctctgcagcccggaggtgtgggggaacccgggcgggatccggtgcgccaaggagacgatgccgctgctcaactggcacgggccgatctggctgggcacggactgggacatgttccacgcggcggccaacgtgtcccgcacggcggcgacgcgggtgcccatcaccttcgtcgacgtgaccaccatgtcggagcggcgcaaggacgggcacacctccgtgcacaccatccggcagggcaaggtgctgacgccggagcagcaggccgaccctggcacctacgccgactgcatccactggtgcctccccggcgtccctgacatctggaacctcatcctctacaccaggataatgtccaggccgcagctggtatagcaaattccaagaatttacggagaccggattactcataggcagagctggttggttatacacaatcatcgtactgaaaagagatttttcttcttcttttcttcacattcttttctggccgtttcacctgctgtcagaagatgtctttcatttgttctttttcttcaggggttaggttaagtgggaagagatcgatacagtatatggttatatatatggctaatgggatggccatgcttgcgtacgttacgtgcctgcgtgcacagatgcgctgtaaggttcctgaccaaactgtacattggggaagaaaaggattaaagcgaaagagatgaacagatatggtttacagagaaacggacggcttcatgcgtccagctgcagatcgagtagtggtggcctcgtggggatacctactgcctacccatgagtccatgacagaaaactctgctcgatctgttcttttctccgggtattttttttccctacttacacacgggaaacagatcgaaaaggcactttcagttgatcatttcgatgtaaagcctgaaaatcatctacctgaaagttgagtgacaaaaagaagcaccacctgtcaacagttgaggagggggactacagctccactacgagccgtccatgcagctgaggcatgcaagcctgctgcttcttagtttcctgcatttttctgtatgcgtttcgttgcggtagcaaagctcgcgtatcctctttgtcgtggcaagatgctgctgctgcgacaggtaggacactggacacgccacacgtcgacgaggccgttccatgtatgcgaggagcaaagttgctgggagataaagcacggggcgtgctttgtcttctctgtagaaataaagggactgtctatatccgttggcagaaaattttacctcttatcttttaaattttaggccacttttatcttttaaattttgtaccatcggatatgctttaagatttgtgcagagacattaaccctagctctcctcccgttcccctcgcatcgctcatttcgccgccaccatcacgcatttctccgctatgcctgatcccctgccgccaccgccccatcgtgccgccgactgcctccccaagccgtcaacgacgagatgccccgccaccaacatcagcccaccgccctcttccaacaccacagctccagcgtcgctgccagcgcctcaccgcccgcccgatccaccgcccaccgtcgggctgtcgtctcccccggccatctctatagagccggcgaactcctccccttcctcctccccctcccaccccaccccgggacactaacctgtagggtcctctaccggagtctaaagtgtcgccagcgtcagagaagaagaggaggtcgccggagttggaggagaaggccaggagcatgaatattgaagctaatccagtgtcccaaaatctgcaagatttggatatgtaatttctgtcgaaagaaggttagcaattccgagaaataaaagttgttacgtgtaacgaacctcgccgtaccacctagtgtggagttaaaatgaaatgaaggaagatattatatgtttaatttactttattttaaattgattttatagtttgtattaagaggatgcgcacataataaaaaaaagataagttatagctaaaatattttaatgcccgggtttctgggcatctagatctcgtatactcccgcccccgcatgccactctgctagtacgtgcacgaggaagaaaccgatcgagctgatgaggtcgcgtcgtactaccagctcagcagatcagcctcatttattgtgtaagatcaggcgcgatatggtgctcggcgatcagcaaggttggagtagctatggcctatgagcacaggtcactcgacgatgcgtgaatgcgtgatgcgtcctgtgcaccaaactgaacagatatatagtcagattaacgaatttaacgatttggccggcccttttccatttccagtcctatgttcatatagctgtggagtccttgtgcaacgaatgatatcagatgcgacaagtgtaggagcgtgtgtctatgcagtcgaatgtccagaaaattgtccattttgccaacatgcaggtttcagaattgggaccattaaatggaccattagttctactaggcccggcccatgcaggtttaagaattgcaacagtggggaagccacagcttcagtcatcagtcttataaaaagaacaagggattactgaagactcaaggccccagagttacataccattcaggcattcaccgactggcacatttaactgctagtgagagagtgtaaggcataatcatgttcctaaaatacacaacaaactatactactctactagtagtatatttctgtgaggaaaatacactaccattacttaaacttgatcgattttcgtttcccaacgattttaagtactacatttgctttgcatggacctaaggaaagccataggaagcatgggccggcctgatccatactaattcttctaggcccggcccactatttcttccccggggcccgagctcgtttataacctagagaacgccccctgaagctgctcgccgccgccggccgccttataaatctatcctcctcaaagatccctatctcttcaggttcaggctccaagcaagcaagtactccttcatcttactcctagatttcatccatcctttgcgttgatccttctccaagatagattcaatagtagagttcccgtctcagtctagccgtattgttttgttttcgctgtaaattttcgttcgatttgtcgtgtactgcttgtggcggcaactttatcaagaagggccatgaattaacttttggttaatcatggactaattaggctaaaaaaattcgtctcacgattttcatgcaaactgttaattatttttttatctatatttaatgttcattcgtctcacgatttccatacaaattgttaattactttttttctatattatgttctatgtatatgtctaaagattcgatgtgacgtttttttagaactcgcgaaaagaaaatttttgggtcacatcggatgtttgaccggatgttggaagggtttttcggacacgaatgaaaaaaataatttcataactcgcttggaaaccacgagacgaatcttctgagcctaattaatctgacattagcacttgtgggttacggtagcatttatggctaatcatggactaactaggctcaaaagattcatctcgcgattttcccctaactgtgcaattagttttttcatttatctatatttaatattttatgcatgtgttcagagatttgatatgatgtttttgggaaaaattttggggactaaacgaagccagttggaattttggggactaaacgaagccagttggggtagttggggtgcagacaggtgtttcgtgtgtccacgtctcgaaacaatcatgcagaaacatcgttcgctgggttgcagcacaagctcgcacagcaatcgtatccttatgtattgcgtccgttcgaccgttccgtttcgcgaagaaagtacctattaacatcatgagaaactgaacgctaaagcgccctttgagggcaagttcaacgctctattgcaatgacatcagtgcatcactttcctcttggtgacagtgaattcaaaacagaaactgcaagtggcatccgttgctgtgagctaagttaacgaaaccatgtaggagtagtaataaactaactgatgcacatattaactatactattaatgaacttactaactgatgtacagattaactaagaaattaatcagtttcccaccgcctgaacctccggaccagcagcccaggcaccggcgggtgcaatgcaatggaatgtgcacgtacgggcgcacggcgcagtttacatgcgacgaccgagcgagccctgtgcgtgcatatgatcagacagcatcgctcccggcgacgtccggtttggtggtggccgcggccgggagaagcgagctcctgcacagagggcagctcggccgcgagcggagccacgcgtccacgcactccgggtggaacccgtgcccgcacagcggcagcgccttcaccttctcgccctcttcgaactccccgaggcatatcgagcactgcgcggcgccgccgtcgtcgccatcacctgcagccgacgccacggcccggtacagcgccacgggcatgctcgctatcgtcgcgtcgtcgaggccggtcaccgatgaggctgaacctggcgcggtcgccgcagcgtgcgacgaggagaagccggagctggtggtggcgggcatcggcgtcgtgtcgcggccgtagcggtggcagtggcacgcccagcggaggtagagggagacggcgacgaagcagacgaggacgaagaggagcgccacgaggagcggcaccgcgcggccgcgcaccgcgaagttgccgtcgtcgacgtcgccgtagcgccaccggagccccaacgcctgggacgacgcgtcctgcgctgccgccatgctgtgcaacgtactcctacgcggctgagccaaagtccaaacgcagcagccgcacgcacacgtcacgtattcacgtagtgtcggtttgtgtcgttcgtcgcgcctcggcggaacaaaatttaaggcgcgcgcgcgtgcggttcgctgcacgctgcgacgctgcgttacgtggctaacgcgggctcggcgatccctgtccccagccggtgctcaaaatgcgcggtgtgccggtgagtgtgtgatatggtggttcctagcttgtttcccttttacgtttgacgaaggctagtcgttcatgggccaagaaatgaggcagcgactgttggctcgacgctgttcatgtagagtgggacacgacagttaccacagagattcccaggaatgtttcacgtaccgattggttgttctcaatatgcagatttgtggaaaaacagaggcctcctgcggttactttgaatttctggaagcatcttaatcggtgttattattcttcgctgagttttgtgtggctgtcgttggttcgtgctgacatgcatggtactgcttgctgagctactgtcacatgtcgggattatgctagcagctgaaagaaccatctaggcagagtagtagtcctatttgattggtttgtgcgggtcagtttcatcgttatgacgggtttgtctagatacacaaatgaccaattcagattgtagccaaaataaatcttatcaagttttaataatgctaaaattttagcaagatgacaatattactaaaattttggtagtatttcttatgtgttaaccaaatttagcaaactaaacgtagatatttttttaacaatataaaaaaaaaggtatggttgaaaatggcatcaaagtgaagaggtccaaaatttggtgatatattcacttctccagttgtccgtgtagaccatattggactcttgaaagtttgcacaggagccacgtcttcacagactccactagctagttctgtgaacatacgtgcaccactgcatgaagtgaactcgttcccattttctcccacagtcacaggagcaccacgatcggcatggcactgacctaataacaacaccctaacccccatgggccaggcccaatctgaggcgatgggcattgcaaatagagccgaaatagatgtaagtggatatacccgtaaaccaatttatagatcaaattagtaggtaaccgtgagttaatttataggttatccaataattttatttataaatagattcacgggttgacctatttacatcctaagctgcatcgatccctccaatgccccaccatcacgcttctaccagttgggtaaaaaaaaaacacaacaggctgaacagcttacgtgttgggcctagtttagggtcaatatacagaatccattatatgccattgagtttgtctcatttctatgattagctattgactttgtcacgttctacaatataccatcgacttttgcttaacttctacgatttaccatcaccatccggtcagtctccgttagtaatatactacattttttttcaaataaccaaaataactttaggacacaaatatccaaaattagaataaaaactctaaaatcgttatttttgcatacctttttagaggcatacgggtgatcgacccaattgcatggaaaaaatgaccacatgcaaaaatccttttttatagtgccacctaggctcgcacaataaaatttaaatagtttttatgacttgtgaacaaaatttttatagcaaacgtttcacaaaataagatttgtttgggcttttttttaagataaagaaaactttcagactccaaggggttcgtttggaacaaataaattaatttagatgaaattttaaagataggatttctatagaaataattcctatgtggtcatttgaaatgaaactaggaatggctctcctaaacccctttaaaattctttaggattacctcaaaccatagaaattttggtggatttttgacataaattcgaaccttctggaaaaaaaattcctttgtgtctatctcttttctgattcctatatttatcctgtgtttcatccaaaaggtctttttcgcaggtttttttgtgtgtttttctattataggatttaagatgggctcaaaggcacttcaatcctactagtgttttttttctaccaccccgtgttttaaaaatcctgcgttttaaagtagttctaagggcccctttgatttgtaagaaaagtataagaaatttggaagattttaatcctatgggaaaaaaattcctatggaaaccatatcgtatcatatcatatactttgaaattcctatggaataaataatcctatagagattttggaggaaagttagtaagaggttcaatttcttggaaaaattcttttgagcctatctctctaatctgattcttacgtttttccagcggtccaatcaaatggtcattcctgtgttttttttatgtatttttcaattttctgttttacgcttgtattcctatcataatgctgtgtttttcctatttttttttattttttcattgctgggatttaaaggtgcctaaaatatttcaaatccttgcatgagtgtgatgtgacatgccgagggatgtgtgtgcgtgtgcaggtataatataaaagaaaatgtcaacattgtagccggacccgcggagacagcgtcgagccactcgagcggcatggaagggcaaaccgtacgctggagcaaggaggctatctagacaagtctggcagctatagcaagctagccggtcctgatgaatcgaggaataccagcctactgcctttgcctagaaataattttaactccctaaaacatcaaatcggccgctgcgtgacatagcatcagtcctgccaaaatctttgcctctgatcacacgggtggacgtcgccatcctcgttaatgaagccctttattcccgcacagcccaatccctgcagcctgcaggcatgatgcaaggcgtaccagcggacagcagatacacagggggatgcaaaggccggattcagctagcgctcgtattttaactcgggccgagtttagaacctgtttgattggtgaaataaaaatttttagtagtcacatcgaatgtttgaccggatgttggaaggggttttcagaaatgattgaaaaaactaatttcataactcgcctggaaaccgtgagacgaatcttttgagcctaattaaaccatcattagcacatgtgggttactgtagcacttatgactaatcatggtctaattaggctcaaaagattcgtctcgcgatttacatgcaaactgtgtaattagtttttcattttatctatatttaatgctacgtatatatgtctaaagattcgatgtgatttttttttggaaaaagtttttagggaactaaataagaccttagttccaaattttttcttcaaacttccaacttttccatcacatcaaaactttcctacacacataaacttccaacttttccgtcacatcgttccaattttaaccaaatttctaattttgacgtgaactaagcacacccaaaatttcggtatgcttgggtgtgcttagttcacgccaaaattggaagtttggttgaaattgcaacaatgtgacggaaaagttgaaagtttatgtgtgtaggaaagtttttatgtgatcgaaaagttgaaagtttgaaaaaaattaattattgtagctacagagttatatacaatcgtagtttggtactcgtagtacgatattggaaggttttctcgataggtcgatcagcaagaaattatacctttacagtcagtactatctgcgtctggttcgtggtcgtccgcaatgacaccgtcgtcggcttgccgcgctaggacgagcgcaggtgtgttgggagtctaatttacaaaattccaatgatttagaatgatcacttctatttaatgtcaaatttattaatctactgtcatgaggatgaagtcattgtaatcggtcattttaatttacttgctgccgttcttccttttctcttcttcctaatctttcggttgccttcttctcttggttcttgctgacgtaggagaagtagagtgcgtcaacatctcttttgataattttttgatcacctcacgattagcgtcggtcgattggacgacttagcttttagggttttaacattgagagagtttgagagtccccgcgaattaaatttcaaaatataccgtttatttaatttttttaaggaatatttgggatgaaaattttttttttgcgaaaatataccgtcgatctcgcacaatcattgcgcgaaaataacggatgcgtgacgtcgcaggcggtatcgcgtgggctatgtgcgagaccgcgcggtcttacgaaatgaaagagcgaggtcttgctgaaacagtctgcgacagtattaaccggctccatttaattagtgatcaagtacataattaactattagctaataataattagtgattaattatcgtgcacggtgcggtctcgtactttcaatgcgcaataccgtctgcaatgtcacatccacgtcattttcgcgcaacggttgtgcgagatcgtgcgagatcgacgttatattatcgcaaaaaagtttacattcgaaatattttgaaaaaaaaaatagatgaacaatatatttttcaaatttaattcgcttccctgctacctctcctccgctttatttattttgtagggatactggtagaactcaggtgattaatcttctgttacctaggttcgattctgttttacactaatcatacaaaataaaactttatcttatatttttttcttaatatataggaaaggcaacgatggttctatcttttttttaattatttttatcggcagtagtgaacccataaatcaaggcaccggcgtgacaagcacacgatcaagcagcaacgtcgtcgtctcgcggccgcccgaccggccggcgccgtggcctggtgcgcgcgacgcgattgcattgcatgtgcacaaccgtacatgtgcggcaccggcccgtgcagcacgaatgcaggatgcaccactgcacacggctaagctaagctgcgggggcaggtagggggccagattttccatgtcgctactccgtgccagtgccactgcagcgtcgtcagcgactctcaggcgcgcgcggccacatcatatcatatcatatcatatcacgtctcgtctcgctctcggtgcaggcggtcctaggcgcgcgcgcgcgcgctcgtacgtacacaggccggaatgtcacatggcaatctcttcacggcgacgcgacgcggtcggtccgtacgacgacgttgcgcgcgtccgggttctcgctggcgagctgggcctgacagaactgactgttcaatgtgttcatagactattctttgtcacggaagagagccgtgcctccgagacgaccatagcaagttcggtgtggagtaggagtactagaactaaaagatcatcaggtgttccaaattggaaattgagattttcccaaaacgaaattaagatgaggtccggagtataataacgcatggcaaagcccctatagctagactcactaaacatgctcattgccgtcagctttgtgacatcttaaacacacaatcacccacccggccaggagtttttcccatttaatggagaagcttgaagcaatgaaattgttggcgtcaaaagtctaaaatacatgcagtcgtcaaagaacctggattaatttgcaatgagcagatttttttttaaaaaatactaaccggttttcaggcaaatcgactaagaaactactactactctagacatgaaggaaaaaaataaaaaagataggtatttctagtcgcccctaacccgaaatatacataggggcacctaggatcagtggcctggtattaaatatattttagaatagattttgagtgcctccaaatttgttaaagttcagttattttattcatccgttggatgataatacaatggttgccaacacctcctaattacacttatttaaacaaagtcacttctttagatacatggttgaaaaatatgttactctaaccagaaaaaaaatataaaattacatgaaataaacttatagctaataaaaagttataaaatttacgtgcattttttttaacttagattaaatataaagtaaaaaaaatcatatataacgacaaatttgtagttagatatatgcattgtggaattatagatgactgaaaatgtataactccttaaccgtatgaaatctatcaaatccctaattaaaatagaattgcacatcatgttccaatccaattaacgtaaattgatggagagaaaaatatcacgtactctccatttatcatatataagcatttctactctatccgttctaaaatataaacaacactatcaccttctggcagttctagctacttcctaccttaccagtgtattttgaggtaaattacaaacacccccttaattagccgcctccgttgcctacttgcctccgccctgcagtgatctgtcatgcatggcttgtctctgcctcccatcctctatctcctcctctttgcctagcctccatttgtttaagctgatcgaggcgaccgcgcgatgtaacacggcaaggcatgcacgtacacgcgcggacgagaagctctgactcgttgcaggctagaatgctacagtacagtagatagctggtacgtgttaagaccgagtttagttccaaactttttcttcaaacttttaatttttttatcacatctaaactttcttacacacataaactttcaacttttctatcatatctttccaatttcaaccaaacttctaattttaacgtgaactaaacacacacttaatcttccagaggcccggaaggtaggagtagctatatagcctattgttgcaagcagagccaatatatatagaaggaaatatatacctggtacgtacgtactcgtcgatatggaagctaagctaagctacaccgcgaagcggctgggcactgttcatgcatggccatcgaccgaatagaatagaaagtacacgtacttgtagccactgtgtcacagcgacttccatttccaagaactgtactcgcgcacgctcggttggaagcttgtaggcgtacggtatcgggcgccttcgattcaacgatttcctcaaagtgctataacatccttccaatgatgatgatcagagatttggatgactcgagtcttgtgcaaccatgcatgcgcatatatgcatgtgtcgttaagttataagctcgacagtgaaatcccatcttgtttggaagccgaaggttttccaaaattcgttgaactttcttaggataattatggaagtgataattcagtgtgttcaactctttcgcgtttattatattaaaaaatagttttttttaaaaaaaatatgtgtttcaaatcccgctaactctatttgaattaatttctctcaacgtatatatgtgtggttacctattatcctagtgatcacagagccagaaattctaaaatttataagtagggaggtgtttgctgcggtcatatataacttgtctcatactcctatttgcttaaactataataagctagcatttgcttaagcaaaaataatttgagtacgatggtaattcccgatagaaatgaatggagggatcgtccaaagtaatgcttccaagagtagaccacgctaataagtcccataagcgctcatggagcttatatgacccaatgactgaaatatttttttcaatgacagcatcggctacgtacagggcttcaaatatccaccaaacacaagtctgtacaaggtaaaacaactggagtagacagaagactagaggtgaagctagctagaaacgaataaagagccattattctatgctgtctctttgccaccatctccggggatgtgttacctcccgggtggtcatgtgtacaaaggggtgaatgtgacacaggtaccaatcatgtgatcatgtatttcacaaaggcactcaataaaaagggattgtacggcttccgaagaccctagctggctaggcttcttttcaccaaaaatatagcgggctttcgatcactggtactgtatgagtgctagtaaaaattaaagtcgagatctctagagactagagctatcccatccatgtacgtacctcttcatgaattaaagcatgtattgtgaactaacaatgtcaacattattcatgaccgaatctgtttatttcatctctcgctgtatagtacaaattaggactttaattttgcaaagttgtagatatatgtattaattaattgtttaaatgttgtgatatttttcttaaaaaatataaccattcagttgatatttaagaacaaaaaacatgaatctaaacgagtgcacgtgcacttgagtaggtacggagcacaatttttctgcccactgcactgatcatcagaaataactaggccaattacgaaaacattgcctacgtttttttattaatagaagaagccttgcgttgatcctttttcaaacgtaattaaactcatcaatttaaattaattaaactcatcaatttaaaatcaattcaaaccctggtcttaggtgggttgactgtaaccctattttcttcttaattgattggcagagttcctatcccttttctataagaattcaaagcatcaaactatgagactagagggggaaaatacaataacagtgcatgatgtatttcttaagaggggaccgtctattgtccaatataaaaattcaatcaaattaaaagagtagccagcttacatcggactcatgtaagatcgtaatctaatatatatttcctggtcctattacataacccatgatatcttcattgtacatttttgtcacgctctcgtcaccaatgaagtcgctaaaggccccttctctcttccccacctcttcagcaatactcccatgtgccccccttttcttctttgtcggtgattcgtcttgtcgcacttttcctgtctgtagtggcttatgcgacacactccctctactacatacctaaacatacttggtctttctcaccttctagtggaatctaccactgcctcatccagttcaattcattgcttggaataatataacgacgccctttaatttctctgctcacctttaggttttagccatctagatcatccctacaagctctagacacacacttcatgctgtgtctcttcgattggcgtttttaatttgttggtgtcaagtcttagagtatgaatctcaacaccaattctcttatttttcctctttattaaccgatttggttcagtgatatcactgaaccaccaaatcacttacaagattgaccaaatcacttacaagattggccatgacgatggttaatccaaataacatattggcccgggttccaacttctaccctcttagggtaagttatgagcacgagaattacagaatctaggaacaaagtaaatatcaaaccgtacttgacaaagctttatcgatcaaatataagaagctttatctgataaaacttcttgtccagttataatttgtactatacatggttaaaaaagatcacgcggagtaacagaaccatgcatctatgtgcttatactctcccatgcgattgtacgcgcgcagtatatatatgcataccgcgcgtctcctcccagcaagcggaaatagctccaggggctgaaacaaacccagcacatttgtgtttgtacgcgcagctagctagccacgagcgcggatccatctcctagctagcgcaccatctatggatccataccacgactaaaacatgcatgacccacgcggcttccccatccacccgcagccgtaccacctccaccccacggccggcggcctcggcgagggcaggatgcggggcggcgggcggcggcgccccggcgccaagctctccaccgacccgcagagcgtggcggcgcgggagcggcggcaccggatcagcgaccgcttccgcgtgctccgcagcctcgtgccgggcggcagcaagatggacacggtgtccatgctggagcaggccatccactacgtcaagttcctcaaggcgcaggtcaccctgcaccaggccgcgctcgtgcagcacgaggagggctgccagcacgccgacgtcgccgcggcgttctccgccgccgacgccgatctggcccttgagctgaaccatcgccacggcggcgccggcgatgatgacgccgggatgacgacgctggagatggcgccgatgcaagaggcggtgggctacggcgacggcccggctcatcagatgatgcagcaagcgctcgatccagcggggcagctgatgatgggcggcgctcatcagctgcctcctttgccttgctgtgtcttcgtccaggagactgacccctcgtgctactcggtgtgcaatgtccacggtgaggagtctggtgcgcaaggatcttattagctagctagtgagacagtggcttgcttaggtagttaatttccttaagtatgctcgaatattggctctacccactagctgtctagctctacttagcttacctaggtcgtcaaccaatatattaccggttggtcatggtcccttaaattagctagactcttgatttctgtaagaatgcatatatgcatgcatggggttctgttggagcaatgcataacagagctttgttttacatgcatgcgtgcatgcttcctagatatcattctgaaatctgaacttgtttgctcgatcgcttaattgctatctcaccatttcggttagtctgatgtttatcgttcagctccattctgtgttaatttcttttcctttccatttgcggcatgtatgatagtacgtatattcttctcactacgtcctaaaatataagggattttaggtggatgagacgtatcctaatacgaatctggacatgctccctatctagattcatagaattaggatacattatatctaaccaaaatcccttatatttaggaacaaagggagtacattactactcgctcccccggtcacaaaaagatggtttgaacttttaaaatcaacaaggatggtagctcacgtattcacgcgggcaagtatatcataagcccgtatttgaaaaacttataaggatcagaagtacattttcttcataaatttatttgctggctttgctcaaatatttttcattaggtatttgttatcttcatactacgtaatatttaattcatctctataagtaattattattttcttcttcatcatttaaaaatgaggtagacttagtttgtttagaaaacatgtctaatagttcaaattaaaaataaggtgcttttttctttttagattgaatgttttgggatttttttaacaaatcttaaaaaatattatttttaataatggaccatcaagctagccctccttttaattggttcatattaatgtaatttgttatacatatatttacatatggatcagtaaagatagattagatatatgtatcctgatcttgcttacaggagacgtgcacaggtacgcccgacattaggaagagatgagttttatttcctttgagatagattcattggtttcaccaacttgagttatctatatttacaaacataataatgacccaaagttctatacttattaaatatatattttctaattaaaattgtttattattgcatattgttctatttaaaatatatgtgttgctaaatagattgttaaaatatctatacgattttccctataaatgtgttttatttcttttacttactaaatatagttagtttgggtcttcaactataatttttttggtaaatattctaatgttctaatgatgtattatgtattttctacataatatagcatgaagaggaggagagaaaggatatatggcgtacgtacgtgcacacagtacgtgcaccagtgcacgtacacgatacggatttaaagtgggtccaccgtatttaaaataaaatctatggtttaccttttaagaattattagatattccttaaatttattaaaacaccatgtggcgacttaggagcgtttgtaggatttacacgtggcggcttgagagcgtttgtaggaaatttaatagacttttaatatataataatagataagatataacttcgacatatagtgttatactattatgaaagcttagataatactagctaacttagctactcccgtcacaaataactgacgttttggatgtgacaaataaaattgtcgacaatgcattagttttggtacttcctccgttttatattataagacatatgtgtttacattcattaacatctatataaatatgggcaatgctagaaagttttataatatgaaacggaaggagtactaattactactatctctattctagaataatttcatttttaacttgcttttttctcgtttgtcccaaaataagttcattctttaaataataattgcataagtgtttgtaaaagtatgaaaataaatatattaggaacaaattaacaaatgaataatttcattggtatttgataaagtaaaagtactctgatcttttatattgatatgtgtgagataagtgaaaaataaacttattttgagataaagagtgtactatttaacttataacaggaaactattttgatccctcgaggggactcccctcgttatttgcatatcactcaaatgattatgacaaaaattgaaaaaagaattgagaagttgtattaacatgcgatatatcacttcacaaatatacaagttcaaaaatcaacttctacatcttgcaacggaaaaaaaattaaactacaacaagttaatatgtattcacagttaaatttgtttttttcgttgcgaaatgtagaagttaaatttgaacttgcatgtttgtggagtgttatatcacatgttagtacatcttctcaatttttttataactattagagtgacacgcaaacaacgaggggatgtcacctcgagggatcaaaatccactcccaacttataacaaagtgttacacattaacttagggtataattaaccgaatgcagtagtataagttacaacaaaattctactacctccgtcccaaaataagtgcagccataaatatctgtgtttagcgctttgaccatccgtcttatttgaaaaatttatgaaaaatattaaaaaaattagtcacacataaggtactattcatgttttatcatctaataataataaaaatactaatcataatctttttttaaataaaacaaacggtcaaacgttgaacataaatagtactaaaactgcacttattttgggacggaaggagtacgttccaaatggaccactagcgggcaccctcaacgccttcctcttatcactatctctaaaaggattttcattataaaatggcaatacaaagcgaccacatgctagctaggtgacattgacacattgttggacttggacgtaagtgcccttaaactcatcagttgcaaagatacacagtttatactgactaaggtatatttcttccggattttctatttcagatatataaaaaatcttatatttttaaaaatatatcacttccattaaattgttattaaaatactgtaaaattcatagttgctatttcctaagaccatatgcagtggcgagttgactcgtgtaggccacgtaaaatggttcgagtcgacgactccctcatctccacaaatgctaacccgtcatcatgttgggctatcctaattaataaaaaaaaatcccaaacatgaaagcaacgtgaccataatatttaggggcatttgcaagccaaccactgtttttgatattttgtaaaaatgccacacgagtggtagtttatggcagtttttacaagtattcaaatgacagttttacaacaataatttaaacagcggtaaatttataattgctcctaatatgtacttctgcatgcatcaactcatattatgcttcggtttttttgcattatgcaagattcttgtgttctccggtgaggaagactcgattcataagttgccagctcgttgtatatttatatgaggcctcacagcacgagctcagttttgttatggctccgcttggtccatgcagtcaaatcgatagagctagacgtttagttttatctatttaataataagagatgatcatagtcgatttagataaaagaaaatttaaaggctattgataacaatccggctcaggtggggttggctgaggcccaataacttaagattgctcggacctcaacagttcataggcacacacactcggggaaaggcccaatctccctaaaagacactggtggagaaggagtttttactcccggttcgtaaccccctgtaaccgggactatgaatccgggactaaagatcgctatctttagtcccgaatgaaaaaaccgagagtaaaaatccatttttagtcctggttggtgtttctttagtcccggttggtaacagatcggttgctactttattctattcttttcttcattgtttttaatatattgattcactctatctcatcccaaaatcccaaatcaatcatccccgaatagtctccaaattctcaaatcaatatctctaaatacatcacaaaatcttaaaaaaattacatcacaacttctacaaaattcatcacaaatacatcacatattcatatcacacacaaatcgtctcagacccgaattgtaacgctccgcttttcgtgaggcgttaaaaactaattcggcaaaatcctaattgcgaaaattttcgttctttgtgtgagagtctaagtcgtgccaagatctcatctcaaatcacattgttccctctcatcgaaatcaaaatcctccacctcaaattcctcttccgattcaagtctccaaatcaaattccgaaattcagtcgcatcctttgaatcctcgctaaacactcgctcccaattccgaaaaataccaaaccctatcttgagctttccttgattcctccctgaaccctcgagttcgaatatcgaatttgaatccaaatccaaactccaattctctccaaatcagccttctctgtgaaagtctattttacctccctctggctcagtgggccgactcttcttccccagcccatctcctctcagcccgcttcacctcctccccgcacgtgcgctgcatgcgccgagagagagagagaggcatcgcctctcttcttcctctctctttcctcgctctctctctctgcttcctttctccctctcctcagcgccgatttcccgccgccgccgttcgaaatccggctgcacccccgcgtcgcgcgcgctcgctcgagaggtggccgaccggccgaacgccgccgccatcagcccttgcgccgccgacgccacgagctgccgccttgcccccgctccatgacaaaccgaccgccgccgtcatcgccgacgtcatccatggcccctgccactccacgccgcatcgtccaagaatgggagaagcagctgcttcccctctcctcaatatggcaaaggaccaacccccctttttccccccttctttttttccctttccccgaccaccgccggcgtcaccacctctgcgccgcttgaccgctcgcgccacccgcctcatctccttgaccgccccaaggtcggttctctcaaactgacatcgccacctataaaacccacaccccctcccatacctctcgcttcctctcctccatcacaccactgccgcctcgccgttcgtcgtcgttctcgccctcctctgccgtcgtgcgtgtcggggaacttgcgagcacgaggagtcgacgaggagctccgcgccgcccccatcctcgcgcctctccatctgttcttccccggccgcgccctctcggtgccgcgccgccccgccgtcgcgtccgcctcgccgcgactccatccgcgccgccgactccatttctctcgtcggtgagctccccaccgaaccccttttcccctgtcgcacgccgcgccgcgcccgccgccgtgtgtcacatctcgccgcgcgcccttgctctgtcccgggcgtcgctcgccgtcgccggcctctatcggcgtcgcccgtgccctctcaaccggtggaatgagctcgcgacctcgcgtagatgctccagctccaacgaatcgaacccccgttgccccagtgaagttttccctctttgctcgccgccgacgatcgctgtcgaaatccgccgtcgtcggctcctctcgcgtcgattcctctcgccgccacgctcccggggatccccttgacctccccctggctgccccaaggccgccggccttctcctttgtctccgcgccgtgtcgccgcttccgccgccgcctaacgccgccgtgcgtgcgccgccggtgaccatcgggtcccgcgtccccgcgtgcgcatcgcggtcgcgtactggttcggcttagcccgagcccgcgcgcccttcgctcttctcgcgcgtggccacgtcggcgtgccggcgagattggtcgccgccgccagccgccgtcgtttttcccccggctaatccgctccattgaatcgattccccttggcctcctctctcttccggtgctacccccccaatccacctcgccgctgttcgccggttcacgtcgctcgtcgccggccatcggattagcctgcccggcctcctctcccttccccatccgacgtggcatccatgtggatgccacctcagccgcctggccccgcggagaccggtcaaaggtctcccggtccaccgatccaacgcgccgccttgcgtgcaccccgctcgcgtgagccgtgtcgccgccttgtgggtcccaccttgcgcccggcacggtggaccgcgtccaccggcttgcgtcgcgtgggccgcgcctcgttcggccttgggccgcctccctcccgcgcgccggcccgctcgcctcggccgcgcccgcgcatctcttcgggccgcgtcccttcgctcggcccaagtccaattaacatccctccatccttttctttttcagggatttaataaatcatttttcctttgtcccataaatcaattccttattccaaaatcccataaaccatttcctttggtcccgcgtgacaatgactgtcaataatattcttgagaatattataaatttcataaaccatttctcctattccagaaactccaattaaacttctaaaaattcatatcacccaattcgcaactccgattgactccgttccacttccagtattttcataaaattgagatctatttaatggcactactaattagtctaaataggatctttcttttggtctcttgtttaggttttcgattgttgcgtatagttgcggttatcggtttttcgtcgatcgcgggttttcccgaagattcgtgaagcttcgtgaagaccttgagcaaggcaagtcaccctttgatcaattgcccctataattgaaaagtcattattattttatttgcaacttgcattattagaatcacacacttaacttgcttggcctcggtttgcgtgccaaaccgacggacctacccagtagtcgcactaatttccgtaggtcgtactaccctgattccttgtcgctccacccttgtggtacctcggtattcgtgctctctgagcgcgtataccaaatatcccacatacaccgttgtttgtcgaaaacatgggaaataggtttgtgaagccttcaaaacccgacatgtggtgtcggtgtgtttgaaaacaaaatgaattttgaaaactcgcgatgcgggggttgtgcctatgtggcactgtcccgtattcgcatataaggaccgattcctgtgggaaactcatcgaacataatcaaagtgcaaccacaaggtgaaatgggacaccctggctaagtaactagtcggttcaggaaaacctcgcatgccaatagttgggaacgccggggcggggtcggttggagccaaaccgggttcctggtaatgcaagaacgagaagcttgctgaattaccgatcgaggtggttggagtttgaattgtgaacgcctaaaatggcctatgtttatgtgaggatttgatccttctatgtggcatgaggtatccctgggtcggcttgggaaaggctttgtcgcgaacctctgacaccggccagtgtctggagtaagttcgtgtcgtgtgggtaaagtgtaccccctctgcagaggttaactaactgttcgaacagccgtgcccacggtcatgggtggatgtgaggtggttcccgttgcgtagatttgtttgcctgtgctttgtgaaaagttgttgtggtgtgggaatcgtaaccagaatcagcctatgtggcagatggacgatctgagtggtcagaaacgaatctgtgtgattcgggatgtctgcgggcatcatagattaggcttcccgagtggaagcagattgttgtgctgctgggcagctggactctgggagtcaccgtgggtaccagcactatgtcctgggactggtaccgagatcgcggtttcgtaggaagcggttcacgttgttttccctacgacacgctcctgtcaggtgccgttgtacggcggtatcagattagggtgtgacacgaatcacagattctcaacaaaaaaaaaagaaagaagacgaacggcccgttgcctcgccagccaccgccgcaccgcccgccgcgtcgccgtgaagcatctaggctcccggtgttaattttggtaattaatgacaagcgctaattgtggactaaccgttgtctttgagctatacattttaagttaggtccacatcatatgtgcgcatggatgattatcgatggattaaaattgacggcgcaaagcaaagggaaagaagacggtaaaactagcgctttaatttagaattgatcgtggtgtagggcgatcaaatttgctagtttatttttagtttcgccgtactattaagaggggtaatgacctagcaaagagatgattacaattgccacattaggtcattgcattttcatttgtgctctctttttcatcacacacacattcacttgcaaattcactgggttcggcctgaccaggggcggtcagaccggccacatagtggcggtctgaccgacgtgccctggccggtctgaccggcggcatttgcgcggtcagaccggccccctggaggccgggatggtgctgctcgggatggccgatacagagccgacggagccgtattcggtcagaccgagccgatgacggtctgaccaagccgaggccggtctgaccggccaccccatgccggtctgaccagccaggccgttggggccctctgacagggctacaacagctagttttctagccgttgcagagtagcacggtctgaccggccacatacctccgatcagaccggcagagcacagagttaggggatttcgcccccaacgactagttttggtgggtgggagtataaatactcccccaccagcagcaagggggctctctaggcacccaattcaattgcatacactccttgcacctttctcacactcacttgagctttgtgttcatccatctagtgtgttagagggttgtttagccaagagtcaagtgcatttgcttccattgtagagctagtgtggcacttgatcatctccacaccgggtcattgcttgttactcctggaggttgccgtctcctagacggcttgtggaggagttgcccggtgacctctccgagaagattgtggaggaggcccggcgccggtttgtgagtggtttggagttcaccaccttcggagtgaagtaagaactaccccgagtgatcgaggcttgggtagtcctctccgtgggccggctcccgccttgcccaccccttgacgaagggggcgtgcggtggcttcgtggttgagcggtggagttgggctcgcctcaacggggagtaggaaaccggcgagtttccgaacctcggtgaaaaatctcttgtctcattgtctcatttgattgtcgcatttacatttgtgcaatttactttcctagagatataattgagccactatcaccctaggtttgcaaaacataaattagttgcttagttagagttcaccctcaccaagcctagcaacttaggttagatttgattaggtgttatttattctttaaatcgcctattcagcccccctctagtcgacatctcgatcctgcaagtggtatcagagcttggtctctcttgattgggcttcaccgcctagagagaagatgtcgaacgaggtgaaccatgtagggaaggcttccatgtttaatggcacaaactactccacttggaaaattaaaatgtctactcacctcaaagctatgagcttccatatttggagtattgtggatgtaggctttgatatcaccggcacacccttgacggagagtgatcaccgtaacctccaactcaatgcccaagccatgaatgccttgttcaactctttgagccaagaggagttcgatagagtgagcaaccttgagaccgcatatgagatttggaacaagttggcggagatccatgagggtacaagtgagtacaaggatgccaagcttcatttcctcaagatccaatatgagacattctccatgttgcctcatgagagtgtgaatgacatgtatgggaggctcaatgtcattgtgaatgatctcaaggggcttggggcaaactacaccgatcttgaggttgcccaaaagatgcttagagccctaccggagaagtatgagacccttgtcaccatgctcatcaactccgacatgtcaagaatgacacccgcaagcctcttggggaagatcaacaccaatgacatgtacaagttgaagaaggagatggaggaagcctcaccctccaagaagtgcgttgctctccaagccaaagttgaagacaagagcaagagcaaggtgaatgaagtcaatgaggacttgtaggaagagatgatccttcttgctagaaagttcaatgatctcttgggaaggagaaaggagagaggaaggggctccaactcaaataggagaagaaatagaagacccaacaagactctctccaacttgaggtgttttgagtgtggtgagaagggacactttgcttccaagtgcccttccaaggatgatgatggagacaagtcatccaagaagaagactggaggctacaagctcatgaagaagcttaagaaggaagggaagaagattgaggctttcatcggggaatgggactcaaatgaggagagctccgtctcatccgggtccgaggaagaaggtggtgatgatgcaagctccaagaagaagaagatggccgttgttcccatcaaggaggctccatcactcttcgctccactttgtctcatggcaaagggctcctctaaggtaacatcccttagtgatagtgagagtgatgatgattgtgatgatgtttcctatgatgagcttgtgagtatgtttgaggagctccatgcttatagtgagaaggagattgtcaagttcaaggccctaaagaaggatcatgtttctttggaggtcttgtatgaggagttaaagacctctcatgagagactcaccatttctcatgagaagcttaaggaagctcatgacaacctcctttccactactcaacatggagctcacattgatgttggcatatcttgtgatttgcttgatgatagtgctacttgccatattgctcatattgcatcatctagcatttctacctcttgggatgatcttatggatatgcctagccctagctctagctctagctcttgtgtttctatttgtgatgcctcacttattgttgagaacaatgagcttaaggagcaagtggctaagctcaacaagagtttggagagatgcttcaagggtaagaacactcttgacaagattttgagtgagcaacggtgcatccttaacaaggagggacttggattcactccaaagaagggtaagaaaccttctcaccatgccactcgttttgtcaagagcaatggtaagtattgctccaagtgttgtgaggttgggcatttggtgagtgattgccccggtggtaagcctcctaagacatgcatgttcgattctcattatatgcttaggaaggcttatgatggtagtattgttgctagatatgtgggttcccctatactcggtggtaaaaagaatgccatttgggtgcccaaagctttggtctctaacctccaaggacccaaacaagtttgggtacctaaaagagcttgatcttcttttgtaggtgaactaccgcaccggtgggagccattgggtgcttgatagtggatacactcaacacatgaccggtgatagggctatgttcaccacatttgaagtaggagagaatgaacaagagaaagtgacatttggagacaatagcaaaggaaaggtaattgggttaggtaaaattgttatctccaatgatttgtcaaatgaaaatgtctctcttgttaaatctctaaattttaatttgctttcggttgctcaaatttgtgatcttggcttgtcatgtgccttcttcccacaagaagttattgtttctagccttcttgacaagtcttgtgtgttcaaaggttttagatatggaaatctttatttggttgatttcaattctagtgaagcaaatttgaaaacttgtttagttgcaaaaacttcattgggttggctttggcataggaggctagctcatgttggcatgaatcaattgagcaaactttcaaaacgtgatctagttgtgggcttgaaagatctgaagtttgagaaagataagctttgtagtgcttgtcaagccggcaagcaagttgcaggttctcattctactaagagtatcatgtccacatctagaccattggagctcttgcatatgaatttgtttggcccaacaacctataagagcattggtggtaatagtcattgtcttgtgattgttgatgattattctcgctatacttgggtgttctttttgcatgataagtctattgttgccgagtttttcaaaaagtttgcaaaaagggcccaaaatgaatttagttgcactcttgtgaaaattagaagtgacaatggttccgaatttaagaataccaatatcgaggactattgtgatgatcttcatatcaaacacgaactttccgctacctactcacctcaacaaaatggtgtagtggaaaggaaaaatcgtacattgattgagatggcaagaactatgctagatgaatatggtgtttccgattctttttgggcggaagccataaacaccgcttgccatgcaaccaatagactttatttgcatcgtctcttgaaaaagactttctatgagctaattgttgggaggaagccaaatgtcgcctattttcgagtttttggttgcaagtgttatatttaccgaaatggtgttagactaaccaaatttgaaagtcggtgtgatgaagggtttcttctaggttatgcctcaaatagcaaggcataccgggtctacaacaagaacaaaggtattgtggaagaaaccgccgatgttcaatttgatgagactaatggctcccaagaggggcacgagaatttggatgttgtaggtgatgaaggcttgatgagagctatgaagaacatgtctattagagatgtcaagtctattgaagtggaagacaagccatccacctccactcaagatgagccatctacttccgcttcgccaagtcaagctcaagttgaagtggaggaggagaaggcacaagatccacctatgcctccaagaatacacaccgctctttccaaggatcacccaattgaccaagtgttgggtgacattagtaagggtgttcaaactcgatctcgtgtcgcttcgatttgtgaacattactcgtttgtttcttgtcttgagccaaaacatgtagatgaagctctttgtgatccggattggatgaatgctatgcatgaagagctcaacaactttgcaagaaacaaggtgtggactttggttgaaagacctagagaccacaatgtcatagggacaaagtggatatttaggaacaaagtggattggtggtgagaaacaaggcaaggttggtggcgcaaggtttcacacaagttgaaggaatttggtgatatgatgtctagggaatttgagatgtccatgattggagagttgagcttcttccttggacttcaaatcaagcaactcaaggatgggacgttcgtgagccaaaccaagtacatcaaggatctactcaagaggtttggtttggaggatgcgaagcccatcaagacacctatggcaaccaacggacatctcgaccttgatgagggaggtaaaccggtagatttaaagctttatcgttccatgattggtagcttgctttaccttaccgcatctaggccggatatcatgtttagtgtttgcatgtgtgcacggtttcaagccgctcctaaggagtgtcacttagtggccgtgaaaaggatttaaagcattcctatactattggcttgtggtacccaaaaggtgctaaatttaagcttgttggctattccgattcagattatgccggttgcaaagtggatagaaagagcacatccggtagttgccaaatgcttggtagatcccttgtgtcatggtcatccaagaaacaaaactccgtagccctctctaccgccgaggcggaatatgtttcggcgggtagttgttgtgcccaattgctttggatgaaacaaaccttgttggactatggcatatccttcaccaaaaccccactcctatgtgacaatgatagtgccataaaaatagccaataacccggtccaacattctagaaccaagcatattgacattcgccatcacttcctaagagaccatgttgccaagtgtgacatagtcattagccacataagaaccgaggaccaactagccgacatctttaccaagcctcttgatgaaacccgcttttgtaagttgaggaatgagttaaatgtcatagatttctctaatgtggtttgagatggtgcactatggttgcttcttttgcattttgtatatttgctcctatttgctcttatgctttggacttattgccatttggttcttcattgtgaaaatggagcatgtcacattaagggggagttttggactcttgcatgtgctctacttccttttatatgtgagcaaatcaactaaaagtgctagtagtgtttttcaaaatgcccaagtcaacataagtcaaaacttttgcaaaatcaatgaaatttgaaaactatttcttggaaaatgtttcaaaagggtccctatatgttttccaagcctcacattgctagaaaaatgatttttgaacgaaaaatgccattttggctctcttttgaagaatctagattcttgtttttggccaaaatgagattaaaccccataatgagtttgagaaggaatctgagaaaagattcaaaacaaagttggtagagaggagtatttgaaatgttttaggtattcaaatcatattcaaaaaccaaatatttcaaaagttgtttgaaaatcaaattcgtccaaaaacccctatagaccataaaaggccacctcctagcactcaagtgagttttgttgcaaatcttcataaatttcaaatattatgaatggttggcaatatttcaactcacacatttcaaaattgctccaaaaatcaaaattttattgatatttattgagtgggggcagccaactgtgcaagggctgtgcacagtcggctggggggccaggcggtctgaccggcgctatatgcgcggtctgaccggcctggtggcagcggtctgaccggccactagggctcggtctgaccggctgcaacccggcggtctgaccggacgcgtaaagctggtctgaccggcctaggatggtgggcccaggactttatcctttcttcctcatcctccttctacccgacccctcctcatcccatctcatctcttctcttctccaactcgaaaaaactcctcctctctcctctcccaaaccctagccacctccctccaccaaatccatccggttcaaccgtcaaaatcactccggttacaccgtaagtgaatctcctcctcttcctctctctattccatggattgatttgagttcttattgagtttgtgatccatggcatggaacactaggtgaaggaagaggtgttcttcgatttgcaccaatagagggtggtttcttggtgtgattcaactccttcaaccggtacatcactctccctcttgtgctttgctctcaaattggtctatctaaatctctagggttaagggtagtttcccccattgcttcaatctctatgaaatagacctacaccttgatgttcatgttccaatcttgtggaactttgtcctagcaatttttagaatcatttgtgtggattgtggaaggattcggttgtgctactgtcagcggcggtctgaccggcctatggccgtcggtctgaccggccgtgagacaccggtctgatcggccaatggccgtcggtctgaccggccgttggccatcggtctgaccggccttggctctcggtctgaccgcccctgacaggcagcacccccattcctccctcttcactatgtggcttctaaaattgttgcttatccatcctttgctccttgtttttcagccatgcctccccgcactcgccatggtcgtcgtgagcccacgcccgatcccgtcagtgagaatgaggaatcaagcggagatgagtatgttcaaagtgatgatgacaatatggaaaatgttgagggtgatgagatggaagtaagtgatgatggtgatgacaatgggagtggaaatggtgaagatgatgaggcaagtgatgatgggagtcctctcgattcctccatccaatttgtgcttaatttgaggaatgctcaacaatacactatcctccgtcatcatgatcaattccggaggcctaacgattgtaatgatccaagatttcatacacggttccaaaagtccgtgtatgcacaagtgtatgccaacaaagccttcgccgagcacaagtggatttcttggaggcacattggtgagacaccggagtttgagaatttgcaagagatgttccggaccgttgggattgatagaattgtcaccatgaagcaaccttttgatgaagatctcatccggcaattctatgccaccgtatgggtgtccggcgattgtgatgcaatgaagtggatgtcggggaccctccgatgctctatcaaccgccatgaattcaaggagctcttgcacattcgcttcaacaacggggatgaccttcatgatgagcacacccacaaccccttccccattgatcacttttctcagttttatgaagaagggagaaggcacacatatggcaaggtggcgggtttgagggctctcccaagtgtgatcaaccgcatagtaagggccaccatcctcccaagaggcggcaacaatgatgacatacgcggagttgcttggcatgttattgatgccattatggatggtcgtcggtttgatgttatcaaccttatgatgaaggagattgccatctcaaaggggactcttggacaaggaatctattatgctccctacataatgaggttgattcaaagcaagttgggacaaattggtcacaatttaaaagaacataaggagtacaagcctcgtctcaaactctcctcccctagagctcctcgtgtgcgccaaccaacattcgatcaaggtgcaagctcaagtgcagcccccctcctcctcaagggtatgatccaagtgtttttttttccatccacaatatgcctactttggaatgcaacccaatgacttcttcaacccggtccttggggctattaataccctaagtgaaagcattcaacgcttatccaccgggcatgaagcattgcatgaggatgttcgtggcttgcgcaccgatgtttgcaacttgaatacttcggtgggaagattgcatactagggtgggtgtattggattctcgagtccaaaccttggagagtacccaagcttttgtctatcatcgccaccgtgatgcttctcatccttccacttcggcgcgtcctccttctcctccacaagagtgaagacctttttggtgcttgatgccaaaagggggagaatagtgtgttttatgttttgtgggttgggactagtagtagtgaggttagtcacctcatatttaataggctaaggaggattgggctatatttggtatgggtatgggctattactctatattgtgtgttcctttttcgttttgttgttctctatgtcatttggacccttcgtggtcttgtaatagcctatatttatttgtgagccctttatgtggtcttaatgtgaacttctgctatgatggatggttggtgtgacattgatatatttgtgaccatcttatgcccatggatgaatatttctttaagttcacattgagatattgctcttgtgtttgtgatatgttgaaatgtgaaattgaattgtgcattggctccatatttgctatttgtgattgttatgcatatgtttagggggagcttttgcttgtcaatacaatatatgtccatgtgctatatgtctgattatatatatttgtggtgtttgtcatcaattaccaaaaagggggagattgaagcatttaggcccccggtgttaattttggtaattaatgacaagcgctaattgtggactaaccgttgtctttgagctatacattttaagttaggtccacatcatatgtgcgcatggatgattatcgatggattaaaattgacggcgcaaagcaaagagaaagaagacggtaaaactagcgctttaatttagaattgatcgaggtgtaaggcgatcaaatttgctagtttatttttagtttcgccgtactattaagaggggtaatgacctagcaaagagatgattacaattgccacattaggtcattgcattttcatttgtgctctctttttcatcacacatacattcacttgcaaattcactgggttcggcctgaccaggggcggtcagaccggccacatagtggcggtctgaccggcgtgccctggccggtctgaccggccgcaagaaggcggtctgaccggagcataaggccggtctgaccggcggcatttgcgcggtcagaccggccccctggaggccgggatggtgctgctcgggatggccgatacagagccgacggagccatatttggtcagaccgagccgaggccggtctgaccggccaccccatgccggtctgaccggccaggcagatggggccctctgacagggctacaacagctagttttctagccgttgcagagtagcacggtctgaccggccacatacctccggtcagaccggcagagcacagagttgggggatttcgcccccaacggctagttttggtgggtgggagtataaatacttccccaccagcagcaagggggctctcttggcacccaattcaattgcatacactccttgcacctttctcacactcacttgagctttgtgttcatccatctagtgtgttagagggttgtttagccaagagtcaagtgcatttgcttctattgtagagctagtgtggcacttgatcatctcaacaccgggtcattgcttgttactcctggaggttgccgcttcctagacggcttgtggaggagttgcctggtgacctctctgagaagattgtggaggaggcccggcgccggtttgtgagtggtttggagttcaccaccttcggagtgaaggaagaactaccccgagtgatcctggcttgggtagtcctctccgtgggccggctcccgccttgcccaccccttgacgaagggggcgtgcggtggctttgtggttgagcggtggactagcaacttaggttagatttgattaggtgttatttattctttaaatcgcctattcacccccctctagtcgacatctcgatc

SEQ ID NO: 9394 - DNA, 28072 bp, Oryza sativa
ccgtgtaggcggaggcaccagtcggcggcgacggaggcaccggcggtgaagtcgtagacgcccaacagcggcggcataaaaggccagccgtgtaggcggaggcaccagtcggcggcaacggaggcaggccggcggtgaagtcgtagacgcccaacagcggcggcataataggccagccgtgtaggcggaggcaccagtcggcggcaacggaggcaggccggcggtgaagtcgtagacgcccaacagcggcggcataataggccagccgtgtaggcggaggcaccagtcggcggcgacggaggcaggccggcggtgaagtcgtagacgcccaacagcggcggcataataggccagccgtgtaggcggaggcaccagtcggcggcgacggaggcaggccggcggtgaagtcgtagacgcccaacagcggcggcataataggccagccgtgtaggcggaggcaccactcggcggcgacggaggcaagccggcggtgaagtcgtagacgcccaacagcggcggtaggggttcgccgagtttcctgtcaacaagtgtgatggaatcaatttcatgattcgtcggcttcgtcttcgattcgtgagttttcacttcctcgctgccgacgacttcaacaatctctctttctccgacttgggttttaaccagtcgagagaacggcgatcaaagatctgtgtcatcaagttggaagcttcaaaccgtcatcgtcaccgataccacggctggctagttgcataagacagctgattggatcaatctcggactcggctgactcaacatggaaaatcaaaaacacggagcagtacatacaagcagcaattttcacttggtcagctcgagtattttttaatgaagacgtatggctgcgggcacacgcgagctatatcaatgctcaaacttatccagcaattactggtcatcgcatgcgtttgtacgtgcctggaacaactatgtacctgtatgcataaacacataccaacagaagatctgcacatgcatatgatttttgctacgagagtctgggccatatatgtcgccgacgactttgtcaagtttctcttcaactcggactggaacacgacagacaacctttaatctaggatacaaaacgggctggactaccctgtcaatattggtggccatcatcatcaccggcttaccttcaccgccgccgactggtgtctctgcctacacagctggcctattatgccaccgttgttggacgtctacgacttcaccctgagcctgcctccgtcaccgccgactggtgccctcgcctatacggttggttggtcacaccaccgttcatgggagcctgcctccgtcaccgccgactggtgtctctgcctacacagctggcctattatgccaccgttgttggacgtctacgacttcaccctgaacctgcctccgtcaccgccgactggtgccctcgcctatacggttggttggtcacaccaccgttcatgggcgtccacgtcttcattgatcggccggacttcaccaccgccgactgctgtccacgcctaagcggttggttggtcacaccaccgttcatgggcgtccacgtcttcaccgaccggcttgactccgccgctgcctactggtgtttccgcctgcacggccggcctattatgccgccgttgtcgggcgtccacgacttcaccgccggcctgcctccgtcgccgccgactggtgtcctcgccgatacggttggttggtcacaccaccgttcatgggagcctgcctccgtcaccgccgactggtgtttccgcctgcacggctggcctttatgccgccgttgttgggcgtctacgtcttcaccgaccggcttgccttcgccgccgccgactggtgtttccgcctgcacggctggcgtttatgccgccgttgttgggcgtctacatcttcaccgaccggcttgccttcgccgctgccgactggtgtttccgcctgcacggctggcctttatgccgccattgttgggcgtctacgtcttcaccgaccggcttgccttcaccgctgccgactggtgtttccgcctgcacggctggcctttatgccgccgttgttgggcgtctacgtcttcaccgaccggcttgccttcgccgctgccgactggtgtttccgcctgcacggctggcctttatgccgctgttgttgggcgtctacgtcttcaccgaccggccgcctcgtctgccgccgactggtgcttccgcctgcacggctggcctttatgccgccgttgttgggcgtctacgtcttcaccgaccggccgcctcgaccgccgccgactggtgtttccgcctgcacggctggcctattatgctgccgttgttgggcgtctacgtcttcaccgaccggccgccgcatccgccgctgactggtgtcaccgcctgcacggctggcctgttataacgccaactgatgctatcttcttcacggctggctacatcgctgtcactactaataggcattagtatcttcaacacaagctgcctacgtttgtcatggctgccgactggtttcttcacttccatggctgcatgattctgccagtgttgattggccttaccatcttcatcgctggtcgtctcgtctgctgctgactagtgccctcacctctacgtctggtttatacagctaccactactgatggacatcatcgtcttccgttgccgactggttatgccgccgccaactagtgcttttatcttcacaactgcgcgtcttcgctaccagtttgcttctgttgccgccgactcgtgttcacttcatcacggcaacacaactttgtcaacatggtggagcgacttcatctttattatcttcggtaccagcaaactctattgctgctacttcacaagttttgttacatcaccaaccatgacgttgttgtgaatctcgacatctcggcatgcgatgccgtgttattttactacaacaagtggctctccaacattcatgatttctacttggacatcttcaacacatatcttcaatcaagcaataactattcgacgacaagatgctacagttctcgactctatgttcagttgtttcccaactaatcaaagagtcgggggctacacaaatacaaggctcaaaatttgacaaattttatgtcaagctgaagaaatcaattcatcaacccacgagtcaactccagaagtcattatcttcatctttgcttcggagcagacattctacttcaacaacttcaaatatttcggtttagacgagttgggcaacaacatcaactctcctccaagtgaagcatctacaacagttataacattaatttgatggattattgtcactgacatcatcaccagcacctctgcttcatcgaccctgacatctctgctgttgctaatggatgattatgtttttgccgacttattatttcaccttcacggttgacctactatgcaaatgctgatgagcgtctttgtcattatcattggttgctacactgctgttggctggatcaccgacatcgtcatcttcatcatgtcggttgcgtttgtcgtcgtcaagtattttcttcatcttcatgattggtggatttcgtcatcgcctttgatttgcctcgtctgtcaccgactgattatttcgctgccatagctacacaactttattgctgagcgccttcatattcattgctggctgactgctgccgactggtttcttcgcctccacggctgtgcaacttcatcacttttgattggtatcactatcttcactaccaccaatatttttgccacctctgctgggcaatattatctctgtattggtcgtcttgtctctatgccagttgcgtcagctaccatcaatgaacaattgtgactacgtgctcaggggcttactagttcaaacacaagtatcataccttcaatttggacttgctctggatacatgcaatatgaattcatgatcatgggtctattttctatgtttaaagactggactatttattattccccataagggttacaaccgaatacttgcgccagtcgggattcaattattatatttattttggagtatcccataagggataatcattcagatcagaagctattcatatgagctacacttggtctatattacccggaagatttattactcgggagcatgttacatgcgtcatcctttaaagggtgtcgaaggcatattttttggcctaggcctaatatgtctgcagcccatattttcaggtgtggcctgtcacgttcttttagggacttaggcacttttcgcttaggccaaagtgcgcgtgatcaagtgcccaataccttaaaatccttttataccgcagttactcgactttttaggagttggtatagcgatagggttttgagttatcggctatatgtccaatgtagagtctaacactcgatgtaaataatgatataaaggcactgatcgatataaaggcaatgatatgatagaataagcactgatccgaaggttaaagcatacatcggctggaggtccgatgtcataaaatccacaattttagataaacagtgaaacctttgttgcgatcggctaagtccaacttatatgtatatgcaatccttacaagccaatgcaacgtccatataacttatcggctagcaccccgataaaacattagcatgaacctatcggcttaacaagacatatatattatcaacaacaatctagtagatcgaacctaaccgatgcagcatgacatcggatcccataagatataatagaaactctatcccctccaagtaagactttagaaatcactcgactcataggaatattttccataatttgtaacggattcctccaacgcatacggaaatcccgagctaattctttttctcttgaaatcacttgactcgatctccttttctttttctcttttggaatcccgagctaattcatttggaaatcgtcggattcgatgccgatttggtttgcttctctttccaaaaccctagagctttcctaatccaccggtgcctccatgggcttagctggcgccctccgccgctataaaaagcacccccctagttgtcctctacccatcccctcaagtcccgtccgccgacgagacccgtagcaccctagccgcgctagctcgtgcgccgccgtcgtcgaagggagtacggtcgtgccgtgccgccgctatagtctccaccatcgctcgaggttgccttcgtcgggttcgcaaggttgccgccgtccccatcccgcccttcgtttccgccgcagacagctagagtgccgccaccaccgtcgacccgaagaccaccgccgtctcgacctcgccgccattgtcgatcgtcaccgtccgtcgtcgttcgagccatcggtgagttggccacgtcacgctctacacgttgatgccctccgtttgcgccaccgcgccgtcgttcgccggctagcatgaggtgccgagccgacgccggtgatgacgtcatcgtaatgtcatttgtagaccgtggtagaccggaacgatctcggccgtccgatttggtcaagtttaggtcaattagatctcggccgtcggtttcgtggaccgcttctgtgaacccggtttagcatggaccgtccttgatgacgcagtaaatctcttttccttttcaaaagtaattctttattgtgtcataattcaattaaaatctttataaatgctttaactcgatttaaacttcaaaaattcgtaactaattcattgtaactcggtttaatgtggttcaagttgcaaaagttgtataaaatgaagatctatatattaaaattatccattatttgtgttaaattcatttaatcctttttaaataggcttcaattatattaaatcttgtaaaattcataactaattcgtacgaagtcggaatgaggccgttcaagtctcataatttatctaaaattatgatctacatgtttgtttactttactagcaaaagtgtccgtgcattgcactgggtgattatggagtgtgtatatcaaccaaaagtgttgtttggtttagcaaaagtgcccgtgcgtagcaatgggaagtgtacagatcagaaaaatatgcaattaattaaaatacaaattctctgaatatttgatatttttaagtaggtatgtatataattaaataaatttacaagtaaagcaattgtgagaaataaaatgacatggttaaatttaattttattaaattcttcatgattagttttgctctttgaaattttattggaattttcagagcttaattgctaactttaataatacaaacatcatttaacaattatttaattggaaatctaatttaagttcttgttgggccggccgacctacgtgcggccaatgaggcgtgcgcggcccagcattgatgcggcccgatgatggagaccggcccgacgcgggagtgatcaaagccgttcgttttgatggacggctcatatcggctcctaatctatcaaaaccctcaacccaaataaaccctaaccctaatttcattcttccccttcctcccctccacgcaggtcgcctttctccccgccgccggccgcgccacacccccaccggcgcacctctccgcgcccctccccaaccggcgacgcctctcaacgcccctcccccaccgccgacacctcttgcccccctccccaccggcggtggctttacctaccgagcagcggcgacggcacccttctcccccacaagcggacagcggcggcgcccttcctcccgcgagcggcgacgatggcggcagcggcgccctgccctcccacgagcggcagcggcggcacactccctcgcggcaggcggctgcggcgacgcggcgatggtgacgccgctccctccccccaccgccggctccttctctcctcgtcgggtggtggccgctgcaccactctctcggtagatccgccggtggtgtcgacggcggcggtagccgcgggtggaaccggatgtggtggtggcggtcgcgggccggcggcagctccctcctcccctctcgcctccctcttgcccctgatccggcggcgatggcggtgttggcggcgtcggcgggtgggtccgtggccgacggcgaggtggcgaggagcagtgcgctgcagcctccggtccggctcgcccctccctctcctcgtcatctcgtgttaatatgatgttttctaatgattccgatttagatttggactgggattttgtgtttgatttggatttggattgtgatgatttgagatttggagagaaggtgtgctcaatgtgggattctatttgtgtgatgatggaattccgactgggatttttgagggaggggagggacgaaaaatcaccgtacggatgtggtgacgaaaggaaaaatccgaatatttatattagttatagatatgtacttttcatttggtttttattagtcttttttctcgttttgcgtgttagcttgtcctttccgtcttttcggaggttcgcgagtgtgtcggaagtattccagaaaactaattgaagaccgattattgcaaggaaagtcacacagatcccaaacacaattcatttgagcatgttgatcctatatttaaattctctatttaattaaatcgtgcatttattttcgaatgtcaccgggtggtgtgaacctattcctttgttatggccaatttgcaatgattaccctatttcttgattacctcgggttataatttgactagtcggatttatatatcggttcaactagatgtattagatataattggttagccatgcttagaaacattagcacacaattgggataactaatgtttcactattacttaatgatggatatttaatgatagctcacgatggttaattgtgattggttaattaattaattcgctaactaaaacttgataatggtgggttgtgagcacgtggttttgatggtcgtgctcatgacaattaaggaccggttcacgagtttcggttgtgaaacattaaccgtgccaaccacaagccagcatgggtaacggctttaccttttgtatagcatggttcattgcggggcaccagactgagaagtggcggagataagcccacgggggtcgctggggagtccatgccttgttttataagggggtgattatgatccaggaacggtgcactgtgggggattgtgttatgcgaggggtactgtcacagctcctttccgaggtaccgtggtggtattaaggcgcatggtgacatgtcgtggggctatgtcttgtgggtacagtggtacatctttggccatagtaaaactattcgaatagccgtgcccgcggttatgggtgggtctaacaatgtatttcgtgattagtatcacacttctcaccataataaatgatgctataactggtaataatttgattagctcttggtttggaatggtacattcctagtttggagatagatctgtacagccgggtatggttgttcaggtttggttgggcctgtgcagcatgggtatgctgttcagtgttgattaatatcgatgattaattactttattgctttacaattctcaaatgtttgctaaatgctccttctgcaaatgagccctatattatgccattctttggtatccttgtgcacttgtgtacatgttgtgtggcttgcggagtattccatgtactcaccttggaataatcaatcaaacctcagttgaagacaagttacaaaggagaaaacatttgacttataccccagttgagctgtctgtgggagtggagctgaaacttcgctagattttatttttctgctacagttttcttcgtggtgaggactaggtacctcttatgtaagtatttattgctttagttcttatgatgaatttgtatattaaattgtcagtttgtatacctcggctgatttctggacaatgattttattcacaaattagttcggaaattactagtgattttctggtcgtgacagaccgccaccgcgccgcaagccgccgcgagccacggtcggtcgcgccccgtacggtgccgctgcacgctgccgcgggccgattgtgcccccgcacggcgccgtcgcaccgctcgccggccgcgcccccgcacggcgtcatcgcacgccgctcatgcgtgccgcgcccgcatagccgccgcgcagcgccgagccgtcccctgccgcgccatcaccgcacacgcacgcctggccgccacaccgcagctgcgctgcccgcacggccgcagcgtgccgccgcgtctcgccggcgtccgcgcctcgccccgcatgtccaccgcatgccgccggccgagccgtgctcgcgcaccgcccgtgccccgcatggacaccgctgccacgcatggctgccgaccgggcgcaccattcacgggaagaagaatagaaagagaagaaagatggaaagagattggcgattttgcaaaagggcccctgaattgtctgaaaattatgcgcatatctctcggcatggaaattccttgcgcgtagactctggaatttcagaaatttccattttcatccctccaccgcatggaaacttagtaaagggccccctgtacttgcatatttcgcctgcatttcttatttaagcattttgtttatgtcatataaatttttaatttgaatttcacgaggcattaattaatgttaattggtattttgaattttcattttcagtatttatatgaatacatgcaacttttgccccccttttatgaatatttgtatgaatttgtatgaactctagtatttctttattgaaaattgcatttactttgaattacctgcgtttctttgtataattagcatttcctttgcataagaaatattggaaaaatcatgaaatatttgtattcatatttgcaaccatgataatagcaagtaacacttgaatgctttgtcgtctttgtaacagaatgttagtaatcacgaacaaggagttcgctgaactggccccgtatgaccagaactacctgacctgggcatccaatgtccagattgtccttggggccaaaaagctcctcaagacatttgggatgggcacagtacaagaacctatgccgacacctgatgagaacgatcaggcgatgtacttcctgcgacaccacctttgtgccacactcaagaatgaacacatggcaacgaagggtctgctcactctttggaccacactaaaggagtggttcgagaagcggaaaaacaccaccttgccccaagcagagcaagagtgggcacacttgaggtttgccaactatataaaagcgttaccgaatacaactccgccttgcatcagatatgtatcaacctctccctgagtggcaaagtagtcacggacaaggagaagattgagaaaacgctctccaccttccacctcagcgctatgcatagcactcgtaaccacaggcggatgacatgcaagaagtatgatgagataatcaacatcacgcagatgtttgagtcccatgacaaggttctttgcaagaacttcatttcccatccatccaacaaaagtattgaccttaaggtcgatactagcagttacaagaatcacaagcccatctaaaagaagaggggcaagcaaggtgggaagaaagcacctaagaatatgcatgaaggaactccagatgcccaggtagcccaaaaagcacatgaaagcaagggcaaatcgaaggccaaggcatccacaaaggcacatttggttccaatcaacaacaccccagtagtagatgccatggcaaccctttccatcaccactccacttgacatccccgctcctgccatagtcgtagcgagcaaagaaaatgtcatataggagaagagtttgcaaagatggaggcttccccagactccgtcttagtccttgatacaataatgtcatataggagaagagtttgcaaagatggaggcttcgccagactccgtcttagtccttatacaattatcttatcttggttgcattatgaacttctttgaataatggatatttaacctctatgagagcataacatttattttgtgattcgccatgcatggctagactttatttccaatattatgttgcattttgctatatgataaagttttacttcttgccttgaagtagtgatgttttactttattcacatagacaatatgcatagcccaaggtgaagaggagcattgtggaacaaaagcaccacaaagtgtaatcttgagagacatgtgacaagttcagtctatgcaaagacgtgaactaccttcacaaccgcacgtaatgattgtaaaggttattgtttttcccgtagaaaagtgattacacctcaaatatcttgggaatggcaaactctcgcaccaaaggtcccttgtaggaattagaagatgagagaagcatactcatcacctaagcacgcgagatcaatgtcctcactaagaaatgtaggctaaagtagactatttcatagtcagtttttcttagaatttagtatcttgcaaatgaacatagcacaaacaatctcacatcatctgtcgtatcgcaacaatgagatatttgtcgcacgcactgccttagcgcctcgcgccagacttgcgccaggcactggcatgcatcatacagcatcatgacgcccactaaggcagctactagcaaccccgctgtactgggggactggacgaatcatgccgcgttagcacgcgccatgcaactcctaccatgcaccatagttgcaccggctgcatatctcgtggtcactctggtcgcgcatgccattgaacatcgaatgcgtgtcaaacgccaaccaccacatgaattccgacgtaccttaaaaggtatatcggaacaaattcgtgcataccacatgaattcgcatgcatatttagtcctttaatggatcatccaatgcatactgcgcttatgaaaaagctgtaattgtgtctaattgacactacgctcttgccaaatcgatcctgcaagatcacgcatgttggcatcagcacattaagaaaagcactaagtaccggacgtccacaagaataggactaaaaatgtccactgcaccattattgaaattcccgccacttcaatggactcttagctccaaaggcaatgaattatcaatatccagactattcaaaatgtgttgtccacttaaaagaatactagtgttgactcgacacatgtgcatatcccacaaccataaggtctccctccgaaaaaaattgaaagtttttaacagaggtatgaacgtagcttaaattccttgacaataagaaggattatttccagtcatttagggggacagaaataacccttaaatgataaatgtcaggaaaaatggtcaaagaaaggatggatgcacatttaatcaagcactagcaaatgcaaagtatgaaaagcacactttgtaattggataactgcctatcagttttgtgatttgcagagcatgactaagttgcattacctgaatataatgcaccggaggagggtgaaataccgaggaatgcaaaggtatacctcatattgtccagaggcctagagaagaataatgggacaagaactccggctccttaaatccctagagtaacaggagacgtctggtgaaaacggaacaaaaaggaactctcaagctcatagtcactaaaaataaccccagaatttgaagggagcgagttcaaagctggcaaatggtatggaaccccagaacaagcataccacatcttcctatcaaggaagaaaaccagcagttggagtgcacaccaacgtcggtaaaatgaaagagtcatgcccatatcaaagaatagaagcataagagaattgcatatccccatatatccatggatactcacataagtgtcacatacaaccaataagaattggtaatgagacctgctatgggcaatattctcttcatacagcaaatcattggcagttaacctggagttgaaaatcaactaaaagatcaaaccgcaaagctgacctatagttgacaatgaatggctagagaaattttggattgggcacccgcatacaagcattaaaaatccgaaaccaagttgatgatccgaatatcatcacataaagaaagaaagctcactctttccgaacgagtttgagataaaatagatagaaacctatgttgcttaggctcgtaaacatacaacacatgaagaagtgaaccatagtatatcagaatgtgaaaatacataggttccatgcatatagttcaccatttctagcaagtaacatggttcgaactttatccaaaccccaaatccattatcaagaagataatgatatgtgcgtcgcacaacactaatagactatacgaactatataagtcatggaaaatcatgcaagatttgaccattggagcatcactcgaactatcttttgaaaaggatacaagcaatgagttttgacggttcacacttaaaagagatgcaaaattcaaggggagaattttgccagtctattaacaaaagcttgaaactaaagaatttagtacccaaaaatcgattaagaaaatcgataaaagaatttgggtagattgtactctttttttttccttggataaattttcctgcagtttcttatcaaggtttttaatgaggcaatctgtgcgacatagatacgtatgccatgtactctttctccaatttttcccactgggtttttatggagttttgacgaggcatggacattacgcggtgagtgctcaagggggagtgttgagaaacttttgggcttggcccatgaaggcctagcctaaatacacttattggccccatcaccgaacctttcatatattagattgcactatataaagagaggagggggctactcattgtacaattgattggaggattgaatagtaaagagagtctcacccctaaaatttgtgtttccactttttgtagaattactggaccctcttgtactgctttgtgtagcatgagagttgcgtaataggacaaagtttatttccgattggttacttgcaagtctgtgaggaaatatagaaaccatcgcaaaatctcatgttctcaacatagttatgtagtgagtttttacttggaattgaagtttgacgatacgactcgaggaactaccgtggcatctcgacaagggtagagggatttgatagctttcgtgggagaaaagaacacaggaagaagaaaacggagttggcaagaggattcggttttctcttatcgcataaactcccaacaaccacagcttctcttataccatgcacacgcacactgatgccactgccagtccagcatggcacatcaaacacacactctcacggcccaaagacatggcccgactaaacatttaacaaggcccaatgtcatggcccagctgaacccataaactcacatataagtcaagtacttcatacaccaaaccgatacaggagtcatgacaattctcccccacttaagaatcggcttgtcttcaagccagtgcatctggaaaacgcttttgaagttgtcgcagatctttccaggtcgccaactacgctgacattcctctctagtgtaccagcccttgatggatcagcgacttgcctctcttgatcaaccgtcgttggagcacctcttcaggaagcacttctgttgttgcatcaatacaggggttaggaagtttaggactcaccactatacctgctttgaccgccttttcagaagtgatacatggaccattgcatgaatctggctattcgggggtaattcgaatttataagccattgctccaatcctgtctatcaccttataaggcccaaaaatacctgaaacttagcttatgacaagtgcgtcgagccacagacatctgcacatagggttgcaatttcaaataaaccatgtctcccacttcaaatttcatgttagttctgtgtttatttgcttgatgagtcattctttgctgtgcacgaagcaactggtgatgcagcatttcattgtacaaagttctgtcttgcaaccaagactgcacatctagtgcaatactctatcctaggtccaaggtccacttcaccaaaatgtgttggcttccttgcaaacaacacttcatagggagatttgcccaaagcagtatggaaagccgtgttataccaatgttgtgcctgggtaaccattgtgaccactttgttgggaaagcatgtactgcatatttaaggaaagcctctacacattgattcagcctctcagtttgtccatctgttaagagggtggtaagaagagctcatattcagctctcttccatttccccaaagtgaccctttcgtgggagagaagaagaacagaggaagaagaagacaaagttggcaggaggattcagttttctcttatcgcataaactcccaaccatgggttctcctcttataccacacacacgcacacggataccaccgctagtctagcacgacacatcaaacacatactctcacagcccaaagacatggcccaactaaacatttaacaaggcccaaagtaatggcccagctgaccccataaacccaaaccgaatttgctatatatttgtcgacaaattttcctccaaaaatttgacagatgtaattacagtataatcgtagtgtaattacactgtaacttgtatgtaattatactgtaactcgcatgtaacttgtatgtaactttcaaaaatctctccgtaacatgttatttcggtaaaatggaggtcgtgggaataaatcctttcacatgtgtgtgctgtgatttttttttcttcctcaccggaacaaatcttgtaatagatctaacgattcaaaattacatgaaacttacatacaagttacactgtagttacatgcaagttatagtgtaattacatacaagttacagtgtaattacaatacggttgtactacattctgtcaaatttttaggagaaaatttgtcgacaaatgtacaggtagtcccaacttatcagacaccacacccgtacaggagtcatgacatttgataagtagatggaacaagatagctagatttcagcacacatgctacagaaacacggaataagtaatttatcctacaagaataccgctaagataattttcagggatcgccaacggtctgcattctgaagatcagcagattagttgataatctactgaatcaactggtttctattcacagactcacagtgctagttgctgtggttgccacattttgttccttcttattctccagaaggacctgtgcttgtttcacttgagaaccgagaatgcttactggattcattgcgctctggtcgctgctagagaacatcatgaacgcttccagttcaaacatctctttggaagccttggacagagattccatcaagctctccagctctgctttggggtagtttccttcgagatttatcagtgatatgatcatcctactggcaatcttcagtattctcaggcaattggctgttggttcactgttttcttctaccaacttcttgagcttcccggcaaagctagatgcagaatctcctgttgcaattgcattagcaagttgagccaaatctgtatcattactgatcaatttttcaaatattgccgcactaagtgacagtaaagctgcatgtagtttcctgtccacgattttcttgttgtcgtccttttgctcattgacgttgccactatctttcgtagcaacggcaccttcgcctatttcaggatcttgtgtcacaaacttggttgcgtctgttcctttttctgtatgcttttctccttgcttcaatggaggagagggaagtatttctttgagcatctgcagtggtagaaattatgcttattaattagtaggtgatgataaagacccaaggtgcgcgtggttagttaaataagtatgaaacaaatgaaatgccttcatttgtttgaaattttatcacacaccgtacctttggcagcacatctttcatggcttccgtcagtttcttgagattgtcatcctcctttgtgtaacaaatgtatagatgcttgaggatttccgccgcacttattctgtatccgctcttggtgcgaacgtcgaggagcgttgtcttgagatcatcgacaacggtgtcactcgccttgaagatgatggcggcgttgctttcgctttggtcgacggaaagcattgccagtgcttcacctgccaattgtctcgtggaggcgtccttgttttctttagtgaagaagatgtcgaccagcagcttggtgattttctccttgctatcggctgtcgaagtcgaaggtgcttccatgggaagctgcgtgaggatcttgatggccaggacgtgtagcttctcgttgcattcgtcgcacccgaggatcttctcgacggtgttgatggcgcgcttgttggaacgcagcttgtcgccggccttcccagggagggcgacaaggcggaacaggagctgcagcgacgcggctacgatgtcggaccacgcgtcgtggccgatgttgtggaggaggtcggcggtgacgggcaccatggccttggagacgaggccctggttgctgccgatggcgctgcagttgtgctcgtcggcggcggcgagcttgtggaggatgtctcggcccagcaccatgagctccttgtagtgacccgacggggcactgtcgccgtcttgctgcttggtggtggtggtggtggtggtggtgtcgagcagcgacgagatgcaccggagcccttgcgggaagctggcgaggctgatctcgccggcgagttgcgccacgatcctggcggcgagcacccggacgtcccggtcgagcgggcttgtggagcgaagcgactgcagaagcctctccaagacctggctagccgacgcggagccgaccagcttcctgatcagcgcgtgctgcccctgcagctcctcctgcgcgaggatcttgtccaggatcctcgcaccggagacgtagtcggcggacgacgactcggacttcatcagctccacggcaaacgtcaccaggttcctctccttgacgaatgatggatccttctcgcaaccgatcttggtcttgcgcatgtaatccctcaccgactcgcgcccctcttcgtcttccttgtcgaacccgtagtcgtcggcgactactcgggccagccgtttcccggcgaagtaggaggctgactggtagcagaagagcacgccctggaagagcgccagtgagtagagcacattgagcgccggggtcaggttagcgccgccgtcctcgccgccgtagtcccgctctatgaggcgccacatggagaggccggtgctgacgagaaggccgaacaggtagagcaacgccagtgggagcagtatgatggcgatcaccagcgcctggaggagcaacacaagaatccccaccagtgcacgccagtactggtccgagtcgtcgtcgtcgtcctctttcctgaacaccatggctacagtaaccaagaggccatcgaacgatttccaagcgtaccgcagcttttcgttcaggaaaacatcgaacaccctgtaaatttagttagatagaggcgccgttagacctggacaagggagatacgacgaaatgggtcggagtgtactggaaatgtttctactttttaggaacttgaaacccataggaaaatgctcgatccgtcctaaaatatggctagattagatatgtagattcatagttgaagcaatagttatattcagtctagattcatagctgaagatagctatattttaagatagaggagtgtttgcaatttcggaacaagtagatacggtcaaaattttcaggataaaaaaatagctataagttaagggactgtctatataggatttgatggattttttccgataagttaagccccccaaaaaagaaccaaacactaatcccactacctcaattccgtctgtggcgcccaaaacactccttgcgacctgaactttccaagcaatggtgatgctacccttactagcggcgacgatgggtcaactactcctggagttggcggcgacggtgccaaaaaccctttctatggcttggactccctaggaggcggcgctcctcctgctagcagtatagttggctaaaagacccgttgcccgatggaccgggccacagcatggagatttagcccagcccaaccattgacgatgcctggtcctctttctcggcacaatgagttggcccggcccggcaagacccaataataagcaggcccaaagagatgagggaggtaaatagacatattccaaggacgagtacagtggactggtcgtgccttctggccgacatggcacggcacggcccaagtgttattgggttgtgcctgcattgaaggtgcagcccatagatgcgcacggcacgatatggctagttggtcctactctcgagccgtgccttggtcgtgcccaggctggaccgtaccgaatggcccatttagccatttataactggcggcgacaacagctcagctgctcctggagtcggtgactcagcgtcaggttcttgaggcagcagcagtcatgatttgctccttcatcctccatccttcctttttcactatcttgatatgtctctccgcctctatgggatttgtccctcagcacttcttctgttcttatagtagtgcgcacactgatttggggtcatggaagaagaagatcctgcatatgttggcagggggagacgcatggggtcatggtggtcctggatcgtcagccgcctgcacagctattgtaactgatttgggcaacaatgatggtagcggggtgggaggaaggggatcagcagcaacaactgttggaagaagaacggagagtgccagtcctaaatggatatgagatgtgtgcaatttatcaatttagcgtgatgtaactgctaaataattcagctgcaataagctcatttttttttctggaaatcatgcattatccgataagaaattaagatttgcgtggactaattattttatcccagaaatttccagaactttgaaattttgattgcattttgttttttgtaacaaaatttcatatttgaattcaaaatattcatacgaataatatccaaatttttgggttttttccgaccccccacgacaacaaaaaaacatttcaaaattgcataccctgcaagggagtacaaaagacgaccttaaaattgaaaactttagccaaagtatagttcagtgaattatacaaattgaatacatattatttattacggtacataataaacatcaaatattaatgctaaaagagtaaatgtcgtactcaagcaatcaattgacctcaaatctatctatctattatattatattattaaaataagaaggcatcatgttcgctgtgtaggctagaaattcctgaattaattgaaaaaaaaagaaaaaggatagtctatatagaaatacaattgagaaatcactgaaattcggaataaaaataagcaatattgcaaaagagttcatataagaacccaatacaaaattaatcgaaattcgaaataaaaaaataaaataaattctgaaattaggaaaagaacaggaagagttcaactagaaatacaatttagaaataattaaaattcggaatacaaaataaggaatattaaattaatagtttagctataacacagcacgagattaaataaattcagagtataaaataaaataaaatacgaaattaaaaaataataagagtctaggtaggaatacaattttgacgtaactgaaatttggaaataagaataaacaatattagaagaatagtacaaataagaatccactacgagattaattaaaattcgaaataaaaaataaaataaaataaattccaaaattaaagaataaaaaggagagttcaaataggaatgcaatttaagaaaaactaaaattggaaataaaaaaaggaatatttttttttgacgtgataaaaaggaatatagaacacaatatgagattaaaataaaataaatttataaattagaaaagtaaaaataactaagattcgtaataacaaataaagaagatatcatagaacacacgatgagattaattaaaataaaaaataaaataaattctaaaaatagagagttcgaataaatgagtagagtggtggtggttgataggacactaaaagatataaacaaaacccaaatagaatgtcactgatgattaagtggagggacgatgggtagaccattaagcatcacggtcacgatggcgggacttatagaaagtaaaaaatataccctaacgataatcatattttatttttaaaatctcatgataaaaaagaggggaggcagcgggtggtccatagaggagtacggtggcaaagccgctgacagtttgataggacttctagaaagtaaaaaatgacctaaatgataattatgtttgtcttttaaaatatcaatcgcaataaagagataagtcggtgggctggtcataaaggagtaaagtggtggcatttgacgagacttctaaaaattataaaacaaaacccaactagacaatgaactctaaaaactacaatgtctaatttttaaacgttccaagaagaatgaatataagcagtcatagatcgcatgcaaataaaggagtgataaaggagtaaggggtagcgactggtgtgacttttaaaaaataaaaaaaattagaaacacgtgaactatttaacaaaatttaagaaaaaatcatatgtaaaaagtagataattttgtatgggtgctagccacgcaattgcgcgggtcacccagtagttctattgaaaagcatcatccttttagtattgggttgaaatgaaatcttcctattggggcaagatgggctttgctttactctagaacttagtggattagaaattatggccccgtgtagtcaggcacctcgcaaatgctacaatattgctagcaaattcctttgcactctatctttccttccaaatgaacatgaacagtactagaaattcctgaagaatgatcttatgaaaatctttgttccgaaagtgtgttttgttagccccttttcagagaaagaaaaattatcattgggagcaataaatggtcagaaaagaaaagaaaaaagtgacgaataggaaatacaacaaatgtatagtagaattaagaagtctaacccagctgtctggacaagggtgataatggtgagactccaaaaatccttcttctcaagcatggagacgaagccaccaaggaggacgacggtggtccataaacctactaggaagcccatccccttgacggccattgacaggtaccccataaacagagcataactgttgataccgtcaacttccttccactcggactgatcaggttcattagccattgtcagttcttcctcaagaaagttgggatcatcgtttgcaaagcagcaagccaatatatatacaagctcctcgagcatatgggatgattaactatcaatacgtagaccaatagccgattaatgaaaaatgttcagatcttgactttacctgcacgaagcgatcgaggtcattgtaaagtatatattgttcatccagcctgttcagttttggaccaagcaattagctaggtctttattatatttatgtattagtagatcaatataaaagacctacaaataaattaaagctagtggcctcacaagttacaatacaatattatgcttctcactgtttgtgtacccacactctagctagattactaatgctgggattattattgtttcttgaatgccgggaaccagacgtaattgatgcacatatgtaacacatggtggactggtcgaggagcgttacatatgtaacaggagctgacaacgatccgctaaactcgcaagagtaaactctagaaaacatcatgaagccttccagttaaaactgtttacaactaaatttgacacctagattcgaattatgaacattgccaaaatttgaaaggcgccgagtttccttcacggggccggtccgaccaccgcctatgggagtccaaaccgattttcatcgggtctcgggtttccttacttggaaaggtatttttcgagtttccattggtttccaccccaaattaaacgtggagaagaacatgtagaagacaagaccaactcctttataatagccaaggtcggttcgacctccctcccccccaaatctcaatccatacataatcgaatcgtttttttacttctacttttagccattttttctactttaccttagttttgtccatctttgtcggtttgcgccgtaaaccgtccgccttcactacgagagtgcgattatctctttgtagatttgtcttataaccttccgttcgcccacgagacgggtggttatcttcaaatcaatctaaatcggccccgaggctaatttgatctctaaatcgcctccactagccggtttaatcttcaaagcccatcttgatttagaattctctagatcgaggtggttggtgactccattaacaccacaaatctttaaatgagtcatggttgggaccgaaaagggtgccaacatgaattggcgactctgctggggaacgtcaagaattttggccataccacggccagaaacaatctactatatttgttgcttacgcatataaattgatcgctcagttgattggatcagatcggcgacatcattctcttaccgccgcgccggtctgaaccagtctaaccgacgttgtaggcccggtctgaccggtgaggtgaccggtctaaccggcagaaagcaccaagataagcagcagcaacattgtttccttttattgctgcacactgttactgagaagaaataggaacagagcggccgattttatttaacatcggttaatttttggtatatttgctacagtaccaaataccctgttacgatcaatcaacaaggctaagtttgataaaattggtccaaatacagtagcataccaagaaaactatagaccgtatattaatctatttggtcaaaatatttcagctataattaatatgatcgaaattcatccacaaacatcttcatcaaccatgacgagtgggaaggagatcgacaagctcaccaaggaggactggaccaaggaggagtggcgagactttgaaaaccaaatggcggcgtgtgagaagacgatgctcgcaagcttcctcaagaccgaccaaggcgtcttcaaaagagacgtgacgtcccgctaccttgttaggagctctattgggccgcatgcagtatggaccatgcattctccagagcaagcccaggctagcccaagcgactgggaacaaaaggatggctgctgctcctacaacaaacattgaacagatcaaacaggcatcggcggcttcagccacggcggcaacggcgtcaaggttctaggctagaacctcgacgatctatcttctctaccgatctcttcctacctccagcttccactgctagttctagaagcttccaaaacttgtattccatagtttcttcttctcttttccccctaaaacaattgttgcttgtatggtggatccttgctattgaattggaagaagtgggttcctaacaatctagtatcagagccgctcggttcgtgggatttctcgtcatgcaggtgttgggaaggcagcagtgcaaggtggaggaagatttgggcaagtgaggtgctcatgaatctagcgcacacaacctgttcgatagaataccaaaccaacataaggtgtttaaggacgatgaaaggatatcagagcccgtttccatcaaatccaccatgaacaaggagggaatatccatggacgaatctttagatcagaatcttgggaagcttgagttgatggaggccaagtgcatgcaagaggagaagttcaatcaaatactacagaagttggaggagatagaggcttgtaggagcaaggctaccgaggtgacgattgctgccatcaggacaaccaccgccatcctcaaggcttcatcatctccaacacccatggcaccacctcctccaacaccgaccaagtgtttgacaaaatgccccaacaacaacttcacttgggtgatggcgaattcaagtcacattggtgaggtgcttgctccaacggctgcctgggagctaggagacaacaaggacaagggccacgccccctgcatcgtcaccaacgactcacccaaggtcacgcccgccaagtgctcgaattgttctagccctgacatcatgctagacctcaccgtggctgtgggggtttcatgtgccactacttctatggcctccatggagttgttggttggcgaggatgaaaccagtgtcatctacattgacaaccctcattgttccatagcgacgcatgccaagtgttcgactttgggcctcgatgtcaatggtagcgccaaccaacctgtggtcgtgttccctaccattacagctatgaatgggcatagcatcattccaactctgcctctgaccattatgaatacgtcagtcatccttgttgtcaaatcaagttgtgctagcgacaattctatcagacttatgactctatgttagccactaatggagtatgctgagaggaatccatggccacctcctccttcgaacaagctaacgggtagcatatgtgagctatggccagaaccatggtcatcgtttgcgtgtaatcgatgcaaagtgtggtacttgttccgattggagagcacactattactgtacgtgaatggagttgagcagtttctaaaggaattgccatgctggccaccgcctcaagaagatgtgattaaatctgagttttatcatggagggaatcaattttggttgaggaattcagcttgtgttatttttttttagataatggattcagttgtgttattgcagagacaaaaatgatatacgtagctactgttgtgaggttcagtttgtgctatatgcagatgggtgctatgaaaccttcaagtgttatacaatggttaaatttcccctactgcacatatgacggattcaagcggaagcttcgaggcttgttcacaaatggagccttgtgcatacattcaagtcagtatgatcctccagatgggctttgtgaataatccggttgctatttagtagaactagaaagaaagcccgcgcaaatgcgcgggcatcttattgattgttttataaaaataatgcttaaagaagttacatctcactatttctatttaaatgttataaaataataagaatatatctcagattaaaaatacactttgatcgagtgacatataaattctcctattgtcaccattacttactatgctttaaaacctaataagtaattaatacactaaattatcctctatttaggtttcatatctcattttttttctaaatccatttataaatattataaaaataccaccacttctattcattaatggagtagcaccattaaagttaaacacgaatactactctagtgggtgaagtcgattgtagccaccaagactttctttctctattgccttgaaacatgagtcccgcatcgatgtagccatgctcctgaagaccagcttggagcataattttaatgtatgattcattatcacatgctcatggagtattatattggtaagtagaaagttgagtactattagcgatggtggcctccactggaactgtaacttagtcatatattccattttatacttacgacaccataataaactttgttgtctaagtttagtgtcctttagggaagaacaaagagaagatggaggtgaccaaagtagttttttaaaaatgttttgagtagatttgtggtgcagtgtaaacacaatttctttatggtgttgatcattactactcattttttttatgaaaagatagaatactctcttttgaaaatggccgagtttaataattcgatgatgttttttaaaaaatatagctaatgagacatatcaccacgatagtatccagatcatcatgttattatctatgttttgacaaatatgtatagtcaaatagttctaaaaatataaaaatactttcagaatcttaatctcaaacaaattgtaatttaatcagacctactcgaaaaacacaactaaattgtgttgcttttattttttacatatgcagatttaaattaatgttgtatatttgtgaagtgaaatttccctccgtaaaatatgatgtgatttttttgaaaaattatcatacatatgtcagcctcatgtgccgtggtgtatttaggaccataatataacttttataatttaattaaagaaatataacatgatcacaaattggatatataatttcaaaataatttagaagatggtttaaaaaacatttattgagtattctatgtttttattatagatcttagtttaactatatatatttatattatatttgtgaagtaatatatttcatgtttatattgtggaaaataaccgtccatttttatatatctactagcaaaatgcccgtgcttcgctacgggtaaaggaacggttaaattatatgaagtacatcgttaacatgtatataataatgttccaatataggtaaattgttcattgcgctaatgataatcaagatggataaaaatattcatgtttagctcacatcgcgaaagaaaaaattaaattaaaaaatattaaattctaatttaatgaaatataatttttttgcaatattaattacactctttgaaattatagcaaaagtgctcgtgcattgcaaccggaagtgtatagaccagaaaattgaggaaaagttaagaaaaatctacactatgtaattaattaaaatacaaatttgctgaaatatttaatattttaagtaggtaggtgtaaaactaaattaatttacaagtaaagtaagtgtgagaaataaaatgacatggttaaatttaattttattaaattctccatgattagttatgctctttggaattttatttaaattttcagagcttaattgctaattttaataatacaaacatcatttaacaattatttaattggaaaaagaataaaaatcctcccttttaggtttgggcataatatgaaaaagtttatattacctccctttgcctatcatatgtatctggactattctttctccgttgaagttcattttacgtcctcatgcaatcacgcagtccgttcggcggccca

SEQ ID NO: 9395 - DNA, 26909 bp, Oryza sativa
cggctggcctttatgctgccgttgttgggcgtctacgtcttcaccgaccggccgcctcgtccgccgccgactggtgcttccgcctgcacggctggcctattatgccgccgttgttgggcgtctatgtcttcaccgaccgacttgccttcgccgccgccgactggtgtttccgcctgcacggctggtctattatgccgccgttgttgggcgtctacgtcttcaccgaccggcttgccttcgccgctgctgactagtgtttccgcctgcacggctggcctttatgccgccgttgttgggcgtctacgtcttcaccgaccggcttgccttcgccgccgccgactggtgtttccgcctgcacggctggcctattatgccgccgttgttgggcgtctacgtcttcaccgaccggcttgccttcgccgctgccgactggtgtttccgcctgcacggctggcctattatgccgccgttgttgggcgtctacgtcttcaccgaccggcttgccttcgccgctgccgactggtgtttccgcctgcacggctggcctttatgtcgccgttgttgggcgtctacgtcttcaccgaccggccgcctcgtccgccgccgactggtgcttccgcctgcacggctggcctattatgccaccgttgatgggcgtctgcgtcttcaccgaccggccgcctcatccgccgccgactggtgtcaccgcctacacggctggcctattatgccgctgttgttgggcacctacatcttcatcgctggtcgtctcgtctgctgctgactagtgcccttacctctacgtctggtttatacagctaccactactgatggacatcatcgtcttccgttgccgactggttatgccgccgccaactagtgcttttatcttcacaactgcgcgtcttcgctaccagtttgcttctgttgccgccgactcgtgttcacttcatcacggcaacacaactttgtcaacatggtggagcgacttcatctttattatcttcggtaccagcaaactctattgctgctacttcacaagttttgttacatcaccaaccatgacgttgttgtgaatctcgacatctcggcatgcgatgccgtgttattttactacaacaagtggctctccaacattcatgatttctacttggacatcttcaacacatatcttcaatcaagcaataactattcgacgacaagatgctacagttctcgactctatgttcagttgtttcccaactaatcaaagagtcgggggctacacaaatacaaggctcaaaatttgacaaattttatgtcaagctgaagaaatcaattcatcaacccacgagtcaactccagaagtcattatcttcatctttgcttcggagcagacattctacttcaacaacttcaaatatttcggtttagacgagttgggcaacaacatcaactctcctccaagtgaagcatctacaacagttataacattaatttgatggattattgtcactgacatcatcaccagcacctctgcttcatcgaccctgacatctctgctgttgctaatggatgattatgtttttgccgacttattatttcaccttcacggttgacctactatgcaaatgctgatgagcgtctttgtcattatcattggttgctacactgctgttggctggatcaccgacatcgtcatcttcatcatgtcggttgcgtttgtcgtcgtcaagtattttcttcatcttcatgattggtggatttcgtcatcgcctttgatttgcctcgtctgtcaccgactgattatttcgctgccatagctacacaactttattgctgagcgccttcatattcattgctggctgactgctgccgactggtttcttcgcctccacggctgtgcaacttcatcacttttgattggtatcactatcttcactaccaccaatatttttgccacctctgctgggcaatattatctctgtattggtcgtcttgtctctatgccagttgcgtcagctaccatcaatgaacaattgtgactacgtgctcaggggcttactagttcaaacacaagtatcataccttcaatttggacttgctctggatacatgcaatatgaattcatgatcatgggtctattttctatgtttaaagactggactatttattattccccataagggttacaaccgaatacttgcgccagtcgggattcaattattatatttattttggagtatcccataagggataatcattcagatcagaagctattcatatgagctacacttggtctatattacccggaagatttattactcgggagcatgttacatgcgtcatcctttaaagggtgtcgaaggcatattttttggcctaggcctaatatgtctgcagcccatattttcaggtgtggcctgtcacgttcttttagggacttaggcacttttcgcttaggccaaagtgcgcgtgatcaagtgcccaataccttaaaatccttttataccgcagttactcgactttttaggagttggtatagcgatagggttttgagttatcggctatatgtccaatgtagagtctaacactcgatgtaaataatgatataaaggcactgatcgatataaaggcaatgatatgatagaataagcactgatccgaaggttaaagcatacatcggctggaggtccgatgtcataaaatccacaattttagataaacagtgaaacctttgttgcgatcggctaagtccaacttatatgtatatgcaatccttacaagccaatgcaacgtccatataacttatcggctagcaccccgataaaacattagcatgaacctatcggcttaacaagacatatatattatcaacaacaatctagtagatcgaacctaaccgatgcagcatgacatcggatcccataagatataatagaaactctatcccctccaagtaagactttagaaatcactcgactcataggaatattttccataatttgtaacggattcctccaacgcatacggaaatcccgagctaattctttttctcttgaaatcacttgactcgatctccttttctttttctcttttggaatcccgagctaattcatttggaaatcgtcggattcgatgccgatttggtttgcttctctttccaaaaccctagagctttcctaatccaccggtgcctccatgggcttagctggcgccctccgccgctataaaaagcacccccctagttgtcctctacccatcccctcaagtcccgtccgccgacgagacccgtagcaccctagccgcgctagctcgtgcgccgccgtcgtcgaagggagtacggtcgtgccgtgccgccgctatagtctccaccatcgctcgaggttgccttcgtcgggttcgcaaggttgccgccgtccccatcccgcccttcgtttccgccgcagacagctagagtgccgccaccaccgtcgacccgaagaccaccgccgtctcgacctcgccgccattgtcgatcgtcaccgtccgtcgtcgttcgagccatcggtgagttggccacgtcacgctctacacgttgatgccctccgtttgcgccaccgcgccgtcgttcgccggctagcatgaggtgccgagccgacgccggtgatgacgtcatcgtaatgtcatttgtagaccgtggtagaccggaacgatctcggccgtccgatttggtcaagtttaggtcaattagatctcggccgtcggtttcgtggaccgcttctgtgaacccggtttagcatggaccgtccttgatgacgcagtaaatctcttttccttttcaaaagtaattctttattgtgtcataattcaattaaaatctttataaatgctttaactcgatttaaacttcaaaaattcgtaactaattcattgtaactcggtttaatgtggttcaagttgcaaaagttgtataaaatgaagatctatatattaaaattatccattatttgtgttaaattcatttaatcctttttaaataggcttcaattatattaaatcttgtaaaattcataactaattcgtacgaagtcggaatgaggccgttcaagtctcataatttatctaaaattatgatctacatgtttgtttactttactagcaaaagtgtccgtgcattgcactgggtgattatggagtgtgtatatcaaccaaaagtgttgtttggtttagcaaaagtgcccgtgcgtagcaatgggaagtgtacagatcagaaaaatatgcaattaattaaaatacaaattctctgaatatttgatatttttaagtaggtatgtatataattaaataaatttacaagtaaagcaattgtgagaaataaaatgacatggttaaatttaattttattaaattcttcatgattagttttgctctttgaaattttattggaattttcagagcttaattgctaactttaataatacaaacatcatttaacaattatttaattggaaatctaatttaagttcttgttgggccggccgacctacgtgcggccaatgaggcgtgcgcggcccagcattgatgcggcccgatgatggagaccggcccgacgcgggagtgatcaaagccgttcgttttgatggacggctcatatcggctcctaatctatcaaaaccctcaacccaaataaaccctaaccctaatttcattcttccccttcctcccctccacgcaggtcgcctttctccccgccgccggccgcgccacacccccaccggcgcacctctccgcgcccctccccaaccggcgacgcctctcaacgcccctcccccaccgccgacacctcttgcccccctccccaccggcggtggctttacctaccgagcagcggcgacggcacccttctcccccacaagcggacagcggcggcgcccttcctcccgcgagcggcgacgatggcggcagcggcgccctgccctcccacgagcggcagcggcggcacactccctcgcggcaggcggctgcggcgacgcggcgatggtgacgccgctccctccccccaccgccggctccttctctcctcgtcgggtggtggccgctgcaccactctctcggtagatccgccggtggtgtcgacggcggcggtagccgcgggtggaaccggatgtggtggtggcggtcgcgggccggcggcagctccctcctcccctctcgcctccctcttgcccctgatccggcggcgatggcggtgttggcggcgtcggcgggtgggtccgtggccgacggcgaggtggcgaggagcagtgcgctgcagcctccggtccggctcgcccctccctctcctcgtcatctcgtgttaatatgatgttttctaatgattccgatttagatttggactgggattttgtgtttgatttggatttggattgtgatgatttgagatttggagagaaggtgtgctcaatgtgggattctatttgtgtgatgatggaattccgactgggatttttgagggaggggagggacgaaaaatcaccgtacggatgtggtgacgaaaggaaaaatccgaatatttatattagttatagatatgtacttttcatttggtttttattagtcttttttctcgttttgcgtgttagcttgtcctttccgtcttttcggaggttcgcgagtgtgtcggaagtattccagaaaactaattgaagaccgattattgcaaggaaagtcacacagatcccaaacacaattcatttgagcatgttgatcctatatttaaattctctatttaattaaatcgtgcatttattttcgaatgtcaccgggtggtgtgaacctattcctttgttatggccaatttgcaatgattaccctatttcttgattacctcgggttataatttgactagtcggatttatatatcggttcaactagatgtattagatataattggttagccatgcttagaaacattagcacacaattgggataactaatgtttcactattacttaatgatggatatttaatgatagctcacgatggttaattgtgattggttaattaattaattcgctaactaaaacttgataatggtgggttgtgagcacgtggttttgatggtcgtgctcatgacaattaaggaccggttcacgagtttcggttgtgaaacattaaccgtgccaaccacaagccagcatgggtaacggctttaccttttgtatagcatggttcattgcggggcaccagactgagaagtggcggagataagcccacgggggtcgctggggagtccatgccttgttttataagggggtgattatgatccaggaacggtgcactgtgggggattgtgttatgcgaggggtactgtcacagctcctttccgaggtaccgtggtggtattaaggcgcatggtgacatgtcgtggggctatgtcttgtgggtacagtggtacatctttggccatagtaaaactattcgaatagccgtgcccgcggttatgggtgggtctaacaatgtatttcgtgattagtatcacacttctcaccataataaatgatgctataactggtaataatttgattagctcttggtttggaatggtacattcctagtttggagatagatctgtacagccgggtatggttgttcaggtttggttgggcctgtgcagcatgggtatgctgttcagtgttgattaatatcgatgattaattactttattgctttacaattctcaaatgtttgctaaatgctccttctgcaaatgagccctatattatgccattctttggtatccttgtgcacttgtgtacatgttgtgtggcttgcggagtattccatgtactcaccttggaataatcaatcaaacctcagttgaagacaagttacaaaggagaaaacatttgacttataccccagttgagctgtctgtgggagtggagctgaaacttcgctagattttatttttctgctacagttttcttcgtggtgaggactaggtacctcttatgtaagtatttattgctttagttcttatgatgaatttgtatattaaattgtcagtttgtatacctcggctgatttctggacaatgattttattcacaaattagttcggaaattactagtgattttctggtcgtgacagaccgccaccgcgccgcaagccgccgcgagccacggtcggtcgcgccccgtacggtgccgctgcacgctgccgcgggccgattgtgcccccgcacggcgccgtcgcaccgctcgccggccgcgcccccgcacggcgtcatcgcacgccgctcatgcgtgccgcgcccgcatagccgccgcgcagcgccgagccgtcccctgccgcgccatcaccgcacacgcacgcctggccgccacaccgcagctgcgctgcccgcacggccgcagcgtgccgccgcgtctcgccggcgtccgcgcctcgccccgcatgtccaccgcatgccgccggccgagccgtgctcgcgcaccgcccgtgccccgcatggacaccgctgccacgcatggctgccgaccgggcgcaccattcacgggaagaagaatagaaagagaagaaagatggaaagagattggcgattttgcaaaagggcccctgaattgtctgaaaattatgcgcatatctctcggcatggaaattccttgcgcgtagactctggaatttcagaaatttccattttcatccctccaccgcatggaaacttagtaaagggccccctgtacttgcatatttcgcctgcatttcttatttaagcattttgtttatgtcatataaatttttaatttgaatttcacgaggcattaattaatgttaattggtattttgaattttcattttcagtatttatatgaatacatgcaacttttgccccccttttatgaatatttgtatgaatttgtatgaactctagtatttctttattgaaaattgcatttactttgaattacctgcgtttctttgtataattagcatttcctttgcataagaaatattggaaaaatcatgaaatatttgtattcatatttgcaaccatgataatagcaagtaacacttgaatgctttgtcgtctttgtaacagaatgttagtaatcacgaacaaggagttcgctgaactggccccgtatgaccagaactacctgacctgggcatccaatgtccagattgtccttggggccaaaaagctcctcaagacatttgggatgggcacagtacaagaacctatgccgacacctgatgagaacgatcaggcgatgtacttcctgcgacaccacctttgtgccacactcaagaatgaacacatggcaacgaagggtctgctcactctttggaccacactaaaggagtggttcgagaagcggaaaaacaccaccttgccccaagcagagcaagagtgggcacacttgaggtttgccaactatataaaagcgttaccgaatacaactccgccttgcatcagatatgtatcaacctctccctgagtggcaaagtagtcacggacaaggagaagattgagaaaacgctctccaccttccacctcagcgctatgcatagcactcgtaaccacaggcggatgacatgcaagaagtatgatgagataatcaacatcacgcagatgtttgagtcccatgacaaggttctttgcaagaacttcatttcccatccatccaacaaaagtattgaccttaaggtcgatactagcagttacaagaatcacaagcccatctaaaagaagaggggcaagcaaggtgggaagaaagcacctaagaatatgcatgaaggaactccagatgcccaggtagcccaaaaagcacatgaaagcaagggcaaatcgaaggccaaggcatccacaaaggcacatttggttccaatcaacaacaccccagtagtagatgccatggcaaccctttccatcaccactccacttgacatccccgctcctgccatagtcgtagcgagcaaagaaaatgtcatataggagaagagtttgcaaagatggaggcttccccagactccgtcttagtccttgatacaataatgtcatataggagaagagtttgcaaagatggaggcttcgccagactccgtcttagtccttatacaattatcttatcttggttgcattatgaacttctttgaataatggatatttaacctctatgagagcataacatttattttgtgattcgccatgcatggctagactttatttccaatattatgttgcattttgctatatgataaagttttacttcttgccttgaagtagtgatgttttactttattcacatagacaatatgcatagcccaaggtgaagaggagcattgtggaacaaaagcaccacaaagtgtaatcttgagagacatgtgacaagttcagtctatgcaaagacgtgaactaccttcacaaccgcacgtaatgattgtaaaggttattgtttttcccgtagaaaagtgattacacctcaaatatcttgggaatggcaaactctcgcaccaaaggtcccttgtaggaattagaagatgagagaagcatactcatcacctaagcacgcgagatcaatgtcctcactaagaaatgtaggctaaagtagactatttcatagtcagtttttcttagaatttagtatcttgcaaatgaacatagcacaaacaatctcacatcatctgtcgtatcgcaacaatgagatatttgtcgcacgcactgccttagcgcctcgcgccagacttgcgccaggcactggcatgcatcatacagcatcatgacgcccactaaggcagctactagcaaccccgctgtactgggggactggacgaatcatgccgcgttagcacgcgccatgcaactcctaccatgcaccatagttgcaccggctgcatatctcgtggtcactctggtcgcgcatgccattgaacatcgaatgcgtgtcaaacgccaaccaccacatgaattccgacgtaccttaaaaggtatatcggaacaaattcgtgcataccacatgaattcgcatgcatatttagtcctttaatggatcatccaatgcatactgcgcttatgaaaaagctgtaattgtgtctaattgacactacgctcttgccaaatcgatcctgcaagatcacgcatgttggcatcagcacattaagaaaagcactaagtaccggacgtccacaagaataggactaaaaatgtccactgcaccattattgaaattcccgccacttcaatggactcttagctccaaaggcaatgaattatcaatatccagactattcaaaatgtgttgtccacttaaaagaatactagtgttgactcgacacatgtgcatatcccacaaccataaggtctccctccgaaaaaaattgaaagtttttaacagaggtatgaacgtagcttaaattccttgacaataagaaggattatttccagtcatttagggggacagaaataacccttaaatgataaatgtcaggaaaaatggtcaaagaaaggatggatgcacatttaatcaagcactagcaaatgcaaagtatgaaaagcacactttgtaattggataactgcctatcagttttgtgatttgcagagcatgactaagttgcattacctgaatataatgcaccggaggagggtgaaataccgaggaatgcaaaggtatacctcatattgtccagaggcctagagaagaataatgggacaagaactccggctccttaaatccctagagtaacaggagacgtctggtgaaaacggaacaaaaaggaactctcaagctcatagtcactaaaaataaccccagaatttgaagggagcgagttcaaagctggcaaatggtatggaaccccagaacaagcataccacatcttcctatcaaggaagaaaaccagcagttggagtgcacaccaacgtcggtaaaatgaaagagtcatgcccatatcaaagaatagaagcataagagaattgcatatccccatatatccatggatactcacataagtgtcacatacaaccaataagaattggtaatgagacctgctatgggcaatattctcttcatacagcaaatcattggcagttaacctggagttgaaaatcaactaaaagatcaaaccgcaaagctgacctatagttgacaatgaatggctagagaaattttggattgggcacccgcatacaagcattaaaaatccgaaaccaagttgatgatccgaatatcatcacataaagaaagaaagctcactctttccgaacgagtttgagataaaatagatagaaacctatgttgcttaggctcgtaaacatacaacacatgaagaagtgaaccatagtatatcagaatgtgaaaatacataggttccatgcatatagttcaccatttctagcaagtaacatggttcgaactttatccaaaccccaaatccattatcaagaagataatgatatgtgcgtcgcacaacactaatagactatacgaactatataagtcatggaaaatcatgcaagatttgaccattggagcatcactcgaactatcttttgaaaaggatacaagcaatgagttttgacggttcacacttaaaagagatgcaaaattcaaggggagaattttgccagtctattaacaaaagcttgaaactaaagaatttagtacccaaaaatcgattaagaaaatcgataaaagaatttgggtagattgtactctttttttttccttggataaattttcctgcagtttcttatcaaggtttttaatgaggcaatctgtgcgacatagatacgtatgccatgtactctttctccaatttttcccactgggtttttatggagttttgacgaggcatggacattacgcggtgagtgctcaagggggagtgttgagaaacttttgggcttggcccatgaaggcctagcctaaatacacttattggccccatcaccgaacctttcatatattagattgcactatataaagagaggagggggctactcattgtacaattgattggaggattgaatagtaaagagagtctcacccctaaaatttgtgtttccactttttgtagaattactggaccctcttgtactgctttgtgtagcatgagagttgcgtaataggacaaagtttatttccgattggttacttgcaagtctgtgaggaaatatagaaaccatcgcaaaatctcatgttctcaacatagttatgtagtgagtttttacttggaattgaagtttgacgatacgactcgaggaactaccgtggcatctcgacaagggtagagggatttgatagctttcgtgggagaaaagaacacaggaagaagaaaacggagttggcaagaggattcggttttctcttatcgcataaactcccaacaaccacagcttctcttataccatgcacacgcacactgatgccactgccagtccagcatggcacatcaaacacacactctcacggcccaaagacatggcccgactaaacatttaacaaggcccaatgtcatggcccagctgaacccataaactcacatataagtcaagtacttcatacaccaaaccgatacaggagtcatgacaattctcccccacttaagaatcggcttgtcttcaagccagtgcatctggaaaacgcttttgaagttgtcgcagatctttccaggtcgccaactacgctgacattcctctctagtgtaccagcccttgatggatcagcgacttgcctctcttgatcaaccgtcgttggagcacctcttcaggaagcacttctgttgttgcatcaatacaggggttaggaagtttaggactcaccactatacctgctttgaccgccttttcagaagtgatacatggaccattgcatgaatctggctattcgggggtaattcgaatttataagccattgctccaatcctgtctatcaccttataaggcccaaaaatacctgaaacttagcttatgacaagtgcgtcgagccacagacatctgcacatagggttgcaatttcaaataaaccatgtctcccacttcaaatttcatgttagttctgtgtttatttgcttgatgagtcattctttgctgtgcacgaagcaactggtgatgcagcatttcattgtacaaagttctgtcttgcaaccaagactgcacatctagtgcaatactctatcctaggtccaaggtccacttcaccaaaatgtgttggcttccttgcaaacaacacttcatagggagatttgcccaaagcagtatggaaagccgtgttataccaatgttgtgcctgggtaaccattgtgaccactttgttgggaaagcatgtactgcatatttaaggaaagcctctacacattgattcagcctctcagtttgtccatctgttaagagggtggtaagaagagctcatattcagctctcttccatttccccaaagtgaccctttcgtgggagagaagaagaacagaggaagaagaagacaaagttggcaggaggattcagttttctcttatcgcataaactcccaaccatgggttctcctcttataccacacacacgcacacggataccaccgctagtctagcacgacacatcaaacacatactctcacagcccaaagacatggcccaactaaacatttaacaaggcccaaagtaatggcccagctgaccccataaacccaaaccgaatttgctatatatttgtcgacaaattttcctccaaaaatttgacagatgtaattacagtataatcgtagtgtaattacactgtaacttgtatgtaattatactgtaactcgcatgtaacttgtatgtaactttcaaaaatctctccgtaacatgttatttcggtaaaatggaggtcgtgggaataaatcctttcacatgtgtgtgctgtgatttttttttcttcctcaccggaacaaatcttgtaatagatctaacgattcaaaattacatgaaacttacatacaagttacactgtagttacatgcaagttatagtgtaattacatacaagttacagtgtaattacaatacggttgtactacattctgtcaaatttttaggagaaaatttgtcgacaaatgtacaggtagtcccaacttatcagacaccacacccgtacaggagtcatgacatttgataagtagatggaacaagatagctagatttcagcacacatgctacagaaacacggaataagtaatttatcctacaagaataccgctaagataattttcagggatcgccaacggtctgcattctgaagatcagcagattagttgataatctactgaatcaactggtttctattcacagactcacagtgctagttgctgtggttgccacattttgttccttcttattctccagaaggacctgtgcttgtttcacttgagaaccgagaatgcttactggattcattgcgctctggtcgctgctagagaacatcatgaacgcttccagttcaaacatctctttggaagccttggacagagattccatcaagctctccagctctgctttggggtagtttccttcgagatttatcagtgatatgatcatcctactggcaatcttcagtattctcaggcaattggctgttggttcactgttttcttctaccaacttcttgagcttcccggcaaagctagatgcagaatctcctgttgcaattgcattagcaagttgagccaaatctgtatcattactgatcaatttttcaaatattgccgcactaagtgacagtaaagctgcatgtagtttcctgtccacgattttcttgttgtcgtccttttgctcattgacgttgccactatctttcgtagcaacggcaccttcgcctatttcaggatcttgtgtcacaaacttggttgcgtctgttcctttttctgtatgcttttctccttgcttcaatggaggagagggaagtatttctttgagcatctgcagtggtagaaattatgcttattaattagtaggtgatgataaagacccaaggtgcgcgtggttagttaaataagtatgaaacaaatgaaatgccttcatttgtttgaaattttatcacacaccgtacctttggcagcacatctttcatggcttccgtcagtttcttgagattgtcatcctcctttgtgtaacaaatgtatagatgcttgaggatttccgccgcacttattctgtatccgctcttggtgcgaacgtcgaggagcgttgtcttgagatcatcgacaacggtgtcactcgccttgaagatgatggcggcgttgctttcgctttggtcgacggaaagcattgccagtgcttcacctgccaattgtctcgtggaggcgtccttgttttctttagtgaagaagatgtcgaccagcagcttggtgattttctccttgctatcggctgtcgaagtcgaaggtgcttccatgggaagctgcgtgaggatcttgatggccaggacgtgtagcttctcgttgcattcgtcgcacccgaggatcttctcgacggtgttgatggcgcgcttgttggaacgcagcttgtcgccggccttcccagggagggcgacaaggcggaacaggagctgcagcgacgcggctacgatgtcggaccacgcgtcgtggccgatgttgtggaggaggtcggcggtgacgggcaccatggccttggagacgaggccctggttgctgccgatggcgctgcagttgtgctcgtcggcggcggcgagcttgtggaggatgtctcggcccagcaccatgagctccttgtagtgacccgacggggcactgtcgccgtcttgctgcttggtggtggtggtggtggtggtggtgtcgagcagcgacgagatgcaccggagcccttgcgggaagctggcgaggctgatctcgccggcgagttgcgccacgatcctggcggcgagcacccggacgtcccggtcgagcgggcttgtggagcgaagcgactgcagaagcctctccaagacctggctagccgacgcggagccgaccagcttcctgatcagcgcgtgctgcccctgcagctcctcctgcgcgaggatcttgtccaggatcctcgcaccggagacgtagtcggcggacgacgactcggacttcatcagctccacggcaaacgtcaccaggttcctctccttgacgaatgatggatccttctcgcaaccgatcttggtcttgcgcatgtaatccctcaccgactcgcgcccctcttcgtcttccttgtcgaacccgtagtcgtcggcgactactcgggccagccgtttcccggcgaagtaggaggctgactggtagcagaagagcacgccctggaagagcgccagtgagtagagcacattgagcgccggggtcaggttagcgccgccgtcctcgccgccgtagtcccgctctatgaggcgccacatggagaggccggtgctgacgagaaggccgaacaggtagagcaacgccagtgggagcagtatgatggcgatcaccagcgcctggaggagcaacacaagaatccccaccagtgcacgccagtactggtccgagtcgtcgtcgtcgtcctctttcctgaacaccatggctacagtaaccaagaggccatcgaacgatttccaagcgtaccgcagcttttcgttcaggaaaacatcgaacaccctgtaaatttagttagatagaggcgccgttagacctggacaagggagatacgacgaaatgggtcggagtgtactggaaatgtttctactttttaggaacttgaaacccataggaaaatgctcgatccgtcctaaaatatggctagattagatatgtagattcatagttgaagcaatagttatattcagtctagattcatagctgaagatagctatattttaagatagaggagtgtttgcaatttcggaacaagtagatacggtcaaaattttcaggataaaaaaatagctataagttaagggactgtctatataggatttgatggattttttccgataagttaagccccccaaaaaagaaccaaacactaatcccactacctcaattccgtctgtggcgcccaaaacactccttgcgacctgaactttccaagcaatggtgatgctacccttactagcggcgacgatgggtcaactactcctggagttggcggcgacggtgccaaaaaccctttctatggcttggactccctaggaggcggcgctcctcctgctagcagtatagttggctaaaagacccgttgcccgatggaccgggccacagcatggagatttagcccagcccaaccattgacgatgcctggtcctctttctcggcacaatgagttggcccggcccggcaagacccaataataagcaggcccaaagagatgagggaggtaaatagacatattccaaggacgagtacagtggactggtcgtgccttctggccgacatggcacggcacggcccaagtgttattgggttgtgcctgcattgaaggtgcagcccatagatgcgcacggcacgatatggctagttggtcctactctcgagccgtgccttggtcgtgcccaggctggaccgtaccgaatggcccatttagccatttataactggcggcgacaacagctcagctgctcctggagtcggtgactcagcgtcaggttcttgaggcagcagcagtcatgatttgctccttcatcctccatccttcctttttcactatcttgatatgtctctccgcctctatgggatttgtccctcagcacttcttctgttcttatagtagtgcgcacactgatttggggtcatggaagaagaagatcctgcatatgttggcagggggagacgcatggggtcatggtggtcctggatcgtcagccgcctgcacagctattgtaactgatttgggcaacaatgatggtagcggggtgggaggaaggggatcagcagcaacaactgttggaagaagaacggagagtgccagtcctaaatggatatgagatgtgtgcaatttatcaatttagcgtgatgtaactgctaaataattcagctgcaataagctcatttttttttctggaaatcatgcattatccgataagaaattaagatttgcgtggactaattattttatcccagaaatttccagaactttgaaattttgattgcattttgttttttgtaacaaaatttcatatttgaattcaaaatattcatacgaataatatccaaatttttgggttttttccgaccccccacgacaacaaaaaaacatttcaaaattgcataccctgcaagggagtacaaaagacgaccttaaaattgaaaactttagccaaagtatagttcagtgaattatacaaattgaatacatattatttattacggtacataataaacatcaaatattaatgctaaaagagtaaatgtcgtactcaagcaatcaattgacctcaaatctatctatctattatattatattattaaaataagaaggcatcatgttcgctgtgtaggctagaaattcctgaattaattgaaaaaaaaagaaaaaggatagtctatatagaaatacaattgagaaatcactgaaattcggaataaaaataagcaatattgcaaaagagttcatataagaacccaatacaaaattaatcgaaattcgaaataaaaaaataaaataaattctgaaattaggaaaagaacaggaagagttcaactagaaatacaatttagaaataattaaaattcggaatacaaaataaggaatattaaattaatagtttagctataacacagcacgagattaaataaattcagagtataaaataaaataaaatacgaaattaaaaaataataagagtctaggtaggaatacaattttgacgtaactgaaatttggaaataagaataaacaatattagaagaatagtacaaataagaatccactacgagattaattaaaattcgaaataaaaaataaaataaaataaattccaaaattaaagaataaaaaggagagttcaaataggaatgcaatttaagaaaaactaaaattggaaataaaaaaaggaatatttttttttgacgtgataaaaaggaatatagaacacaatatgagattaaaataaaataaatttataaattagaaaagtaaaaataactaagattcgtaataacaaataaagaagatatcatagaacacacgatgagattaattaaaataaaaaataaaataaattctaaaaatagagagttcgaataaatgagtagagtggtggtggttgataggacactaaaagatataaacaaaacccaaatagaatgtcactgatgattaagtggagggacgatgggtagaccattaagcatcacggtcacgatggcgggacttatagaaagtaaaaaatataccctaacgataatcatattttatttttaaaatctcatgataaaaaagaggggaggcagcgggtggtccatagaggagtacggtggcaaagccgctgacagtttgataggacttctagaaagtaaaaaatgacctaaatgataattatgtttgtcttttaaaatatcaatcgcaataaagagataagtcggtgggctggtcataaaggagtaaagtggtggcatttgacgagacttctaaaaattataaaacaaaacccaactagacaatgaactctaaaaactacaatgtctaatttttaaacgttccaagaagaatgaatataagcagtcatagatcgcatgcaaataaaggagtgataaaggagtaaggggtagcgactggtgtgacttttaaaaaataaaaaaaattagaaacacgtgaactatttaacaaaatttaagaaaaaatcatatgtaaaaagtagataattttgtatgggtgctagccacgcaattgcgcgggtcacccagtagttctattgaaaagcatcatccttttagtattgggttgaaatgaaatcttcctattggggcaagatgggctttgctttactctagaacttagtggattagaaattatggccccgtgtagtcaggcacctcgcaaatgctacaatattgctagcaaattcctttgcactctatctttccttccaaatgaacatgaacagtactagaaattcctgaagaatgatcttatgaaaatctttgttccgaaagtgtgttttgttagccccttttcagagaaagaaaaattatcattgggagcaataaatggtcagaaaagaaaagaaaaaagtgacgaataggaaatacaacaaatgtatagtagaattaagaagtctaacccagctgtctggacaagggtgataatggtgagactccaaaaatccttcttctcaagcatggagacgaagccaccaaggaggacgacggtggtccataaacctactaggaagcccatccccttgacggccattgacaggtaccccataaacagagcataactgttgataccgtcaacttccttccactcggactgatcaggttcattagccattgtcagttcttcctcaagaaagttgggatcatcgtttgcaaagcagcaagccaatatatatacaagctcctcgagcatatgggatgattaactatcaatacgtagaccaatagccgattaatgaaaaatgttcagatcttgactttacctgcacgaagcgatcgaggtcattgtaaagtatatattgttcatccagcctgttcagttttggaccaagcaattagctaggtctttattatatttatgtattagtagatcaatataaaagacctacaaataaattaaagctagtggcctcacaagttacaatacaatattatgcttctcactgtttgtgtacccacactctagctagattactaatgctgggattattattgtttcttgaatgccgggaaccagacgtaattgatgcacatatgtaacacatggtggactggtcgaggagcgttacatatgtaacaggagctgacaacgatccgctaaactcgcaagagtaaactctagaaaacatcatgaagccttccagttaaaactgtttacaactaaatttgacacctagattcgaattatgaacattgccaaaatttgaaaggcgccgagtttccttcacggggccggtccgaccaccgcctatgggagtccaaaccgattttcatcgggtctcgggtttccttacttggaaaggtatttttcgagtttccattggtttccaccccaaattaaacgtggagaagaacatgtagaagacaagaccaactcctttataatagccaaggtcggttcgacctccctcccccccaaatctcaatccatacataatcgaatcgtttttttacttctacttttagccattttttctactttaccttagttttgtccatctttgtcggtttgcgccgtaaaccgtccgccttcactacgagagtgcgattatctctttgtagatttgtcttataaccttccgttcgcccacgagacgggtggttatcttcaaatcaatctaaatcggccccgaggctaatttgatctctaaatcgcctccactagccggtttaatcttcaaagcccatcttgatttagaattctctagatcgaggtggttggtgactccattaacaccacaaatctttaaatgagtcatggttgggaccgaaaagggtgccaacatgaattggcgactctgctggggaacgtcaagaattttggccataccacggccagaaacaatctactatatttgttgcttacgcatataaattgatcgctcagttgattggatcagatcggcgacatcattctcttaccgccgcgccggtctgaaccagtctaaccgacgttgtaggcccggtctgaccggtgaggtgaccggtctaaccggcagaaagcaccaagataagcagcagcaacattgtttccttttattgctgcacactgttactgagaagaaataggaacagagcggccgattttatttaacatcggttaatttttggtatatttgctacagtaccaaataccctgttacgatcaatcaacaaggctaagtttgataaaattggtccaaatacagtagcataccaagaaaactatagaccgtatattaatctatttggtcaaaatatttcagctataattaatatgatcgaaattcatccacaaacatcttcatcaaccatgacgagtgggaaggagatcgacaagctcaccaaggaggactggaccaaggaggagtggcgagactttgaaaaccaaatggcggcgtgtgagaagacgatgctcgcaagcttcctcaagaccgaccaaggcgtcttcaaaagagacgtgacgtcccgctaccttgttaggagctctattgggccgcatgcagtatggaccatgcattctccagagcaagcccaggctagcccaagcgactgggaacaaaaggatggctgctgctcctacaacaaacattgaacagatcaaacaggcatcggcggcttcagccacggcggcaacggcgtcaaggttctaggctagaacctcgacgatctatcttctctaccgatctcttcctacctccagcttccactgctagttctagaagcttccaaaacttgtattccatagtttcttcttctcttttccccctaaaacaattgttgcttgtatggtggatccttgctattgaattggaagaagtgggttcctaacaatctagtatcagagccgctcggttcgtgggatttctcgtcatgcaggtgttgggaaggcagcagtgcaaggtggaggaagatttgggcaagtgaggtgctcatgaatctagcgcacacaacctgttcgatagaataccaaaccaacataaggtgtttaaggacgatgaaaggatatcagagcccgtttccatcaaatccaccatgaacaaggagggaatatccatggacgaatctttagatcagaatcttgggaagcttgagttgatggaggccaagtgcatgcaagaggagaagttcaatcaaatactacagaagttggaggagatagaggcttgtaggagcaaggctaccgaggtgacgattgctgccatcaggacaaccaccgccatcctcaaggcttcatcatctccaacacccatggcaccacctcctccaacaccgaccaagtgtttgacaaaatgccccaacaacaacttcacttgggtgatggcgaattcaagtcacattggtgaggtgcttgctccaacggctgcctgggagctaggagacaacaaggacaagggccacgccccctgcatcgtcaccaacgactcacccaaggtcacgcccgccaagtgctcgaattgttctagccctgacatcatgctagacctcaccgtggctgtgggggtttcatgtgccactacttctatggcctccatggagttgttggttggcgaggatgaaaccagtgtcatctacattgacaaccctcattgttccatagcgacgcatgccaagtgttcgactttgggcctcgatgtcaatggtagcgccaaccaacctgtggtcgtgttccctaccattacagctatgaatgggcatagcatcattccaactctgcctctgaccattatgaatacgtcagtcatccttgttgtcaaatcaagttgtgctagcgacaattctatcagacttatgactctatgttagccactaatggagtatgctgagaggaatccatggccacctcctccttcgaacaagctaacgggtagcatatgtgagctatggccagaaccatggtcatcgtttgcgtgtaatcgatgcaaagtgtggtacttgttccgattggagagcacactattactgtacgtgaatggagttgagcagtttctaaaggaattgccatgctggccaccgcctcaagaagatgtgattaaatctgagttttatcatggagggaatcaattttggttgaggaattcagcttgtgttatttttttttagataatggattcagttgtgttattgcagagacaaaaatgatatacgtagctactgttgtgaggttcagtttgtgctatatgcagatgggtgctatgaaaccttcaagtgttatacaatggttaaatttcccctactgcacatatgacggattcaagcggaagcttcgaggcttgttcacaaatggagccttgtgcatacattcaagtcagtatgatcctccagatgggctttgtgaataatccggttgctatttagtagaactagaaagaaagcccgcgcaaatgcgcgggcatcttattgattgttttataaaaataatgcttaaagaagttacatctcactatttctatttaaatgttataaaataataagaatatatctcagattaaaaatacactttgatcgagtgacatataaattctcctattgtcaccattacttactatgctttaaaacctaataagtaattaatacactaaattatcctctatttaggtttcatatctcattttttttctaaatccatttataaatattataaaaataccaccacttctattcattaatggagtagcaccattaaagttaaacacgaatactactctagtgggtgaagtcgattgtagccaccaagactttctttctctattgccttgaaacatgagtcccgcatcgatgtagccatgctcctgaagaccagcttggagcataattttaatgtatgattcattatcacatgctcatggagtattatattggtaagtagaaagttgagtactattagcgatggtggcctccactggaactgtaacttagtcatatattccattttatacttacgacaccataataaactttgttgtctaagtttagtgtcctttagggaagaacaaagagaagatggaggtgaccaaagtagttttttaaaaatgttttgagtagatttgtggtgcagtgtaaacacaatttctttatggtgttgatcattactactcattttttttatgaaaagatagaatactctcttttgaaaatggccgagtttaataattcgatgatgttttttaaaaaatatagctaatgagacatatcaccacgatagtatccagatcatcatgttattatctatgttttgacaaatatgtatagtcaaatagttctaaaaatataaaaatactttcagaatcttaatctcaaacaaattgtaatttaatcagacctactcgaaaaacacaactaaattgtgttgcttttattttttacatatgcagatttaaattaatgttgtatatttgtgaagtgaaatttccctccgtaaaatatgatgtgatttttttgaaaaattatcatacatatgtcagcctcatgtgccgtggtgtatttaggaccataatataacttttataatttaattaaagaaatataacatgatcacaaattggatatataatttcaaaataatttagaagatggtttaaaaaacatttattgagtattctatgtttttattatagatcttagtttaactatatatatttatattatatttgtgaagtaatatatttcatgtttatattgtggaaaataaccgtccatttttatatatctactagcaaaatgcccgtgcttcgctacgggtaaaggaacggttaaattatatgaagtacatcgttaacatgtatataataatgttccaatataggtaaattgttcattgcgctaatgataatcaagatggataaaaatattcatgtttagctcacatcgcgaaagaaaaaattaaattaaaaaatattaaattctaatttaatgaaatataatttttttgcaatattaattacactctttgaaattatagcaaaagtgctcgtgcattgcaaccggaagtgtatagaccagaaaattgaggaaaagttaagaaaaatctacactatgtaattaattaaaatacaaatttgctgaaatatttaatattttaagtaggtaggtgtaaaactaaattaatttacaagtaaagtaagtgtgagaaataaaatgacatggttaaatttaattttattaaattctccatgattagttatgctctttggaattttatttaaattttcagagcttaattgctaattttaataatacaaacatcatttaacaattatttaattggaaaaagaataaaaatcctcccttttaggtttgggcataatatgaaaaagtttatattacctcccttttgcctatcatatgtatctggactattctttctccgttgaagttcattttacgtcctcatgcaatcacgcagtccgttcggcggcccagtaatgtggtggcccaataggccgacggcccgatgcgggagcagctagagccgtccgatcaaatgaacggtctagattgatcctaacctaaataaatacccaaaacctaaccctagaatacattcccccctccccacccccccggaaacccaaccgaggggtgcaccacccttcccccgcgagcggcggcgtcagcggcggtggcacactatccccgcgagcggcggcggcgcggtgccctcccctcgcgaacggcggcgtcggcggcagtggcgccctccccccgcgagcagcggcgtcggcgacggctcccccaccgagcatcggcggcgcggcgccctctccccagcgagcggcggcggcgccctcccacccccctcactctctccacttctcctcctttctctctgtgtggcggcggcgggagggccggcgacgccctcccctccgctagatcgagggggaggagaggtgcggcggcgggtcggacggcgtggaggcggccggccggacctcgcctccgccacatccggcggcgctgcggctaggacggcgtggaggcggcgggccgggcctcgcctcctccagatccggtggcatggaggcggctgcggcccggcggggcgtgaggggcggcggcccggacagcgtggaggcgggcgatggtggcgccgat

SEQ ID NO: 9396 - DNA, 6443 bp, Oryza sativa
tggcctttatactgccgttgttgggcgtctacgtcttcaccgaccggcttgccttcgccgccgccgactggtgtttccgcctgcacgctggcctattatgccgccgttgttgggcgtctacgtcttcaccgaccggcttgccttcgccgctgccgactggtgtttccgcctgcacggctggcctttatgccgccgttgttgggtgtctacgtcttcaccgaccggccgcctcgtccgccgccgactggtgcttccgcctgcacggctggcctattatgccgccgttgttgggcgtctatgtcttcaccgaccggcttgccttcgccgctgccgactggtgtttccgcctgcacggctggcctttatgccgccgttgttgggcgtctacgtcttcaccgaccggccgcctcgtccgccgccgactggtgtttccgcctgcacggctggcctattatgccgccgttgttgggcgtctatgtcttcaccgaccggcttgccttcgccgccgccgactggtgtttccgcctgcacggctggcctattatgccgccgttgttgggcgtctacgtcttcaccgaccggcttgccttcgccgctgccgactggtgtttccgcctgcacggctggcctattatgccgccgttgttgggcgtctacgtcttcaccgaccggcttgccttcgccgctgccgactggtgtttccgcctgcacggctggcctttatgtcgccgttgttgggcgtctacgtcttcaccgaccggccgcctcgtccgccgccgactggtgcttccgcctgcacggctggcctattatgccaccgttgatgggcgtctgcgtcttcaccgaccggccgcctcatccgccgccgactggtgtcaccgcctacacggctggcctattatgccgctgttgttgggcacctacatcttcatcgccggtcgtctcgtctgctgctgactagtgcgcttacctctacgtctggttatacagctaccactactgatggacatcatcgtcttccgtcgccgactggttatgccgccgccgactggtgcttttatcttcacaactgcgcgtcttcaccaccggatttctacttggacatcttcaacacatatcttcaatcaagcaatgactattcgatgacaagaagctacagttctcgactctatgtttagttgtttcccaactaatcaaagagtcgggggctacacaaatacaaggctcaaaatttgacaaattttatgtcaagctgaagaaatcaattcatcaacccacgagtcaactccaggagtcattatcttcatctttgcttcggagcagacattctacttcaacaacttcaaatatttcggtttggacgagttagacaacaacatcaactctcctccaagtgaagcatctacaatagccataacattaatttgatggattattgtcactgacatcatcaccagcacctctgcttcatcggccctgacatctccgctgttgctaatggatgattatgttttcgccgacttattatttcaccttgacggttgacctactatgcaaatgctgatgagcgtcttcgtcattatcattggttgcgacactgctattgactggatcaccgacatcgtcatcttcatcatgtcagttgcatttgtcgtcgccaactattttcttcatctccatgattggtggattttgtcatcgcctttgatttgcctcgtctgtcaccgactgattatttcgctgccatggctacacaactttatcgctgggcgctttcatcttcattgatggctgacctgactactgccgactggtttcttcgcctccacggctgtgcaacttcatcacttttgattggtatcattatcttcactaccaccaatatttttgccacctctggtgggcaatattatctctatgttggtcgtcttgtctttatgccaactgcgtcagctaccatcaatggacaattttgactatgacaaaaggacaagctatatgctcaggggctcatcaactcaagcgtgaggattatatctccaatttggacttgttccagatacattccacatggattcatagtcatgagtctattttctatgctcaaagactggaccaattattattccccgtaagggctatcaaccgaatacttgcgccagtcgggattcaattattatatttattttggagtatcccataagggataatcattcagatcagaagctattcatatgagctacacttggtctatattacccggaagatttattactcgggagcatgttacatgcgtcatcctttaaagggtgtcgaaggcatattttttggcctaggcctaatatgtctgcagcccatattttcaggtgtggcctgtcacgttcttttagggacttaggcactttttgcttaggccaaagtgcgcgtgatcaagtgcccaataccttaaaatccttttataccgcagttactcaactttttaggagttggtacaatgcatcttaaaaggtgtcaaacagtaaagctttatatagctgccccgctgactttttaatatagtcatggtgctgtttgggtttttaagcaattgattggatacaatatcgttgctttttgccacgtaagtgtgcatttttattgaccaatattatggcttaggctgattatatattgtggtcatttttcaggcggttggtaaatcctttatgagtttatttacacggattttataccacatatgccatatattttcaggtgtggtggaaccatgtgtcttttagggacttaagcacatctgttaaagcagtgtgcgcatggcgtatgcccaatactttggaaatttctttattcacaacatacaagcttctttatagctattttgctatgtgaattttcaatgatgtagccaactttaggttacactcatcatattttacaaagcagtcggtatatcacttggatcatattattcgaggattcacaccgcatatgctatatattggtatcaagtcacttggttgactacgattatcaaaaccactcgtcggtgcacctgactttattttccagccctccacagtcttcagatttggtaaaagtactcgggagaccatgacaaagatgattgaagcactcggctttggagtaatctggttcgagagaagattatcttttcgactgcgaaggtctcaggggctactgtggatattatgggtaccccatacccatacggcatggttatccgactagtcataggggataacttatatctatggaatatgtaatagatcatgactcgggtattacgtttccttatatattacggaacagcctaaagtcctggtttgataatattgtaaagtagatttaggaaaccgataccgtattggttaaggtttctatcttgtaatcctgccccccaccctatataaggtgggcaggaggccctctagggggcatgagacaacctgatcgtcagatcaatacacactcggtggattcaaatccccaaacaggagtagggtattacctctctttggagtagggtattacctctctttgagagggcctgaacctgtctaaatcttttgtctctgctgtttagatatcttgtcagttgcaggatcaaactgactggcacgcacgcttctcaacaaactttggacctgcactaaagctaagcagatctcccaggccaggcccgtgtgtgtaacaaactttggacctgcactaaagctaagcacgcccgcttctcaacaaactttggacctgcactaaagctaagtagattctcaacaaactttggacctgcactaaagctaagcagatctcccaggccaggcccgtgcgtgtaacaaactttggacctgcactaaagctaagcacgcccgcttctcaacaaactttggacctgcactaaagctaagtagatctcccaggccaggcccgtgcgtgtttttcgcatcaacatgtgacagcccagcccagggtccagaaacggcattggtcccatctcatttagttagaccacacctaacactgcaactcactgggtttttcgtcctcgctttaacgcaaaaattccagaatcggagttgtagtgactgggctgctcatccttataagctgctccctctcttctcaaattggcgaggtgggaactaaagctagctagctgtgacttgcttgctcgctagctgatgctgctgcacttgggccaaaggcccagctactgcttgggctgccggcctgctgctgctagctagcctttttttgtttcttttttcttttttcttttttttagggtgttacacaacaccatcatcaatcccatttaaattggactagggctattacctgataaggggcctgcaccagtataatccttgtcttctgtttcccaattctctaatcatctagtctacaagtatcactcgtcgataatttgattcatttttaaatatatacttttatgtatatatatagttttatggagagccgagggtggagaatagacacagtatgtggtctcttatcaactcaattagacaattctctaatctgccgtggctcgttttgggggacttcaacgaggccttgtggcagtttgaacacttttcagtgagacaaaggaatgaaacacaaatgcaatcctttcgggatgttctgcaaacgtgtgatttacatgccttgggtttttccggagtgccctatacatatgacaacagaagagagggaaggaacaacatcagagttcgtctggacagggctcttgcagataatgactggagggagatgtttggtaatgccagggtgtctcacttaacttcgactcggtcagatcattgcccaatatctgtttgtttctctcctgaggattgtcggccgtttcacacaaaatgtttgcattatgaaatatgctgggaaagggaaccatccctacaggaggtaatcactgatgcctggtcagagggtgtttcaaagtcagatctcggtgaaattagtactgccctccatagagtgatgacaaggttgcattcctggagtaaggtgaaggtcaagaatgttgggaaggaactagagaaagcaaggaagaggcttacttctctccttgtttctgatgcagagagcagtctggttcgtcaggcattggatcatttaaatgaacttctctatcgtgaagaaatgttatggctgcaaagatcacgtatcaactggctaaaggagggagaccgtaacacacgtttctttcacagcaaaggagtatggagagcgaaaaagaacaaaatttctgcactccgggatgccagtggcactgttcaccatttgacaaatgtgatggagcaaatggcaacagactattttaaaaccctgttttctgccgacccaaatttggaccactctagagttacaaccttaatccaagagaaggttacggctgagatgaatgaagctctttgcaaggctttctctgatgaagagatatcccatgccgttttctagattgggccgcttaaggcgcccgggccagatggatttccagcacgtttcttccagcggaattggggtcttttaaaggaggaggtagtgaaggcggtgaaggaatttttcaatacgggggtgatgcctgcgggtgtaaatgaaactgctattgttctcatcccgaaagttgatcagccaatagagctgcgggattataggcccatcagtctgtgcaacgtactgtataaagtggtctctaaatgtttggttaacagacttcgaccgattttagatgaacttatctccccaaatcaaagtgctttcgtccctgggagaatgattacagataatgcgctcattgcctttgagtgctttcattcaattcaaaagaataagaagttgtcatcagctacttgtgcttataaattggatctgtcaaaagcctatgatagggtcgattggaagtttttggagcaatcaatgtacaagctgggtttcgctcattgttgggttaattggataatgtcgtgtataacctcggtgagatattcggttaaatttaatgggaccctgcttagcacatttgctccttcaaggggtttgcgccaaggtgaccccttatctcccttcctcttcctatttgtggtagacggactttcgctgttgcttgaggagagggtagcccaaggagccttgtccccggttcacatctgtcgtcgggctcctggtatatccaacctgctcttcactgatgatacccttctctttttcaaagcaactagtgagcaagcaaatgtagtgatgaatgttctagcagactatgcctggtgcactggtcaactgattaaccaggagaaatgctctattatgtttggtgaagcttctcctcccgatgtccaggaatctgttagaagtgttctgcaagtggggagcaccagctttgatgacaagtatctgggttt

SEQ ID NO: 9397 - DNA, 4427 bp, Oryza sativa
tggtgcctccgcctacacggctggcctattatgccgccgctgttgggcgtatattacttcaccgccggcctgcctccgttgccgctgagtggtgcctccgcgtacacggctggccttttatgccgccgctgttgggagtatatgacttcaccgccggcctccgtcgccgccgactggtgcctccgcctacacggctggcctattatgccgccgctgttgggcgtctacgacttcaccgccggcctgcctccgttgccgccgactggtgcctccgcctacacggctggcctattatgccgccgctgttgggcgtctacgacttcaccgccggcctgcctccgtcgccgccgagtggtgcctccgcctacacggctggcctattatgccgccgctgttgggcgtctacgacttcaccgccggcctgcctccgttgccgccgagtggtgcctccgcctacacggctggcctattatgccgccgctgttgggcgtctacgacttcatcgccggcctgcctccgtcgccgccgactggtgtcctcgcctatacggttggttggtcacaccaccgttcatgggcgtccacgtcttcgccgaccggctggcctctgccgccactgactggtgtttttgcctatacggttggcggactccgccgctgttaatgggcttcatcatctacaccactggcttggttccactggcgccgactggtgttttttgtcaccattgatggactgctttattcccacatcggctacttctgctgtcatcgagggaatacgacaaagctaagtcatcatttattttattctttatatgatattttgtcttttcctttgcctcactacatcaactggttcgccgttgactagtgagtcgggggctatagatgttatatcgtattttttaaacaattttcataatatttatcttgattgcttgcgacacaatctgagtacaaaagtacctatcgagttatggagttctatcttcctatgctttccgtttggtttgccaatggatggttgcctttgggccgattcctagcacccgggggctcgttggatggaccgagtaacgcaaggtgctaagtattattcggaataaatcaaaagcatagagataagataatttattttctgctcttaataattgcaaaagtacccgagtagtaaattctgattcgtgaaactttgttccattaatggcgaactcatgtcactcatatgcatgtctgggaagtgcctaggccgactcccggtgcttgggggctatgactagtcggacagagcgtttaaacgtaatgaatcatctgctcggggaaatcaaaattgacaagaggagaaatacatatttataaatattttaaaatacttgattttttctcgagtattatatttatatcagatactactcatcctatatgtttgttctgcaggatccagatccagatatgcataaaagggattcatggctttaagcttatctcttacgctccaggaatggatcagtcagaacatcaccaccggctcgcctcgaccgccgccgactggtgtttccgcctgcacggctggcctattatgccgccgttgttgggcgtctacgtcttcaccaaccggcttgccttcgccgccgccgactggtgtttccgcctgcacggctggcctttatgccgccgttgttgggcgtctacgtcttcaccgaccggccgcctcgtccgccgccgactggtgcttccgcctgcacggctggcctttatgccgccgttgttgggcgtctatgtcttcaccgaccggccgccttcgccgccgccgactggtgtttccgcctgcacggctggcctttatgccgccgttgttgggcgtctacgtcttcaccgaccggcttgccttcgccgctgccgactggtgtttccacctgcacggctggcctttatgccgccgttgttgggcgtctacgtcttcaccgaccggccgccttcgccgctgccgactggtgcttccgcctgcacggctggcctttatgccaccgttgttgggcgtctacgtcttcaccgaccggccgccttcgccgccgccgactggtgtttccgcctgcacggctggcctattatgccgccgttgttgggcgtctacgtcttcaccgaccggcttgccttcgccgctgccgactggtgtttccgcctgcacggctggcctattatgccgccgttgttgggcgtctacgtcttcaccgaccggcttgccttcgccgctgccgactggtgtttccgcctgcacggctggcctttatgtcgccgttgttgggcgtctacgtcttcaccgaccggccgcctcgtccgccgccgactggtgcttccgcctgcacggctggcctattatgccaccgttgatgggcgtctgcgtcttcaccgaccggccgcctcatccgccgccgactggtgtcaccgcctacacggctggcctattatgccgctgttgttgggcacctacatcttcatcgccggtcgtctcgtctgctgctgactagtgcgcttacctctacgtctggttatacagctaccactactgatggacatcatcgtcttccgtcgccgactggttatgccgccgccgactggtgcttttatcttcacaactgcgcgtcttcaccaccggatttctacttggacatcttcaacacatatcttcaatcaagcaatgactattcgatgacaagaagctacagttctcgactctatgtttagttgtttcccaactaatcaaagagtcgggggctacacaaatacaaggctcaaaatttgacaaattttatgtcaagctgaagaaatcaattcatcaacccacgagtcaactccaggagtcattatcttcatctttgcttcggagcagacattctacttcaacaacttcaaatatttcggtttggacgagttagacaacaacatcaactctcctccaagtgaagcatctacaatagccataacattaatttgatggattattgtcactgacatcatcaccagcacctctgcttcatcggccctgacatctccgctgttgctaatggatgattatgttttcgccgacttattatttcaccttgacggttgacctactatgcaaatgctgatgagcgtcttcgtcattatcattggttgcgacactgctattgactggatcaccgacatcgtcatcttcatcatgtcagttgcatttgtcgtcgccaactattttcttcatctccatgattggtggattttgtcatcgcctttgatttgcctcgtctgtcaccgactgattatttcgctgccatggctacacaactttatcgctgggcgctttcatcttcattgatggctgacctgactactgccgactggtttcttcgcctccacggctgtgcaacttcatcacttttgattggtatcattatcttcactaccaccaatatttttgccacctctggtgggcaatattatctctatgttggtcgtcttgtctttatgccaactgcgtcagctaccatcaatggacaattttgactatgacaaaaggacaagctatatgctcaggggctcatcaactcaagcgtgaggattatatctccaatttggacttgttccagatacattccacatggattcatagtcatgagtctattttctatgctcaaagactggaccaattattattccccgtaagggctatcaaccgaatacttgcgccagtcgggattcaattattatatttattttggagtatcccataagggataatcattcagatcagaagctattcatatgagctacacttggtctatattacccggaagatttattactcgggagcatgttacatgcgtcatcctttaaagggtgtcgaaggcatattttttggcctaggcctaatatgtctgcagcccatattttcaggtgtggcctgtcacgttcttttagggacttaggcactttttgcttaggccaaagtgcgcgtgatcaagtgcccaataccttaaaatccttttataccgcagttactcaactttttaggagttggtacaatgcatcttaaaaggtgtcaaacagtaaagctttatatagctgccccgctgactttttaatatagtcatggtgctgtttgggtttttaagcaattgattggatacaatatcgttgctttttgccacgtaagtgtgcatttttattgaccaatattatggcttaggctgattatatattgtggtcatttttcaggcggttggtaaatcctttatgagtttatttacacggattttataccacatatgccatatattttcaggtgtggtggaaccatgtgtcttttagggacttaagcacatctgttaaagcagtgtgcgcatggcgtatgcccaatactttggaaatttctttattcacaacata

SEQ ID NO: 9398 - DNA, 954 bp, Oryza sativa
tggtgtttccgcctgcacggttggcttttatgccgccgttgttgggagtatatgtcttcaccgaccggccgcctcgtccgccgcagactggtgcttccgcctgcacggctggcctttatgcccgccgttgttgggcgtctacgtcttcaccgaccggcttgccttcgccgctgccgactggtgtttccgcctgcacggctggcctttatgccgccgttgttgggcgtctacgtcttcaccgaccggccgcctcgtccgccgccgactggtgcttccgcctgcacggctggcctttatgccaccgttgttgggcgtctacgtcttcaccgaccggccgccttcgccgccgccgactggtgtttccgcctgcacggctggcctttatgccgccgttgttgggcgtctacgtcttcaccgaccggcttgccttcgccgctgccgactggtgtttccgcctgcacggctggcctttatgccgccgttgttgggcgtctacgtcttcaccgaccggcttgccttcgccgctgccgactggtgtttccgcctgcacggctggcctttatgccgccgttgttgggcgtctacgtcttcaccgaccggccgccttcgccgccgccgactggtgtttccgcctgcacggctggcctattatgccgccgttgttgggcgtctacgtcttcaccgaccggcttgccttcgccgctgccgactggtgtttccgcctgcacggctggcctttatgccgccgttgttgggtgtctatgtcttcaccgaccgacttgccttcgccgccgccgactggtgcttccgcctgcacggctggcctattatgccgccgttgttgggcgtctatgtcttcaccgaccggcttgccttcgccgctgcctactagtgtttccgcctgcacggctggcctttatgctgccgttgttgggcgtctacgtcttcaccgac

SEQ ID NO: 9399 - DNA, 43139 bp, Oryza sativa
tcggcggcaacgaaggcaggccggcggtgaagtcgtagacgcccaacagcggcggcataataggccagccgtgtaggcggaggcaccagtcggcggcgacggaggcaggccggcggtgaagtcgtagacgcccaacagcggcggcataataggccagccgtgtaggcggaggcaccagtcggcggcgacggaggcaggccggcggtgaagtcgtagacgcccaacagcggcggcataataggccagccgtgtaggcggaggcaccactcggcggcgacggaggcaagccggcggtgaagtcgtagacgcccaacagcggcggtaggggttcgccgagtttcctgtcaacaagtgtgatggaatcaatttcatgattcgtcggcttcgtcttcgattcgtgagttttcacttcctcgctgccgacgacttcaacaatctctctttctccgacttgggttttaaccagtcgagagaacggcgatcaaagatctgtgtcatcaagttggaagcttcaaaccgtcatcgtcaccgataccacggctggctagttgcataagacagctgattggatcaatctcggactcggctgactcaacatggaaaatcaaaaacacggagcagtacatacaagcagcaattttcacttggtcagctcgagtattttttaatgaagacgtatggctgcgggcacacgcgagctatatcaatgctcaaacttatccagcaattactggtcatcgcatgcgtttgtacgtgcctggaacaactatgtacctgtatgcataaacacataccaacagaagatctgcacatgcatatgatttttgctacgagagtctgggccatatatgtcgccgacgactttgtcaagtttctcttcaactcggactggaacacgacagacaacctttaatctaggatacaaaacgggctggactaccctgtcaatattggtggccatcatcatcaccggcttaccttcaccgccgccgactggtgtctctgcctacacagctggcctattatgccaccgttgttggacgtctacgacttcaccctgagcctgcctccgtcaccgccgactggtgccctcgcctatacggttggttggtcacaccaccgttcatgggagcctgcctccgtcaccgccgactggtgtctctgcctacacagctggcctattatgccaccgttgttggacgtctacgacttcaccctgaacctgcctccgtcaccgccgactggtgccctcgcctatacggttggttggtcacaccaccgttcatgggcgtccacgtcttcattgatcggccggacttcaccaccgccgactgctgtccacgcctaagcggttggttggtcacaccaccgttcatgggcgtccacgtcttcaccgaccggcttgactccgccgctgcctactggtgtttccgcctgcacggccggcctattatgccgccgttgtcgggcgtccacgacttcaccgccggcctgcctccgtcgccgccgactggtgtcctcgccgatacggttggttggtcacaccaccgttcatgggagcctgcctccgtcaccgccgactggtgtttccgcctgcacggctggcctttatgccgccgttgttgggcgtctacgtcttcaccgaccggcttgccttcgccgccgccgactggtgtttccgcctgcacggctggcgtttatgccgccgttgttgggcgtctacatcttcaccgaccggcttgcctcgtctgctgccgactggtgtttccgcctgcacggctggcctttatgccgccgttgttgggcgtctacgtcttcaccgaccggcttgccttgaccgctgccgactggtgtttccgcctgcacggctggcctattatgctgccgttgttgggcgtctacgtcttcaccgaccggccgccgcatccgccgctgactggtgtcaccgcctgcacggctggcctgttataacgccaactgatgctatcttcttcacggctggctacatcgctgtcactactaataggcattagtatcttcaacacaagctgcctacgtttgtcatggctgccgactggtttcttcacttccatggctgcatgattctgccagtgttgattggccttaccatcttcatcgctggtcgtctcgtctgctgctgactagtgccctcacctctacgtctggtttatacagctaccactactgatggacatcatcgtcttccgttgccgactggttatgccgccgccaactagtgcttttatcttcacaactgcgcgtcttcgctaccagtttgcttctgttgccgccgactcgtgttcacttcatcacggcaacacaactttgtcaacatggtggagcgacttcatctttattatcttcggtaccagcaaactctattgctgctacttcacaagttttgttacatcaccaaccatgacgttgttgtgaatctcgacatctcggcatgcgatgccgtgttattttactacaacaagtggctctccaacattcatgatttctacttggacatcttcaacacatatcttcaatcaagcaataactattcgacgacaagatgctacagttctcgactctatgttcagttgtttcccaactaatcaaagagtcgggggctacacaaatacaaggctcaaaatttgacaaattttatgtcaagctgaagaaatcaattcatcaacccacgagtcaactccagaagtcattatcttcatctttgcttcggagcagacattctacttcaacaacttcaaatatttcggtttagacgagttgggcaacaacatcaactctcctccaagtgaagcatctacaacagttataacattaatttgatggattattgtcactgacatcatcaccagcacctctgcttcatcgaccctgacatctctgctgttgctaatggatgattatgtttttgccgacttattatttcaccttcacggttgacctactatgcaaatgctgatgagcgtctttgtcattatcattggttgctacactgctgttggctggatcaccgacatcgtcatcttcatcatgtcggttgcgtttgtcgtcgtcaagtattttcttcatcttcatgattggtggatttcgtcatcgcctttgatttgcctcgtctgtcaccgactgattatttcgctgccatagctacacaactttattgctgagcgccttcatattcattgctggctgactgctgccgactggtttcttcgcctccacggctgtgcaacttcatcacttttgattggtatcactatcttcactaccaccaatatttttgccacctctgctgggcaatattatctctgtattggtcgtcttgtctctatgccagttgcgtcagctaccatcaatgaacaattgtgactacgtgctcaggggcttactagttcaaacacaagtatcataccttcaatttggacttgctctggatacatgcaatatgaattcatgatcatgggtctattttctatgtttaaagactggactatttattattccccataagggttacaaccgaatacttgcgccagtcgggattcaattattatatttattttggagtatcccataagggataatcattcagatcagaagctattcatatgagctacacttggtctatattacccggaagatttattactcgggagcatgttacatgcgtcatcctttaaagggtgtcgaaggcatattttttggcctaggcctaatatgtctgcagcccatattttcaggtgtggcctgtcacgttcttttagggacttaggcacttttcgcttaggccaaagtgcgcgtgatcaagtgcccaataccttaaaatccttttataccgcagttactcgactttttaggagttggtatagcgatagggttttgagttatcggctatatgtccaatgtagagtctaacactcgatgtaaataatgatataaaggcactgatcgatataaaggcaatgatatgatagaataagcactgatccgaaggttaaagcatacatcggctggaggtccgatgtcataaaatccacaattttagataaacagtgaaacctttgttgcgatcggctaagtccaacttatatgtatatgcaatccttacaagccaatgcaacgtccatataacttatcggctagcaccccgataaaacattagcatgaacctatcggcttaacaagacatatatattatcaacaacaatctagtagatcgaacctaaccgatgcagcatgacatcggatcccataagatataatagaaactctatcccctccaagtaagactttagaaatcactcgactcataggaatattttccataatttgtaacggattcctccaacgcatacggaaatcccgagctaattctttttctcttgaaatcacttgactcgatctccttttctttttctcttttggaatcccgagctaattcatttggaaatcgtcggattcgatgccgatttggtttgcttctctttccaaaaccctagagctttcctaatccaccggtgcctccatgggcttagctggcgccctccgccgctataaaaagcacccccctagttgtcctctacccatcccctcaagtcccgtccgccgacgagacccgtagcaccctagccgcgctagctcgtgcgccgccgtcgtcgaagggagtacggtcgtgccgtgccgccgctatagtctccaccatcgctcgaggttgccttcgtcgggttcgcaaggttgccgccgtccccatcccgcccttcgtttccgccgcagacagctagagtgccgccaccaccgtcgacccgaagaccaccgccgtctcgacctcgccgccattgtcgatcgtcaccgtccgtcgtcgttcgagccatcggtgagttggccacgtcacgctctacacgttgatgccctccgtttgcgccaccgcgccgtcgttcgccggctagcatgaggtgccgagccgacgccggtgatgacgtcatcgtaatgtcatttgtagaccgtggtagaccggaacgatctcggccgtccgatttggtcaagtttaggtcaattagatctcggccgtcggtttcgtggaccgcttctgtgaacccggtttagcatggaccgtccttgatgacgcagtaaatctcttttccttttcaaaagtaattctttattgtgtcataattcaattaaaatctttataaatgctttaactcgatttaaacttcaaaaattcgtaactaattcattgtaactcggtttaatgtggttcaagttgcaaaagttgtataaaatgaagatctatatattaaaattatccattatttgtgttaaattcatttaatcctttttaaataggcttcaattatattaaatcttgtaaaattcataactaattcgtacgaagtcggaatgaggccgttcaagtctcataatttatctaaaattatgatctacatgtttgtttactttactagcaaaagtgtccgtgcattgcactgggtgattatggagtgtgtatatcaaccaaaagtgttgtttggtttagcaaaagtgcccgtgcgtagcaatgggaagtgtacagatcagaaaaatatgcaattaattaaaatacaaattctctgaatatttgatatttttaagtaggtatgtatataattaaataaatttacaagtaaagcaattgtgagaaataaaatgacatggttaaatttaattttattaaattcttcatgattagttttgctctttgaaattttattggaattttcagagcttaattgctaactttaataatacaaacatcatttaacaattatttaattggaaatctaatttaagttcttgttgggccggccgacctacgtgcggccaatgaggcgtgcgcggcccagcattgatgcggcccgatgatggagaccggcccgacgcgggagtgatcaaagccgttcgttttgatggacggctcatatcggctcctaatctatcaaaaccctcaacccaaataaaccctaaccctaatttcattcttccccttcctcccctccacgcaggtcgcctttctccccgccgccggccgcgccacacccccaccggcgcacctctccgcgcccctccccaaccggcgacgcctctcaacgcccctcccccaccgccgacacctcttgcccccctccccaccggcggtggctttacctaccgagcagcggcgacggcacccttctcccccacaagcggacagcggcggcgcccttcctcccgcgagcggcgacgatggcggcagcggcgccctgccctcccacgagcggcagcggcggcacactccctcgcggcaggcggctgcggcgacgcggcgatggtgacgccgctccctccccccaccgccggctccttctctcctcgtcgggtggtggccgctgcaccactctctcggtagatccgccggtggtgtcgacggcggcggtagccgcgggtggaaccggatgtggtggtggcggtcgcgggccggcggcagctccctcctcccctctcgcctccctcttgcccctgatccggcggcgatggcggtgttggcggcgtcggcgggtgggtccgtggccgacggcgaggtggcgaggagcagtgcgctgcagcctccggtccggctcgcccctccctctcctcgtcatctcgtgttaatatgatgttttctaatgattccgatttagatttggactgggattttgtgtttgatttggatttggattgtgatgatttgagatttggagagaaggtgtgctcaatgtgggattctatttgtgtgatgatggaattccgactgggatttttgagggaggggagggacgaaaaatcaccgtacggatgtggtgacgaaaggaaaaatccgaatatttatattagttatagatatgtacttttcatttggtttttattagtcttttttctcgttttgcgtgttagcttgtcctttccgtcttttcggaggttcgcgagtgtgtcggaagtattccagaaaactaattgaagaccgattattgcaaggaaagtcacacagatcccaaacacaattcatttgagcatgttgatcctatatttaaattctctatttaattaaatcgtgcatttattttcgaatgtcaccgggtggtgtgaacctattcctttgttatggccaatttgcaatgattaccctatttcttgattacctcgggttataatttgactagtcggatttatatatcggttcaactagatgtattagatataattggttagccatgcttagaaacattagcacacaattgggataactaatgtttcactattacttaatgatggatatttaatgatagctcacgatggttaattgtgattggttaattaattaattcgctaactaaaacttgataatggtgggttgtgagcacgtggttttgatggtcgtgctcatgacaattaaggaccggttcacgagtttcggttgtgaaacattaaccgtgccaaccacaagccagcatgggtaacggctttaccttttgtatagcatggttcattgcggggcaccagactgagaagtggcggagataagcccacgggggtcgctggggagtccatgccttgttttataagggggtgattatgatccaggaacggtgcactgtgggggattgtgttatgcgaggggtactgtcacagctcctttccgaggtaccgtggtggtattaaggcgcatggtgacatgtcgtggggctatgtcttgtgggtacagtggtacatctttggccatagtaaaactattcgaatagccgtgcccgcggttatgggtgggtctaacaatgtatttcgtgattagtatcacacttctcaccataataaatgatgctataactggtaataatttgattagctcttggtttggaatggtacattcctagtttggagatagatctgtacagccgggtatggttgttcaggtttggttgggcctgtgcagcatgggtatgctgttcagtgttgattaatatcgatgattaattactttattgctttacaattctcaaatgtttgctaaatgctccttctgcaaatgagccctatattatgccattctttggtatccttgtgcacttgtgtacatgttgtgtggcttgcggagtattccatgtactcaccttggaataatcaatcaaacctcagttgaagacaagttacaaaggagaaaacatttgacttataccccagttgagctgtctgtgggagtggagctgaaacttcgctagattttatttttctgctacagttttcttcgtggtgaggactaggtacctcttatgtaagtatttattgctttagttcttatgatgaatttgtatattaaattgtcagtttgtatacctcggctgatttctggacaatgattttattcacaaattagttcggaaattactagtgattttctggtcgtgacagaccgccaccgcgccgcaagccgccgcgagccacggtcggtcgcgccccgtacggtgccgctgcacgctgccgcgggccgattgtgcccccgcacggcgccgtcgcaccgctcgccggccgcgcccccgcacggcgtcatcgcacgccgctcatgcgtgccgcgcccgcatagccgccgcgcaacgccgagccgtcccctgccgcgccatcaccgcacacgcacgcctggccggcacaccgcagctgcgctgcccgcacggccgcagcgtgccgccgcgtctcgccggcgtccgcgcctcgccccgcatgtccaccgcatgccgccggccgagccgtgctcgcgcaccgcccgtgccccgcatggacaccgctgccacgcatggctgccgaccgggcgcaccattcacgggaagaagaatagaaagagaagaaagatggaaagagattggcgattttgcaaaagggcccctgaattgtctgaaaattatgcgcatatctctcggcatggaaattccttgcgcgtagactctggaatttcagaaatttccattttcatccctccaccgcatggaaacttagtaaagggccccctgtacttgcatatttcgcctgcatttcttatttaagcattttgtttatgtcatataaatttttaatttgaatttcacgaggcattaattaatgttaattggtattttgaattttcattttcagtatttatatgaatacatgcaacttttgccccccttttatgaatatttgtatgaatttgtatgaactctagtatttctttattgaaaattgcatttactttgaattacctgcgtttctttgtataattagcatttcctttgcataagaaatattggaaaaatcatgaaatatttgtattcatatttgcaaccatgataatagcaagtaacacttgaatgctttgtcgtctttgtaacagaatgttagtaatcacgaacaaggagttcgctgaactggccccgtatgaccagaactacctgacctgggcatccaatgtccagattgtccttggggccaaaaagctcctcaagacatttgggatgggcacagtacaagaacctatgccgacacctgatgagaacgatcaggcgatgtacttcctgcgacaccacctttgtgccacactcaagaatgaacacatggcaacgaagggtctgctcactctttggaccacactaaaggagtggttcgagaagcggaaaaacaccaccttgccccaagcagagcaagagtgggcacacttgaggtttgccaactatataaaagcgttaccgaatacaactccgccttgcatcagatatgtatcaacctctccctgagtggcaaagtagtcacggacaaggagaagattgagaaaacgctctccaccttccacctcagcgctatgcatagcactcgtaaccacaggcggatgacatgcaagaagtatgatgagataatcaacatcacgcagatgtttgagtcccatgacaaggttctttgcaagaacttcatttcccatccatccaacaaaagtattgaccttaaggtcgatactagcagttacaagaatcacaagcccatctaaaagaagaggggcaagcaaggtgggaagaaagcacctaagaatatgcatgaaggaactccagatgcccaggtagcccaaaaagcacatgaaagcaagggcaaatcgaaggccaaggcatccacaaaggcacatttggttccaatcaacaacaccccagtagtagatgccatggcaaccctttccatcaccactccacttgacatccccgctcctgccatagtcgtagcgagcaaagaaaatgtcatataggagaagagtttgcaaagatggaggcttccccagactccgtcttagtccttgatacaataatgtcatataggagaagagtttgcaaagatggaggcttcgccagactccgtcttagtccttatacaattatcttatcttggttgcattatgaacttctttgaataatggatatttaacctctatgagagcataacatttattttgtgattcgccatgcatggctagactttatttccaatattatgttgcattttgctatatgataaagttttacttcttgccttgaagtagtgatgttttactttattcacatagacaatatgcatagcccaaggtgaagaggagcattgtggaacaaaagcaccacaaagtgtaatcttgagagacatgtgacaagttcagtctatgcaaagacgtgaactaccttcacaaccgcacgtaatgattgtaaaggttattgtttttcccgtagaaaagtgattacacctcaaatatcttgggaatggcaaactctcgcaccaaaggtcccttgtaggaattagaagatgagagaagcatactcatcacctaagcacgcgagatcaatgtcctcactaagaaatgtaggctaaagtagactatttcatagtcagtttttcttagaatttagtatcttgcaaatgaacatagcacaaacaatctcacatcatctgtcgtatcgcaacaatgagatatttgtcgcacgcactgccttagcgcctcgcgccagacttgcgccaggcactggcatgcatcatacagcatcatgacgcccactaaggcagctactagcaaccccgctgtactgggggactggacgaatcatgccgcgttagcacgcgccatgcaactcctaccatgcaccatagttgcaccggctgcatatctcgtggtcactctggtcgcgcatgccattgaacatcgaatgcgtgtcaaacgccaaccaccacatgaattccgacgtaccttaaaaggtatatcggaacaaattcgtgcataccacatgaattcgcatgcatatttagtcctttaatggatcatccaatgcatactgcgcttatgaaaaagctgtaattgtgtctaattgacactacgctcttgccaaatcgatcctgcaagatcacgcatgttggcatcagcacattaagaaaagcactaagtaccggacgtccacaagaataggactaaaaatgtccactgcaccattattgaaattcccgccacttcaatggactcttagctccaaaggcaatgaattatcaatatccagactattcaaaatgtgttgtccacttaaaagaatactagtgttgactcgacacatgtgcatatcccacaaccataaggtctccctccgaaaaaaattgaaagtttttaacagaggtatgaacgtagcttaaattccttgacaataagaaggattatttccagtcatttagggggacagaaataacccttaaatgataaatgtcaggaaaaatggtcaaagaaaggatggatgcacatttaatcaagcactagcaaatgcaaagtatgaaaagcacactttgtaattggataactgcctatcagttttgtgatttgcagagcatgactaagttgcattacctgaatataatgcaccggaggagggtgaaataccgaggaatgcaaaggtatacctcatattgtccagaggcctagagaagaataatgggacaagaactccggctccttaaatccctagagtaacaggagacgtctggtgaaaacggaacaaaaaggaactctcaagctcatagtcactaaaaataaccccagaatttgaagggagcgagttcaaagctggcaaatggtatggaaccccagaacaagcataccacatcttcctatcaaggaagaaaaccagcagttggagtgcacaccaacgtcggtaaaatgaaagagtcatgcccatatcaaagaatagaagcataagagaattgcatatccccatatatccatggatactcacataagtgtcacatacaaccaataagaattggtaatgagacctgctatgggcaatattctcttcatacagcaaatcattggcagttaacctggagttgaaaatcaactaaaagatcaaaccgcaaagctgacctatagttgacaatgaatggctagagaaattttggattgggcacccgcatacaagcattaaaaatccgaaaccaagttgatgatccgaatatcatcacataaagaaagaaagctcactctttccgaacgagtttgagataaaatagatagaaacctatgttgcttaggctcgtaaacatacaacacatgaagaagtgaaccatagtatatcagaatgtgaaaatacataggttccatgcatatagttcaccatttctagcaagtaacatggttcgaactttatccaaaccccaaatccattatcaagaagataatgatatgtgcgtcgcacaacactaatagactatacgaactatataagtcatggaaaatcatgcaagatttgaccattggagcatcactcgaactatcttttgaaaaggatacaagcaatgagttttgacggttcacacttaaaagagatgcaaaattcaaggggagaattttgccagtctattaacaaaagcttgaaactaaagaatttagtacccaaaaatcgattaagaaaatcgataaaagaatttgggtagattgtactctttttttttccttggataaattttcctgcagtttcttatcaaggtttttaatgaggcaatctgtgcgacatagatacgtatgccatgtactctttctccaatttttcccactgggtttttatggagttttgacgaggcatggacattacgcggtgagtgctcaagggggagtgttgagaaacttttgggcttggcccatgaaggcctagcctaaatacacttattggccccatcaccgaacctttcatatattagattgcactatataaagagaggagggggctactcattgtacaattgattggaggattgaatagtaaagagagtctcacccctaaaatttgtgtttccactttttgtagaattactggaccctcttgtactgctttgtgtagcatgagagttgcgtaataggacaaagtttatttccgattggttacttgcaagtctgtgaggaaatatagaaaccatcgcaaaatctcatgttctcaacatagttatgtagtgagtttttacttggaattgaagtttgacgatacgactcgaggaactaccgtggcatctcgacaagggtagagggatttgatagctttcgtgggagaaaagaacacaggaagaagaaaacggagttggcaagaggattcggttttctcttatcgcataaactcccaacaaccacagcttctcttataccatgcacacgcacactgatgccactgccagtccagcatggcacatcaaacacacactctcacggcccaaagacatggcccgactaaacatttaacaaggcccaatgtcatggcccagctgaacccataaactcacatataagtcaagtacttcatacaccaaaccgatacaggagtcatgacaattctcccccacttaagaatcggcttgtcttcaagccagtgcatctggaaaacgcttttgaagttgtcgcagatctttccaggtcgccaactacgctgacattcctctctagtgtaccagcccttgatggatcagcgacttgcctctcttgatcaaccgtcgttggagcacctcttcaggaagcacttctgttgttgcatcaatacaggggttaggaagtttaggactcaccactatacctgctttgaccgccttttcagaagtgatacatggaccattgcatgaatctggctattcgggggtaattcgaatttataagccattgctccaatcctgtctatcaccttataaggcccaaaaatacctgaaacttagcttatgacaagtgcgtcgagccacagacatctgcacatagggttgcaatttcaaataaaccatgtctcccacttcaaatttcatgttagttctgtgtttatttgcttgatgagtcattctttgctgtgcacgaagcaactggtgatgcagcatttcattgtacaaagttctgtcttgcaaccaagactgcacatctagtgcaatactctatcctaggtccaaggtccacttcaccaaaatgtgttggcttccttgcaaacaacacttcatagggagatttgcccaaagcagtatggaaagccgtgttataccaatgttgtgcctgggtaaccattgtgaccactttgttgggaaagcatgtactgcatatttaaggaaagcctctacacattgattcagcctctcagtttgtccatctgttaagagggtggtaagaagagctcatattcagctctcttccatttccccaaagtgaccctttcgtgggagagaagaagaacagaggaagaagaagacaaagttggcaggaggattcagttttctcttatcgcataaactcccaaccatgggttctcctcttataccacacacacgcacacggataccaccgctagtctagcacgacacatcaaacacatactctcacagcccaaagacatggcccaactaaacatttaacaaggcccaaagtaatggcccagctgaccccataaacccaaaccgaatttgctatatatttgtcgacaaattttcctccaaaaatttgacagatgtaattacagtataatcgtagtgtaattacactgtaacttgtatgtaattatactgtaactcgcatgtaacttgtatgtaactttcaaaaatctctccgtaacatgttatttcggtaaaatggaggtcgtgggaataaatcctttcacatgtgtgtgctgtgatttttttttcttcctcaccggaacaaatcttgtaatagatctaacgattcaaaattacatgaaacttacatacaagttacactgtagttacatgcaagttatagtgtaattacatacaagttacagtgtaattacaatacggttgtactacattctgtcaaatttttaggagaaaatttgtcgacaaatgtacaggtagtcccaacttatcagacaccacacccgtacaggagtcatgacatttgataagtagatggaacaagatagctagatttcagcacacatgctacagaaacacggaataagtaatttatcctacaagaataccgctaagataattttcagggatcgccaacggtctgcattctgaagatcagcagattagttgataatctactgaatcaactggtttctattcacagactcacagtgctagttgctgtggttgccacattttgttccttcttattctccagaaggacctgtgcttgtttcacttgagaaccgagaatgcttactggattcattgcgctctggtcgctgctagagaacatcatgaacgcttccagttcaaacatctctttggaagccttggacagagattccatcaagctctccagctctgctttggggtagtttccttcgagatttatcagtgatatgatcatcctactggcaatcttcagtattctcaggcaattggctgttggttcactgttttcttctaccaacttcttgagcttcccggcaaagctagatgcagaatctcctgttgcaattgcattagcaagttgagccaaatctgtatcattactgatcaatttttcaaatattgccgcactaagtgacagtaaagctgcatgtagtttcctgtccacgattttcttgttgtcgtccttttgctcattgacgttgccactatctttcgtagcaacggcaccttcgcctatttcaggatcttgtgtcacaaacttggttgcgtctgttcctttttctgtatgcttttctccttgcttcaatggaggagagggaagtatttctttgagcatctgcagtggtagaaattatgcttattaattagtaggtgatgataaagacccaaggtgcgcgtggttagttaaataagtatgaaacaaatgaaatgccttcatttgtttgaaattttatcacacaccgtacctttggcagcacatctttcatggcttccgtcagtttcttgagattgtcatcctcctttgtgtaacaaatgtatagatgcttgaggatttccgccgcacttattctgtatccgctcttggtgcgaacgtcgaggagcgttgtcttgagatcatcgacaacggtgtcactcgccttgaagatgatggcggcgttgctttcgctttggtcgacggaaagcattgccagtgcttcacctgccaattgtctcgtggaggcgtccttgttttctttagtgaagaagatgtcgaccagcagcttggtgattttctccttgctatcggctgtcgaagtcgaaggtgcttccatgggaagctgcgtgaggatcttgatggccaggacgtgtagcttctcgttgcattcgtcgcacccgaggatcttctcgacggtgttgatggcgcgcttgttggaacgcagcttgtcgccggccttcccagggagggcgacaaggcggaacaggagctgcagcgacgcggctacgatgtcggaccacgcgtcgtggccgatgttgtggaggaggtcggcggtgacgggcaccatggccttggagacgaggccctggttgctgccgatggcgctgcagttgtgctcgtcggcggcggcgagcttgtggaggatgtctcggcccagcaccatgagctccttgtagtgacccgacggggcactgtcgccgtcttgctgcttggtggtggtggtggtggtggtggtgtcgagcagcgacgagatgcaccggagcccttgcgggaagctggcgaggctgatctcgccggcgagttgcgccacgatcctggcggcgagcacccggacgtcccggtcgagcgggcttgtggagcgaagcgactgcagaagcctctccaagacctggctagccgacgcggagccgaccagcttcctgatcagcgcgtgctgcccctgcagctcctcctgcgcgaggatcttgtccaggatcctcgcaccggagacgtagtcggcggacgacgactcggacttcatcagctccacggcaaacgtcaccaggttcctctccttgacgaatgatggatccttctcgcaaccgatcttggtcttgcgcatgtaatccctcaccgactcgcgcccctcttcgtcttccttgtcgaacccgtagtcgtcggcgactactcgggccagccgtttcccggcgaagtaggaggctgactggtagcagaagagcacgccctggaagagcgccagtgagtagagcacattgagcgccggggtcaggttagcgccgccgtcctcgccgccgtagtcccgctctatgaggcgccacatggagaggccggtgctgacgagaaggccgaacaggtagagcaacgccagtgggagcagtatgatggcgatcaccagcgcctggaggagcaacacaagaatccccaccagtgcacgccagtactggtccgagtcgtcgtcgtcgtcctctttcctgaacaccatggctacagtaaccaagaggccatcgaacgatttccaagcgtaccgcagcttttcgttcaggaaaacatcgaacaccctgtaaatttagttagatagaggcgccgttagacctggacaagggagatacgacgaaatgggtcggagtgtactggaaatgtttctactttttaggaacttgaaacccataggaaaatgctcgatccgtcctaaaatatggctagattagatatgtagattcatagttgaagcaatagttatattcagtctagattcatagctgaagatagctatattttaagatagaggagtgtttgcaatttcggaacaagtagatacggtcaaaattttcaggataaaaaaatagctataagttaagggactgtctatataggatttgatggattttttccgataagttaagccccccaaaaaagaaccaaacactaatcccactacctcaattccgtctgtggcgcccaaaacactccttgcgacctgaactttccaagcaatggtgatgctacccttactagcggcgacgatgggtcaactactcctggagttggcggcgacggtgccaaaaaccctttctatggcttggactccctaggaggcggcgctcctcctgctagcagtatagttggctaaaagacccgttgcccgatggaccgggccacagcatggagatttagcccagcccaaccattgacgatgcctggtcctctttctcggcacaatgagttggcccggcccggcaagacccaataataagcaggcccaaagagatgagggaggtaaatagacatattccaaggacgagtacagtggactggtcgtgccttctggccgacatggcacggcacggcccaagtgttattgggttgtgcctgcattgaaggtgcagcccatagatgcgcacggcacgatatggctagttggtcctactctcgagccgtgccttggtcgtgcccaggctggaccgtaccgaatggcccatttagccatttataactggcggcgacaacagctcagctgctcctggagtcggtgactcagcgtcaggttcttgaggcagcagcagtcatgatttgctccttcatcctccatccttcctttttcactatcttgatatgtctctccgcctctatgggatttgtccctcagcacttcttctgttcttatagtagtgcgcacactgatttggggtcatggaagaagaagatcctgcatatgttggcagggggagacgcatggggtcatggtggtcctggatcgtcagccgcctgcacagctattgtaactgatttgggcaacaatgatggtagcggggtgggaggaaggggatcagcagcaacaactgttggaagaagaacggagagtgccagtcctaaatggatatgagatgtgtgcaatttatcaatttagcgtgatgtaactgctaaataattcagctgcaataagctcatttttttttctggaaatcatgcattatccgataagaaattaagatttgcgtggactaattattttatcccagaaatttccagaactttgaaattttgattgcattttgttttttgtaacaaaatttcatatttgaattcaaaatattcatacgaataatatccaaatttttgggttttttccgaccccccacgacaacaaaaaaacatttcaaaattgcataccctgcaagggagtacaaaagacgaccttaaaattgaaaactttagccaaagtatagttcagtgaattatacaaattgaatacatattatttattacggtacataataaacatcaaatattaatgctaaaagagtaaatgtcgtactcaagcaatcaattgacctcaaatctatctatctattatattatattattaaaataagaaggcatcatgttcgctgtgtaggctagaaattcctgaattaattgaaaaaaaaagaaaaaggatagtctatatagaaatacaattgagaaatcactgaaattcggaataaaaataagcaatattgcaaaagagttcatataagaacccaatacaaaattaatcgaaattcgaaataaaaaaataaaataaattctgaaattaggaaaagaacaggaagagttcaactagaaatacaatttagaaataattaaaattcggaatacaaaataaggaatattaaattaatagtttagctataacacagcacgagattaaataaattcagagtataaaataaaataaaatacgaaattaaaaaataataagagtctaggtaggaatacaattttgacgtaactgaaatttggaaataagaataaacaatattagaagaatagtacaaataagaatccactacgagattaattaaaattcgaaataaaaaataaaataaaataaattccaaaattaaagaataaaaaggagagttcaaataggaatgcaatttaagaaaaactaaaattggaaataaaaaaaggaatatttttttttgacgtgataaaaaggaatatagaacacaatatgagattaaaataaaataaatttataaattagaaaagtaaaaataactaagattcgtaataacaaataaagaagatatcatagaacacacgatgagattaattaaaataaaaaataaaataaattctaaaaatagagagttcgaataaatgagtagagtggtggtggttgataggacactaaaagatataaacaaaacccaaatagaatgtcactgatgattaagtggagggacgatgggtagaccattaagcatcacggtcacgatggcgggacttatagaaagtaaaaaatataccctaacgataatcatattttatttttaaaatctcatgataaaaaagaggggaggcagcgggtggtccatagaggagtacggtggcaaagccgctgacagtttgataggacttctagaaagtaaaaaatgacctaaatgataattatgtttgtcttttaaaatatcaatcgcaataaagagataagtcggtgggctggtcataaaggagtaaagtggtggcatttgacgagacttctaaaaattataaaacaaaacccaactagacaatgaactctaaaaactacaatgtctaatttttaaacgttccaagaagaatgaatataagcagtcatagatcgcatgcaaataaaggagtgataaaggagtaaggggtagcgactggtgtgacttttaaaaaataaaaaaaattagaaacacgtgaactatttaacaaaatttaagaaaaaatcatatgtaaaaagtagataattttgtatgggtgctagccacgcaattgcgcgggtcacccagtagttctattgaaaagcatcatccttttagtattgggttgaaatgaaatcttcctattggggcaagatgggctttgctttactctagaacttagtggattagaaattatggccccgtgtagtcaggcacctcgcaaatgctacaatattgctagcaaattcctttgcactctatctttccttccaaatgaacatgaacagtactagaaattcctgaagaatgatcttatgaaaatctttgttccgaaagtgtgttttgttagccccttttcagagaaagaaaaattatcattgggagcaataaatggtcagaaaagaaaagaaaaaagtgacgaataggaaatacaacaaatgtatagtagaattaagaagtctaacccagctgtctggacaagggtgataatggtgagactccaaaaatccttcttctcaagcatggagacgaagccaccaaggaggacgacggtggtccataaacctactaggaagcccatccccttgacggccattgacaggtaccccataaacagagcataactgttgataccgtcaacttccttccactcggactgatcaggttcattagccattgtcagttcttcctcaagaaagttgggatcatcgtttgcaaagcagcaagccaatatatatacaagctcctcgagcatatgggatgattaactatcaatacgtagaccaatagccgattaatgaaaaatgttcagatcttgactttacctgcacgaagcgatcgaggtcattgtaaagtatatattgttcatccagcctgttcagttttggaccaagcaattagctaggtctttattatatttatgtattagtagatcaatataaaagacctacaaataaattaaagctagtggcctcacaagttacaatacaatattatgcttctcactgtttgtgtacccacactctagctagattactaatgctgggattattattgtttcttgaatgccgggaaccagacgtaattgatgcacatatgtaacacatggtggactggtcgaggagcgttacatatgtaacaggagctgacaacgatccgctaaactcgcaagagtaaactctagaaaacatcatgaagccttccagttaaaactgtttacaactaaatttgacacctagattcgaattatgaacattgccaaaatttgaaaggcgccgagtttccttcacggggccggtccgaccaccgcctatgggagtccaaaccgattttcatcgggtctcgggtttccttacttggaaaggtatttttcgagtttccattggtttccaccccaaattaaacgtggagaagaacatgtagaagacaagaccaactcctttataatagccaaggtcggttcgacctccctcccccccaaatctcaatccatacataatcgaatcgtttttttacttctacttttagccattttttctactttaccttagttttgtccatctttgtcggtttgcgccgtaaaccgtccgccttcactacgagagtgcgattatctctttgtagatttgtcttataaccttccgttcgcccacgagacgggtggttatcttcaaatcaatctaaatcggccccgaggctaatttgatctctaaatcgcctccactagccggtttaatcttcaaagcccatcttgatttagaattctctagatcgaggtggttggtgactccattaacaccacaaatctttaaatgagtcatggttgggaccgaaaagggtgccaacatgaattggcgactctgctggggaacgtcaagaattttggccataccacggccagaaacaatctactatatttgttgcttacgcatataaattgatcgctcagttgattggatcagatcggcgacatcattctcttaccgccgcgccggtctgaaccagtctaaccgacgttgtaggcccggtctgaccggtgaggtgaccggtctaaccggcagaaagcaccaagataagcagcagcaacattgtttccttttattgctgcacactgttactgagaagaaataggaacagagcggccgattttatttaacatcggttaatttttggtatatttgctacagtaccaaataccctgttacgatcaatcaacaaggctaagtttgataaaattggtccaaatacagtagcataccaagaaaactatagaccgtatattaatctatttggtcaaaatatttcagctataattaatatgatcgaaattcatccacaaacatcttcatcaaccatgacgagtgggaaggagatcgacaagctcaccaaggaggactggaccaaggaggagtggcgagactttgaaaaccaaatggcggcgtgtgagaagacgatgctcgcaagcttcctcaagaccgaccaaggcgtcttcaaaagagacgtgacgtcccgctaccttgttaggagctctattgggccgcatgcagtatggaccatgcattctccagagcaagcccaggctagcccaagcgactgggaacaaaaggatggctgctgctcctacaacaaacattgaacagatcaaacaggcatcggcggcttcagccacggcggcaacggcgtcaaggttctaggctagaacctcgacgatctatcttctctaccgatctcttcctacctccagcttccactgctagttctagaagcttccaaaacttgtattccatagtttcttcttctcttttccccctaaaacaattgttgcttgtatggtggatccttgctattgaattggaagaagtgggttcctaacaatctagtatcagagccgctcggttcgtgggatttctcgtcatgcaggtgttgggaaggcagcagtgcaaggtggaggaagatttgggcaagtgaggtgctcatgaatctagcgcacacaacctgttcgatagaataccaaaccaacataaggtgtttaaggacgatgaaaggatatcagagcccgtttccatcaaatccaccatgaacaaggagggaatatccatggacgaatctttagatcagaatcttgggaagcttgagttgatggaggccaagtgcatgcaagaggagaagttcaatcaaatactacagaagttggaggagatagaggcttgtaggagcaaggctaccgaggtgacgattgctgccatcaggacaaccaccgccatcctcaaggcttcatcatctccaacaccatggcaccacctcctccaacaccgaccaagtgtttgacaaaatgccccaacaacaacttcacttgggtgatggcgaattcaagtcacattggtgaggtgcttgctccaacggctgcctgggagctaggagacaacaaggacaaggggcacgccccctgcatcgtcaccaacgactcacccaaggtcacgcccgccaagtgctcgaattgttctagccctgacatcatgctagacctcaccgtggctgtgggggtttcatgtgccactacttctatggcctccatggagttgttggttggcgaggatgaaaccagtgtcatctacattgacaaccctcattgttccatagcgacgcatgccaagtgttcgactttgggcctcgatgtcaatggtagcgccaaccaacctgtggtcgtgttccctaccattacagctatgaatgggcatagcatcattccaactctgcctctgaccattatgaatacgtcagtcatccttgttgtcaaatcaagttgtgctagcgacaattctatcagacttatgactctatgttagccactaatggagtatgctgagaggaatccatggccacctcctccttcgaacaagctaacgggtagcatatgtgagctatggccagaaccatggtcatcgtttgcgtgtaatcgatgcaaagtgtggtacttgttccgattggagagcacactattactgtacgtgaatggagttgagcagtttctaaaggaattgccatgctggccaccgcctcaagaagatgtgattaaatctgagttttatcatggagggaatcaattttggttgaggaattcagcttgtgttatttttttttagataatggattcagttgtgttattgcagagacaaaaatgatatacgtagctactgttgtgaggttcagtttgtgctatatgcagatgggtgctatgaaaccttcaagtgttatacaatggttaaatttcccctactgcacatatgacggattcaagcggaagcttcgaggcttgttcacaaatggagccttgtgcatacattcaagtcagtatgatcctccagatgggctttgtgaataatccggttgctatttagtagaactagaaagaaagcccgcgcaaatgcgcgggcatcttattgattgttttataaaaataatgcttaaagaagttacatctcactatttctatttaaatgttataaaataataagaatatatctcagattaaaaatacactttgatcgagtgacatataaattctcctattgtcaccattacttactatgctttaaaacctaataagtaattaatacactaaattatcctctatttaggtttcatatctcattttttttctaaatccatttataaatattataaaaataccaccacttctattcattaatggagtagcaccattaaagttaaacacgaatactactctagtgggtgaagtcgattgtagccaccaagactttctttctctattgccttgaaacatgagtcccgcatcgatgtagccatgctcctgaagaccagcttggagcataattttaatgtatgattcattatcacatgctcatggagtattatattggtaagtagaaagttgagtactattagcgatggtggcctccactggaactgtaacttagtcatatattccattttatacttacgacaccataataaactttgttgtctaagtttagtgtcctttagggaagaacaaagagaagatggaggtgaccaaagtagttttttaaaaatgttttgagtagatttgtggtgcagtgtaaacacaatttctttatggtgttgatcattactactcattttttttatgaaaagatagaatactctcttttgaaaatggccgagtttaataattcgatgatgttttttaaaaaatatagctaatgagacatatcaccacgatagtatccagatcatcatgttattatctatgttttgacaaatatgtatagtcaaatagttctaaaaatataaaaatactttcagaatcttaatctcaaacaaattgtaatttaatcagacctactcgaaaaacacaactaaattgtgttgcttttattttttacatatgcagatttaaattaatgttgtatatttgtgaagtgaaatttccctccgtaaaatatgatgtgatttttttgaaaaattatcatacatatgtcagcctcatgtgccgtggtgtatttaggaccataatataacttttataatttaattaaagaaatataacatgatcacaaattggatatataatttcaaaataatttagaagatggtttaaaaaacatttattgagtattctatgtttttattatagatcttagtttaactatatatatttatattatatttgtgaagtaatatatttcatgtttatattgtggaaaataaccgtccatttttatatatctactagcaaaatgcccgtgcttcgctacgggtaaaggaacggttaaattatatgaagtacatcgttaacatgtatataataatgttccaatataggtaaattgttcattgcgctaatgataatcaagatggataaaaatattcatgtttagctcacatcgcgaaagaaaaaattaaattaaaaaatattaaattctaatttaatgaaatataatttttttgcaatattaattacactctttgaaattatagcaaaagtgctcgtgcattgcaaccggaagtgtatagaccagaaaattgaggaaaagttaagaaaaatctacactatgtaattaattaaaatacaaatttgctgaaatatttaatattttaagtaggtaggtgtaaaactaaattaatttacaagtaaagtaagtgtgagaaataaaatgacatggttaaatttaattttattaaattctccatgattagttatgctctttggaattttatttaaattttcagagcttaattgctaattttaataatacaaacatcatttaacaattatttaattggaaaaagaataaaaatcctcccttttaggtttgggcataatatgaaaaagtttatattacctcccttttgcctatcatatgtatctggactattctttctccgttgaagttcattttacgtcctcatgcaatcacgcagtccgttcggcggcccagtaatgtggtggcccaataggccgacggcccgatgcgggagcagctagagccgtccgatcaaatgaacggtctagattgatcctaacctaaataaatacccaaaacctaaccctagaatacattcccccctccccacccccccggaaacccaaccgaggggtgcaccacccttcccccgcgagcggcggcgtcagcggcggtggcacactatccccgcgagcggcggcggcgcggtgccctcccctcgcgaacggcggcgtcggcggcagtggcgccctccccccgcgagcagcggcgtcggcgacggctcccccaccgagcatcggcggcgcggcgccctctccccagcgagcggcggcggcgccctcccacccccctcactctctccacttctcctcctttctctctgtgtggcggcggcgggagggccggcgacgccctcccctccgctagatcgagggggaggagaggtgcggcggcgggtcggacggcgtggaggcggccggccggacctcgcctccgccacatccggcggcgctgcggctaggacggcgtggaggcggcgggccgggcctcgcctcctccagatccggtggcatggaggcggctgcggcccggcggggcgtgaggggcggcggcccggacagcgtggaggcgggcgatggtggcgccgatttttttttttttgcatttttttccatcactattgctaacctaatcggattgcgtatggacgaaaactcggacgaaattagatgtgacgaacggaaaaatacgaatatttatattagttatagatgtgtaccaaaaaattgacgtataaaaaatatacatgtatataaactttatatacgcgtatgcaaactttacatacgcgtatgcaaagttccatttattatatgcggtgcatgcatatataatggcattgacattactttatacagaaatactaatgaggacacctggctcagttcgtttctttgagttcccaactcacactccccgttttttgcttttcaaactactatattcatctcaaaataagtgcagtcgtgggtatccgtgtttaacgttcgaccttttgttttatttaaaaaatttatgaaaaaaattaaaatattagtcacatataaaatactattcatgttttattatcgaataacaataaaaatactaataaaaaaaaaggcgatcgttggacatgaacagtgtaaaactgcacttattttgggacggaggtagtactaaacagtgtgttttatgaaaaaaattctatacgaaaattgcattttaaaaaaaatcatattatccatttttctaaaaattagttaatatttaattaatcatgcgttaatgaactgctcagtacggagaaacacaactaaggccccctttgattcaaaggaattttataggaattttaaaggatttcattcctataggaattttttctatatagccctttgaatcaaaggaatgaatcctatgtaatcccatgaaattcctatggaatgccacttcccatgcaagttttggaggaaatttagcatgaagttctacctcatgttaagaatcttttgttcttgcggctcaatcaaacggtcattcctatatttttcctgtgttttacaatcctttgttttacacttatattcctgtctaaatcctatgtttctcctatttctccattttttcatttctttatttctgtgattcaaaggagtcttaaatgtgtagatttatttaaaaccattgtttaaatagcattttcaaactgccatagtacgtatcttttttattaaaataagcagttatatttgcttttctttaactgccgatcagaggctcagagcggagagagcggcgtccctgcgcctcgataattccgcccgtcattatctcctcgttctcgccgagctcattcctctcggtgtttctctcctctgccgctcgcccttatctcctctcctccgttgcgctctctttcctttcactccttttctccttctctactcacagctagcgacgccctccatctccgcccttccccctctgccccactgcagcgttactccccgtacccctcagccacggcaccctccctccagccggcggcgcccttcctccggcgacgacgccctacccttggcggttggtgccccagccgcggcgccctccccctggccggcgacgtccttcacccggtgggcggctgctcagccccccccccccccggtcgacggcgctcttcccccggcgggtggtgccctacccttggcggtcagcgcctcagccgcgacgccctccccctggctggcagcgccctctcctcggcgacagtaccctcgcggcgcacggcggtgcccccgccaagccaccaaggcctcgggcagcggcgtcctcagcctctaatgagcagtggcgccgagggcggatccggcggtggtggcatcggcgacgtccgcgggtggatcccgcggcggtggcggcagccgagggcggatccggtcgcctttttttttctttttttttttgctcgagtttattttttatttttttggaatcggacattgggattcatgagctcttagattaaaattggcttttttgtgctgtttttggttgtctcattgttcgatttatttggggatcaagctgggggatttttatttttgaaggacgccgtggcggagggcgaggacggcgacgcggtggccggcgaggaggaggaggaggagcggcggcggctaagcgaggaggagcagcggcggcggccgtgaccggccggtggagggcgccgaggccagtgcccggggcgaatggcaggaggtggggccctgtcggccaggctggcggcgcgccgtggtggaggggcgtggcggaggggcgaggacggtgacgcggtggcaggcgagggaggtccctagggtcgtcgggcggcggggaggaccaaattcatgagctctagattaaatttggtattttcgtgctgttttttgttgtgtcgattgattgatttgggtatttttgaagactaccaaaatgcccgcttcgccacggtgtattgaactaaaaatatttgtttttaagtgaagttattttcacactgctttggtatttttgctcgttagaaaaagtctcaaataatagagagaaatatagtagcttaatagtgtgttgcaacggaaaaaattaatgttattaactttttaaagtaataaaaaaggagcattcacattagctcttatagtttagaaattttcatattaatattatttaattttagtctaaatttatatcatgacaaataaataattatatttttagtcgaaaaataaatccatatcatgagaaaaatctagcaaatttttagttaattcaatttagttggaattaaattattaagcagtaataaataattaaaatggtactaatgctatttctgaatatagaaagatgcttaaaattattgagaattattgagagagaaaacactaattttatcctagcccaaacttgcggaccaatttggaggcccaatagtgccgcggcccaatgcgagagaagccaaagccgtctgattgaatggacggttcagattaatcccaacctatagaaatatatgcaaccaaaaccctaaccttaaatttcatttcctccctgccaccgatccctcctctctgtctcgatcgaatagcgacagcggcggcgcccttccccctcacaagcgactgcggcggtgcccttcccccacttcccacgagcggcggaggcggcgtcctctccccaacgagtggctgcggccgcgccctccgccccgtctcacctccctcattggtggccgctctctccgccccatctcgcctccctctccctctcatctccctctccctctcgcagtggcggcgggttggcggcggacgcaggcggatccgaggatggtggcgacgtcgacggcagttgcgggcggatccggcggtagcggctccctccgccccctctcgcctttctcgcgcggtagatccggcggcggtggcagcatcggcggctggatccgtcggtggtgacgacaaccgtgaacggatccagctactatatttctctctatcatttgagactttttctagcgagcaaaagtaccaaagcagtgtaaaaataaacttcggttaaaaaatatttttagttttaatacatcgtagtgaagcatgggcattttgctagtataagatataaattactattagtaaaagaataatatattgtcaaataataatactgcatatttctaatttacaatcataaagggcgtatctaaacatacggtgaaaaatgggtatacatatataatcatgatctaagtagggtataatttcaactattaaaagaaagtttatttgctcagttggcgacagcatgatgtgcccagaacgaaggtcccagggtcgattcttgtctcgtgcgtagcttttttttattttttatattccatgaacacgaatctcaaagtctatctaatagactaaaaatcgaacatttttttttttagcgtttgcggtggcagcagtgatacgtgcccgcaagaggcgaatctatcccagaaaaatcaacggaaaaaaaaaaccggagccggcccacagtgtttaatccctatccatccccacaccgcaccaacccagccgcgactcaactcctctctctctcgttctctccgcctctccgcctccggcgactctttctctccgcctcctctctccttctccctctacctgcgaccccgcacctcctcctcctctccagccgccgtcttcagcccggagctctccttccgcgggtggcaacgggcggcagcgcctctccgcccctcgcctcctctccctcgccatggggccgcgggagggctcacggtggcaggcggcggcggctcggtatcccagatccggcgtcctggatggctggatccagcgcgagcggaaggggaggggaggtggtggtggcctggtttcccagtcgcggcggcacccttttttacggtttttcgtctttttgtttttctcctttcttgtggatttaatctgtgatgaattggcagcgaatccgtgggtgggattgagaatccgttgatgtgaatctgtgatgaattggatttctttttcttttttttttggaatttttccatcgctaacataatcggattgggattgggattgagattgagattgagataggacggacgaaaatacggacgaaaagagatgtgacgaccggaaaaatccgaatatttatattagttatagacgtactcggactcaaaagacgaatgacggacgaagcggaataagtttttaattaggtatgtcttttctatctatgtttgtatggttttttccttccgtgaacagtagaaatttaaattgcatgtactactcgtatgtcgtacgtacgggagaccggtagcagctttttatctaaacaggaggaagttattattttacaataatagatctaatctaatggtgtagaataatgggtctaccaatttaagtgaaaatcaaaggtgagattagatagtgctatatgatggtttaagagtgtttataggagtgccacgtggcggcttaagagcgtttgtaaaaagtttaatggacttttagtatataatagatagattttctcatatcatcacgaacggaagtgggcaaaatgtgtttgtggcattgtcaaaggtgagatcagtgcaactgttttcaaatggagatagaagggagcaccatgtcagtaatagcaaattctggtccaatctcccaataactatccaccaattcttccatacatttgcaattgttgctttagtggtggctctgcaaacacatcagttcagagaatggaatggaggataccttgttctgatcttacgatgtggtttagaaaatgcaatggagatctggtcacatatggacatgagactaatcatgatgtactagtacagtatactgagtcactatctcaccaaataaaggcaattgtgcacttactgatcaggaacaaggtaaacacatggatatctgaaacaatggggagaactaatcattttggtgctaagttcacaattgcttgtcagttctcaagatcacttgaatttgttcctatcgagagtatacataaacagtggggttctaaacagcacctgtgcattctgctgcctattccagttagtacaaggttacggataatttcagcaaacaagcattattgttttcaaggaaaaatatcaaaattgctggtggcattctttgttgttcttaccacagaggggttaactatggttataatggaaaagaaattgtgtgagctgagccattgctatggtttcctgaattatacaaatgcaatggagggtaggcaagcaattccttttggtggagccactaaaccagatacatgaccaattggtagtgttgacaagattcaccttctcaaaattttgctgaatgactggcttcaacaacactacttccattcgagggttgaccagtggagcactgagtttgttatcaaggttggcattccggaagagtccacttggtgtatcagtttgaggcatttgctaccaagaaaagatgtccatggaaattgcattgtcagatatcttttgtcaatttcctattgttaaccggactgaccataggagctatgaggacaacttatctggtaacatcaggatgtgctccattgcaagctaatcatgggggcttgaatggcgaaggaggttgactaaatgtggctgcaagttcttacaccaagacagataagaaacaactacctaatatgtacctctccagtcaacaattcaaatatttagagcagccatgggatccaggaggattacttcatcggcttgaggacaagccgaaacttaagaggggattgttagaagctctattgggtcgcatgcagtatgggctgttgacggtcgttattgatcagtttcgaccgtcaatactactaaaataggagagaactagtgatgcttacaatgcataaaaatgttagagtaataatattccacaagtattaggttactaaccttttgcagagaatgacaataaagtgaaggagaatcgacgtcaacataaacgataaatcaatcggacgatgtcgacaatcagacttatgtatgaatgggccaagaactcagaattgacacgatgaattgggccaaaattcacaagtctgcggagtggagcaatagaggaggccaccagccgaaattgggctggattgggccaaccccaggttcggccgaaccaatcctggcgccgttggatccaggttttggcgtggacgtctaggattgcatcccaatgacggttggagggcactttggacaattccccttccacaaccgtcataactacctctatataaggacttcaccttgtcacttcactcacacacctcaagcaatagctctctcatttctctcaagcttaatttagtagtatctagctggtggaataggaatagagtagaaattaggagtctggaagccttcggaagagttcggatatggctctagcagcttttcttttctcttttataagctttgtacttttattagaatactcttctaaatacatttatggtattgaaatattttccgagtatatgagtacctactttacattatgttcttgttatactgaatatacggctagcttatctgggagatgctttggtgcgggtataatgtttgcttatgcaattactctatgtcatgacgatgatattagagtagtatctggtagtttagacgtggtgtctagattacgagatatcattatttggggttatatattacggatgagaggtgggccgctgatggtgacagctcagtacgatatataatcctaagttaattccctgaggagggtattcctccgtatttagccccggttgtatagtcatgatggactgtcgtaagaaactcgacagtcaggggtggcttctcgaagtaccaggagggtatcagaaagagggtattagctagtatatcagttaactaggatgtatatatactatgtatattagaagtataggaatagattatcttcctcttttctttccacttagcttagataatatattatgagaatgagcagtttatgcttgtgtgtcactatatccttggattatcttaacccctgtttagaatatgattatcacaagcaatatataaattattagtcatgttctctctacatgatcttcccacgggataagataaatacgatatccttggaatactctcggatgaaatgttacaatggtatatccgtgcgcttgcggatggactctgtaaccataatataccagaagtatttctgcgtcattgctaagaattatatttctagtaatgtcgttaagaaataccaacatgggccatgtaatccattctccaaagcaagcctaggctagcccaagcgacagggaacaaaaggatggtactgctcctgcagcaaacatcgaacagatcaagcaggcatcaacggcttcggccacggcggcggcgacaacctgcttctgggatgaacctcagcgaactctcttctctacctctcttcctacctccagcttcctctcctagttctacaagcctcgtccgcgagcgaccgccgccactcgattgccactcctcccaaatccggaagccacctcgcctccgcgacccaccgccgcctctcctccactcacaccaacgggctccgccacccccacactcaccgcttgttgtgcccccaccgctaggagccaaacagcactaacggtcagtgcaaatccgtccatcccatcccacctcaatcccttctaccaaataaaaactataactatcctataccataaaccaaataaataactgaaaccatcccatcccatcccaaaaataggataggtctaacctatcccattttgtccccaaaccaaacacacgctatgaggtaaaatggccgataattatattatcgccctaagattgcatgctatatgctttttggttctcaagttcaccaaaaaggcaggggacatttgagggtgttagcttaatgcaagagttagcttaacgcgtgctccaagacaaataaatcaaatgtttaagtgagagaaagagaggggagaagaaaaattgaagtcagccttatagcctccatattttaatgtatgacaccgttgactttttgtccaacgtttgaccattcgtcttattcaaaaaatttatgtaattatcatttattttattataacttgattcgtcatcaaatgttttttaagcatgacataaatattttcatatttgcacaaaaattttgaataaaacgaatggtcaaacgttggtcgaaaagtcaacggcgtcatatattaaaatacggagggagtatatgtgttagctttaagatggactaatagtagaaagtgagctctacctaaccagctgcgcaggcgcaatgccaacgatcgattgtgccttcctcttctccacgacttctcctgcttctttcacgagggcagcgaaggccgtgttggcagtcgtgttggcagttatacttgaatccaagcagacgtcggctgcgatcttgtcgaaccgatcagccagaactggatccgtggagatcagcttgtcgcataccgtcacgcagagggacgccaacgcctcctgcacttctatttcctctggagtatattgcttgccattctgctgattggaacaagatgaggcgttgttgcctccattgctaactcgtgaaggatcaccgtctggtagggcttctatgtctgcatctggtggcgagaaattcccagaattgttcgcctgtgtagctactgtttgtctctctggtcgtctccagtcacagccaagtaattctctgaggacctgaaacattaaccccaaggtatttcagcataaaactttttcgttttgtacgtgttaatttgacaggtatcgatcattacctttggtattgcaatggtcatggagttcttcagtttgtcccaatgttcatcgtccgtagtgtggttgatacaaagatgtttcaagatatctgccgcacttgtcctgaatgtgttgtcctcgacatctacaaccatctcagaaaggcgatcgacaacaatactatcatttagcttcaacttcaggatgatcgaggcgttgctttcgctctcgagagacagcttcaccagctcttcgcctgcacatttcctgacggagctgcgtttgctgtcatgaacaaagatgtctgtgaggatcctgatgagaccctgtatgttttcactgctcataccaccagaagacttgtcgagagagagaactgtgagcagctgtgcagctagcctccgaagctctgcatcacaaccgtcgcacctgaggatgctctccatggtgctgattgcaggcttgcagctcgtgatttggcggcgtagcttcacgcgggagtcttggaaaggaacagagacaagctgaccaataagtgttatcgacccctttgccatgactgagagttcatatctatggtcgtcgtcgtggtcgtcctccatggtcggagccggagctgataggtgccatgatcgtggagacaaggcctcgggtgtcgctcatgatcctgcagttgtcctcgtcggcggcgagcttcccgaggatgcgctggccctgcaccaccagattcttgtacttctcgagtgacagatggggaggctcacgctcgtagaccagcctgtacatctccacgaactcaacctcctcatcagggcatggtggtggtctcaattgcagcttctcgagcaccaaatcacggtcgtatggctcggcgaggcggtactcgtcgtcgagcagtgaggttacgcagcagagcgctcggggtagccgttctaggtgaacgccaccggcgatgtaagccactatcaccgtggcgcgctccctcgcctccgcgtcgtgcgggcctcgtggctccagcgtctgtatcagtttcagcatcacgacatggtggcgagaaatgagcatatgtttgatcatcctgtgctgctcaacgtgagtcgtggtacaagcgtagctggacgctatctccccgacgagcgtgctcagtatcctgagcccggagaggtagccatcaggtgagctcgacgactccacctgctcaacggcgtaggtgaccatgtttctccctcgagcgaacgaggggtcctcctcgcatccgatcatggtgtcccgcaggtagtcccacaccgactcccgcgcgtccatgtggtaatatcggcatacatcattcactattgcttctgctgcagatgaatagctgaccctgtaggtgaagatgacgccctggaagatagccaacgagtagaagacgtccaaggctggtgttatgttggtgtccccctctcctgttaccgagtagtagtcccgacgcctcgcgaggcgccacagcgagagcgccgtggagatatatatagatcccgaacatgtacagaacaatcagagggcacattaggacggcgatcaccaccacctgaactcccagctttagatagtgcagtagctaggatgtatgtgatgttgaatatgcaggaacccctagctgtgttgcactccaggtagcttaaaacgttcattagtgaaactgatgtccttactgttgtctgtaacaagcctctgtagccatcccaaatactgctcagcttttctttcatgaagacatcgaagaccctgtaagaaaaaaaaatatggagtatcatcaagttttaatgaactcagtagacaggaatagtgaaggcacaacaattcttcttaattaataggcaaatcttgctacaggatatccaaaaaaagtgtaattagctacgagacaacgcaagaacgtgtttctgctatagagcactgtaaaaaactggtaattatagttgttggacacccgcgggattattttattatatctagaagaattggagagagaaacagctgtgtaagtacggttcaaccctttgattttttttcttttctttttcatttttcttccttatccttttctccctctctcattctttctctatttctgtctctgctctcaaccgccgccttcaacctctcccgccgcttcgcctatcatcacggcgctcgctcgccgccgccactcctcccacagcgtgagcagtgtgttcagcatatccaccagcagcctcccggccgccagccgcggcaccgaccgatagtccgcgccgccgtcccgcatcagccccagcaagaacccctcgtcatgcggcacgctcctcgcgtagcacggccacctcgcctccgcggcgcttctgcaggcctcgctcgcgcctgtgtcgacatccttgccaccgcccccatcgtccacaaccctatggaagtagatgcggtgggattcctcctcgaatgcgacgacggtgacggcgcccgcgcggaggccagccaggaggtccgagtaggccacctccttggctgcattcttgggcagcgcgaagcgagcggcgaggaggaggaccgctaggacgatgggcgcggccgccgcgggcggcacgcgtcgaacggctcaccgcagcgcggctgcagcatccccggggaggtcccgcggcaagagccgctggagccacaggcgtatcctcctccgttccggcttgcggaaccccaaaccgacctccttgtccacctcgtccaccttggcacacaccggtgccctccactgcaatcgcattcattccctccgctaagcaacccgcagccattgctcgcggcgaggcagctcgaagaacctgggggactcacgaagcaaacccgagtgcgtgggacggaggcagcggcagcgcagacgggggacaagcaagccgccaccaccaccacggcagccatgccaatctctacggtacactcactttggattaatttgagccaagggcaaaatggtctttaatgattgtttctctctcctattcctctaaaaataataaaataattttgtcggtgtccagcagctaattaccatttttttacgatgttctacagcaaatacacgttcttacaatgtcccctacctaattgcactttttttatgtactatagcaaattttgcctaattaataatgtatggaaacatccctacatccctcttatcctcctgttactggatacgtgttgatggagtcgaattgtccgacaaacatagtgttgacagccacaattggcacatcccaagcaaactggatggtctggtctgctcatccaaatgaccagtttttgggtagttaaagattaccgttccgtcctagctagttttgaagctaccgcatgtgattgtaaacaccctgaaaatgataaaatggttgttcttggcattattgcttcgttttcttgtagtcaacaagaaaatactccctccgtccctaaatatttgacgccgttgagtttttaaacatgtttgaccgttgtcttattcaaaaaatttaagtaattattaattcttttcctatcatttgattcactgttaaatatacttttatatatatatatatatatatatatatatatatatatatatatatatatatatatatatatagttttatatatttcataaaagtttttgaataagacaaacggtcaaacatgttttagaagagtcaacggcgtcaaatatttaggaatggagggagtaaaatatagcggttgcttatgttgaataaagattggattacttttgcatgtgaaattatgaagtgtcttttttttcaaatgatgttctccctcatattgaaatcattacgtaataaacacgtagttgaaatagttagttaacagtttgcttcctgagatttattctcacaaccgtaattacaatctttttatgcacttaatgcggttttgcgcgtgacttatccaagtcgcacgtgtaccacgtggcgggtcatcgtacgatcgatcgtgcacgcttcttttttctttttttccttttttttcggttgcgcaactgctgtgtttttttttcttttttttctttttgccattaactaccacacgcatctaagagtaggagtcaatatttgaaaactttcaagttaaagatttaaaaaacttttaactcagatttgaaaactttcaagtcaagatttaaaaactttcaactcggatttgaaaactttcaattcaaacttgaaaactttcaactcggatttaaaaacgttaaactcggatttgaaaactttcacctcggacttgaaaactttcaactaaagatttgaaactttcaattcaaacttgaaaactttcaagtcggatttgaaaacgttcaactcggatttgaaaacttttaactcagatttgaaaactttcaactctgacttgaaaactttcaactaaagatttgaaactttcaattcaaatttaaaaaattcaagtcaagatttgaaaacttaactcaggtttgaaaacttttagctcaaatttaaaagctttcacttcaaaattcaaaataatcaacttaaatttgaaaactttcatctcaaaattcaaaacattcaacttaaattttagaaacttttcaactcaaattcaaaactctcaactgatgttgaagctgaaagattgaatttataaaatatcgtataaaaatcaagcgcgcaagtggaaaagaaagaagcgattccaaaaaatctggaaattttaaaaaggaaacgaaaaggtgacgccaaaataggagatctagagaaaaaaagaaacgcgtagggacgcggctagcgcgcgccggctcctttcctggcgcgcacgcacgcactagcaaccccctacttaatgtggcatgtgtgcgcgaggaaatgggagtagcagaacgtctgcacgccatgatgtacttattgtgcacagatgagtttgttgatttattggtttaattgaatactagatatgttaatcttggaagggcttgaagttgcaactaaagtaaggtaaatatgttctattatgtaataaggatggcgatcatgcatatctgttaccgtagataccggcactgtgtctgaggattatctgtactggtatcatggctctgtgggacactttatgcgctctcatgtagtaattcctatctacttccttcgtcccactagtctagatttgttgtaataggatatattatattcagtactaggttgatttttttatgggatgaaaggagtgtgttccattgtacgatggcattggggtgggatgcaagagtttagaactaattgcacatttttacaactgcgaggtcatagcactatggtaaaaattaaaaaaaaattgcatcaactatatattcttatgtttgaacgagtgtgtggtacttgagtttgcgggtaacaataattgtgtactacctccgttttttaatagatgatgccgttgactttttctcacatgtttgaccattcgtcttattcaaaaattttatgcaaatatataagatataaatcacggggtgcagg

SEQ ID NO: 9400 - DNA, 34268 bp, Oryza sativa
tgactcgtgggttgatgaatggatttcttcagcttgacataaaatttgtcaaattttgagccttgtatttgtgtagcccccgactctttgattagttgggaaacaactgaacatagagtcgagaactgtagcatcttgtcgtcgaatagttattgcttgattgaagatatgtgttgaagatgtccaagtagaaatcatgaatgttggagagccacttgttgtagtaaaataacacggcatcgcatgccgagatgtcgagattcacaacaacgtcatggttggtgatgtaacaaaacttgtgaagtagcagcaatagagtttgctggtaccgaagataataaagatgaagtcgctccaccatgttgacaaagttgtgttgccgtgatgaagtgaacacgagtcggcggcaacagaagcaaactggtagcgaagacgcgcagttgtgaagataaaagcactagttggcggcggcataaccagtcggcaacggaagacgatgatgtccatcagtagtggtagctgtataaaccagacgtagaggtgagggcactagtcagcagcagacgagacgaccagcgatgaagatggtaaggccaatcaacactggcagaatcatgcagccatggaagtgaagaaaccagtcggcagccatgacaaacgtaggcagcttgtgttgaagatactaatgcctattagtagtgacagcgatgtagccagccgtgaagaagatagcatcagttggcgttataacaggccagccgtgcaggcggtgacaccagtcagcggcggatgcggcggccggtcggtgaagacgtagacgcccaacaacggcagcataataggccagccgtgcaggcggaaacaccagtcggcggcggtcgaggcggccggtcggtgaagacgtagacgcccaacaacggcggcataaaggccagccgtgcaggcggaagcaccagtcggcggcagacgaggcggccggtcggtgaagacgtagacgcccaacaacagcggcataaaggccagccgtgcaggcggaaacaccagtcggcagcggcgaaggcaagccggtcggtgaagacgtagacgcccaacaacggcggcataaaggccagccgtgcaggcggaaacaccagtcggcggcggacgaggcggccggtcggtgaagacgtagacgcccaacaacggcagcataaaggccagccgtgcaggcggaaacactagtaggcagcggcgaaggcaagccggtcggtgaagacatagacgcccaacaacggcggcataatacgccagccgtgcaggcggaagcaccagtcggcggcggacgaaggcggccggtcggtgaagacgtagacacccaacaacggcggcataaaggccagccgtgcaggcggaaacaccagtcggcagcggcgaaggcaagccggtcggtgaagacgtagacgcccaacaacggcggcataataggccagccgtgcaggcggaaacaccagtcggcggcggcgaaggcggccggtcggtgaagacgtagacgcccatgaacggtggtgtgaccaaccaaccgtataggcgagggcaccagtcggcggtgacggaggcaggctcagggtgaagtcgtagacgtccaacaacggtggcataataggccagctgtgtaggcagagacaccagtcggcggcggtgaaggtaagccggtgatgatgatggccaccaatattgacagggtagtccagcccgttttgtatcctagattaaaggttgtctgtcgtgttccagtccgagttgaagagaaacttgacaaagtcgtcggcgacatatatggcccagactctcgtagcaaaaatcatatgcatgtgcagatcttctgttggtatgtgtttatgcatacaggtacatagttgttccaggcacgtacaaacgcatgcgatgaccagtaattgctggataagtttgagcattgatatagctcgcgtgtgcccgcagccatacgtcttcattaaaaaatactcgagctgaccaagtgaaaattgctgcttgtatgtactgctccgtgtttttgattttccatgttgagtcagccgagtccgagattgatccaatcagctgtcttatgcaactagccagccgtggtatcggtgacgatgacggtttgaagcttccaacttgatgacacagatctttgatcgccgttctctcgactggttaaaacccaagtcggagaaagagagattgttgaagtcgtcggcagcgaggaagtgaaaactcacgaatcgaagacgaagccgacgaatcatgaaattgattccatcacacttgttgacaggaaactcggcgaacccctaccgccgctgttgggcgtctacgacttcaccgccggcttgcctccgtcgccgccgagtggtgcctccgcctacacggctggcctattatgccgccgctgttgggcgtctacgacttcaccgccggcctgcctccgtcgccgccgactggtgcctccgcctacacggctggcctattatgccgccgctgttgggcgtctacgacttcaccgccggcctgcctccgtcgccgccgactggtgcctccgcctacacggctggcctattatgccgccgctgttgggcgtctacgacttcaccgccggcctgcctccgttgccgccgactggtgcctccgcctacacggctggcctattatgccgccgctgttgggcgtctacgacttcaccgccggcctgcctccgttgccgccgactggtgcctccgcctacacggctggcctattatgccgccgctgttgggcgtctacgacttcaccgccggcctgcctccgtcgccgccgagtggtgcctccgcctacacggctggcctattatgccgccgctgttgggcgtctacgacttcaccgccggcctgcctccgttgccgccgagtggtgcctccgcctacacggctggcctattatgccgccgctgttgggcgtctacgacttcatcgccggcctgcctccgtcgccgccgactggtgtcctcgcctatacggttggttggtcacaccaccgttcatgggcgtccacgtcttcgccgaccggctggcctctgccgccactgactggtgtttttgcctatacggttggcggactccgccgctgttaatgggcttcatcatctacaccactggcttggttccactggcgccgactggtgttttttgtcaccattgatggactgctttattcccacatcggctacttctgctgtcatcgagggaatacgacaaagctaagtcatcatttattttattctttatatgatattttgtcttttcctttgcctcactacatcaactggttcgccgttgactagtgagtcgggggctatagatgttatatcgtattttttaaacaattttcataatatttatcttgattgcttgcgacacaatctgagtacaaaagtacctatcgagttatggagttctatcttcctatgctttccgtttggtttgccaatggatggttgcctttgggccgattcctagcacccgggggctcgttggatggaccgagtaacgcaaggtgctaagtattattcggaataaatcaaaagcatagagataagataatttattttctgctcttaataattgcaaaagtacccgagtagtaaattctgattcgtgaaactttgttccattaatggcgaactcatgtcactcatatgcatgtctgggaagtgcctaggccgactcccggtgcttgggggctatgactagtcggacagagcgtttaaacgtaatgaatcatctgctcggggaaatcaaaattgacaagaggagaaatacatatttataaatattttaaaatacttgattttttctcgagtattatatttatatcagatactactcatcctatatgtttgttctgcaggatccagatccagatatgcataaaagggattcatggctttaagcttatctcttacgctccaggaatggatcagtcagaacatcaccaccggctcgcctcgaccgccgccgactggtgtttccgcctgcacggctggcctattatgccgccgttgttgggcgtctacgtcttcaccaaccggcttgccttcgccgccgccgactggtgtttccgcctgcacggctggcctttatgccgccgttgttgggcgtctacgtcttcaccgaccggcttgccttcgccgccgccgactggtgtttccgcctgcacggctggcctttatgccgccgttgttgggcgtctacgtcttcaccgaccggcttgccttcgccgctgccgactggtgtttccgcctgcacggctggcctattatgccgccgttgttgggcgtctacgtcttcaccgaccggcttgccttcgccgctgccgactggtgtttccgcctgcacggctggcctttatgtcgccgttgttgggcgtctacgtcttcaccgaccggccgcctcgtccgccgccgactggtgcttccgcctgcacggctggcctattatgccaccgttgatgggcgtctgcgtcttcaccgaccggccgcctcatccgccgccgactggtgtcaccgcctacacggctggcctattatgccgctgttgttgggcacctacatcttcatcgccggtcgtctcgtctgctgctgactagtgcgcttacctctacgtctggttatacagctaccactactgatggacatcatcgtcttccgtcgccgactggttatgccgccgccgactggtgcttttatcttcacaactgcgcgtcttcaccaccggatttctacttggacatcttcaacacatatcttcaatcaagcaatgactattcgatgacaagaagctacagttctcgactctatgtttagttgtttcccaactaatcaaagagtcgggggctacacaaatacaaggctcaaaatttgacaaattttatgtcaagctgaagaaatcaattcatcaacccacgagtcaactccaggagtcattatcttcatctttgcttcggagcagacattctacttcaacaacttcaaatatttcggtttggacgagttagacaacaacatcaactctcctccaagtgaagcatctacaatagccataacattaatttgatggattattgtcactgacatcatcaccagcacctctgcttcatcggccctgacatctccgctgttgctaatggatgattatgttttcgccgacttattatttcaccttgacggttgacctactatgcaaatgctgatgagcgtcttcgtcattatcattggttgcgacactgctattgactggatcaccgacatcgtcatcttcatcatgtcagttgcatttgtcgtcgccaactattttcttcatctccatgattggtggattttgtcatcgcctttgatttgcctcgtctgtcaccgactgattatttcgctgccatggctacacaactttatcgctgggcgctttcatcttcattgatggctgacctgactactgccgactggtttcttcgcctccacggctgtgcaacttcatcacttttgattggtatcattatcttcactaccaccaatatttttgccacctctggtgggcaatattatctctatgttggtcgtcttgtctttatgccaactgcgtcagctaccatcaatggacaattttgactatgacaaaaggacaagctatatgctcaggggctcatcaactcaagcgtgaggattatatctccaatttggacttgttccagatacattccacatggattcatagtcatgagtctattttctatgctcaaagactggaccaattattattccccgtaagggctatcaaccgaatacttgcgccagtcgggattcaattattatatttattttggagtatcccataagggataatcattcagatcagaagctattcatatgagctacacttggtctatattacccggaagatttattactcgggagcatgttacatgcgtcatcctttaaagggtgtcgaaggcatattttttggcctaggcctaatatgtctgcagcccatattttcaggtgtggcctgtcacgttcttttagggacttaggcactttttgcttaggccaaagtgcgcgtgatcaagtgcccaataccttaaaatccttttataccgcagttactcaactttttaggagttggtacaatgcatcttaaaaggtgtcaaacagtaaagctttatatagctgccccgctgactttttaatatagtcatggtgctgtttgggtttttaagcaattgattggatacaatatcgttgctttttgccacgtaagtgtgcatttttattgaccaatattatggcttaggctgattatatattgtggtcatttttcaggcggttggtaaatcctttatgagtttatttacacggattttataccacatatgccatatattttcaggtgtggtggaaccatgtgtcttttagggacttaagcacatctgttaaagcagtgtgcgcatggcgtatgcccaatactttggaaatttctttattcacaacatacaagcttctttatagctattttgctatgtgaattttcaatgatgtagccaactttaggttacactcatcatattttacaaagcagtcggtatatcacttggatcatattattcgaggattcacaccgcatatgctatatattggtatcaagtcacttggttgactacgattatcaaaaccactcgtcggtgcacctgactttattttccagccctccacagtcttcagatttggtaaaagtactcgggagaccatgacaaagatgattgaagcactcggctttggagtaatctggttcgagagaagattatcttttcgactgcgaaggtctcaggggctactgtggatattatgggtaccccatacccatacggcatggttatccgactagtcataggggataacttatatctatggaatatgtaatagatcatgactcgggtattacgtttccttatatattacggaacagcctaaagtcctggtttgataatattgtaaagtagatttaggaaaccgataccgtattggttaaggtttctatcttgtaatcctgccccccaccctatataaggtgggcaggaggccctctagggggcatgagacaacctgatcgtcagatcaatacacactcggtggattcaaatccccaaacaggagtagggtattacctctctttggagtagggtattacctctctttgagagggcctgaacctgtctaaatcttttgtctctgctgtttagatatcttgtcagttgcaggatcaaactgactggcacgcacgcttctcaacaaactttggacctgcactaaagctaagcagatctcccaggccaggcccgtgtgtgtaacaaactttggacctgcactaaagctaagcacgcccgcttctcaacaaactttggacctgcactaaagctaagtagattctcaacaaactttggacctgcactaaagctaagcagatctcccaggccaggcccgtgcgtgtaacaaactttggacctgcactaaagctaagcacgcccgcttctcaacaaactttggacctgcactaaagctaagtagatctcccaggccaggcccgtgcgtgtttttcgcatcaacatgtgacagcccagcccagggtccagaaacggcattggtcccatctcatttagttagaccacacctaacactgcaactcactgggtttttcgtcctcgctttaacgcaaaaattccagaatcggagttgtagtgactgggctgctcatccttataagctgctccctctcttctcaaattggcgaggtgggaactaaagctagctagctgtgacttgcttgctcgctagctgatgctgctgcacttgggccaaaggcccagctactgcttgggctgccggcctgctgctgctagctagcctttttttgtttcttttttcttttttcttttttttagggtgttacacaacaccatcatcaatcccatttaaattggactagggctattacctgataaggggcctgcaccagtataatccttgtcttctgtttcccaattctctaatcatctagtctacaagtatcactcgtcgataatttgattcatttttaaatatatacttttatgtatatatatagttttatggagagccgagggtggagaatagacacagtatgtggtctcttatcaactcaattagacaattctctaatctgccgtggctcgttttgggggacttcaacgaggccttgtggcagtttgaacacttttcagtgagacaaaggaatgaaacacaaatgcaatcctttcgggatgttctgcaaacgtgtgatttacatgccttgggtttttccggagtgccctatacatatgacaacagaagagagggaaggaacaacatcagagttcgtctggacagggctcttgcagataatgactggagggagatgtttggtaatgccagggtgtctcacttaacttcgactcggtcagatcattgcccaatatctgtttgtttctctcctgaggattgtcggccgtttcacacaaaatgtttgcattatgaaatatgctgggaaagggaaccatccctacaggaggtaatcactgatgcctggtcagagggtgtttcaaagtcagatctcggtgaaattagtactgccctccatagagtgatgacaaggttgcattcctggagtaaggtgaaggtcaagaatgttgggaaggaactagagaaagcaaggaagaggcttacttctctccttgtttctgatgcagagagcagtctggttcgtcaggcattggatcatttaaatgaacttctctatcgtgaagaaatgttatggctgcaaagatcacgtatcaactggctaaaggagggagaccgtaacacacgtttctttcacagcaaaggagtatggagagcgaaaaagaacaaaatttctgcactccgggatgccagtggcactgttcaccatttgacaaatgtgatggagcaaatggcaacagactattttaaaaccctgttttctgccgacccaaatttggaccactctagagttacaaccttaatccaagagaaggttacggctgagatgaatgaagctctttgcaaggctttctctgatgaagagatatcccatgccgttttctagattgggccgcttaaggcgcccgggccagatggatttccagcacgtttcttccagcggaattggggtcttttaaaggaggaggtagtgaaggcggtgaaggaatttttcaatacgggggtgatgcctgcgggtgtaaatgaaactgctattgttctcatcccgaaagttgatcagccaatagagctgcgggattataggcccatcagtctgtgcaacgtactgtataaagtggtctctaaatgtttggttaacagacttcgaccgattttagatgaacttatctccccaaatcaaagtgctttcgtccctgggagaatgattacagataatgcgctcattgcctttgagtgctttcattcaattcaaaagaataagaagttgtcatcagctacttgtgcttataaattggatctgtcaaaagcctatgatagggtcgattggaagtttttggagcaatcaatgtacaagctgggtttcgctcattgttgggttaattggataatgtcgtgtataacctcggtgagatattcggttaaatttaatgggaccctgcttagcacatttgctccttcaaggggtttgcgccaaggtgaccccttatctcccttcctcttcctatttgtggtagacggactttcgctgttgcttgaggagagggtagcccaaggagccttgtccccggttcacatctgtcgtcgggctcctggtatatccaacctgctcttcactgatgatacccttctctttttcaaagcaactagtgagcaagcaaatgtagtgatgaatgttctagcagactatgcctggtgcactggtcaactgattaaccaggagaaatgctctattatgtttggtgaagcttctcctcccgatgtccaggaatctgttagaagtgttctgcaagtggggagcaccagctttgatgacaagtatctgggttttccaacgccggaaggaaggatgaataaaggcaaatttcaaagcttacaagagaagctgtgcaaaagaatcatgcagtggggtgagaattttctgtccagcggagggaaggaaattttgattaaggctgttttgcaggccataactgtttatgttatggggatttttaaactcccagattcgatctgtgatgagctaactaagctcacccgtaacttctggtggggatctgaaaaggggaagaggaaagcacattggaaatcttgggactgtatcaccaaaccaaaacattgtggtggcttgggttttagggactttagactgtttaaccaagcgctgttggcaagacaggcctggagactaatagaaaatcctcacagcttgtgtgtgcaagttttgaaagctaaatattatccgaatggcagtctgatagacacttctttcggtggaaacgcttcctcgggttggagagcgattgaatatggtttggagctgttgaaaaagggtctcatctagcgagtgggaaatggcaggtcaatcaaaatctggcgagacccatggttgcccagggatttttcacgaagacctattactccaaaaggaaattgtaggttaaaatgggtggctgatttgctagaccaaaatgggagctgggatagggatgtcatctctcagcttttctggcctttggatggtgaaataatcaaatcaataaggctctccagtcggcaggacgaggattttatcgcttggtatcctgataaaatgggtcagttttcgattagaagtgcttatatgttagctgttcagctcgcaaatgctggggagagctctagctcctcaggaaatgatactaagaaagtgtggaatcatgtctggaagtgtaatatcccccaaaaggtcaaagtgttctcatggagagctatctcaaactgtcttcccactatggtgaataaaaagaaacgaaacccggaattgtcggacgtctgcagtttctgcggcctggagcctgaagatgtggcccatgctttgtggcgttgtccgcatgccaggcgatactgggacctaatgagctctgagatgcaagtacaacgtatcctgtatgggtctggggagggttctgattggatccttgactttctggaatcaatttcagaggatgatcgtcctgtctttcttatgtcactgtggcgaatctggtatacacgaaatgagattactcacgataaagcggcgccacctgtggaagtttctaaacgctttgttcggagttatgtaaactctctgaaggaaattaaagctcggccgaatgcaaacttgggatctgggaagcatgtaattggggaagacaggcccaagtgcaagaagcaatctgtcttggcaaaatgggagaaacctccaagtggatggatgaagctgaatgtcgatggctcctatcaggaggataacataggggaaatcagtgctatcctgcggaacagcactggagatgtaatttttgcagcctgtggctttgttgagcagtgccagagtgcgctggaagcagaaattttggcttgcaaggaaggtatcggactggctctccaatggacccttctaccgattatcattgaatctgactgtgcggaggcgttacagctgattctttctgaagggaagctgcgatcggtgaataagtttttagtcagggagatccaaggcatggtgaagggggctagggagatgaaactgaagaaggtgaacaggaactgtaatcacatcagccatgttttagctaataaaggcaggtgtgagtcccttatggacttttggccggacggaagttgtaactttatttccgaagttatgtctatggacagctatggctaagtaataaagttcctgtttttccccgcaaaaaaaaaacactaagtccctatttatatctcaccctaaaatttttcaccctgtcacatcgaacgtttgaacacatgtacgaagtattaaatataggctaaaaaataactaattgcacagattgcgactaatttgctagacgaatcttttaagcctaattgctacgtgatttgacaaagtgatgctacagtaaacattttttaatgacggattaaataggcttaataaattcgtctcgcgggttactgacggattctgtaattagtttttttattagtgcccgaacaccccatgcggcacattatataatacctaatgtgacacgccgaaacattacacccctagatctaaacaccacctaaatgtgacacattctagtacaatgaatctagacagagatatattcaaattcttgtagtaataagatatgtcatatcgttttgttaagacggagagagtacacagtacaattgcgttttttcattgaaaaattaccaacttgttgcttgaagatgcagctacaaactactcccgctgtcccacaaatattcaaaccctagattccgaaggtagaaagaaggagaaggacaatggacaaaaatgtccctatttaatagataagttatgttggtggataggtagttgaggggtattgaaagaataaaatttcttgatttataagtcgatggtagataagaatataggagttgatttattttgggacaaattcaaaatctagaagttgatttattttaagatggagggagtactatacaacaaagtaaacactagcataagaacaattaatgatatagaatctctaagagacttgggagttgggagttaggacagataggtttagggtctattcactgcaactagctgtagccgctacagtgactacattgtttttacacactgttactgttggtgtagttgcagttgctgctgcagcaagctgcacgaacagggccttacacgtgacaaacaggtttggtgacgatccaatcatccaatggaagaatcgttccgtagaattgttaaccgttttaaaatcccttgtcgatcgccacaaaattaaggacgagccagccaagttggctaggatatgcacatacaacttcagttcaatttgggtggtggctactatacggaatcgctaactttcatttaatagaactttcaggtactacaataaatccatcaatctcaagtccacaattaatgtcacgactttatttcttggagtttgaaatcaactatacataaaatactcctagaaagaaaaacataaatacaatgtaatatgtttacttcctacatcctaaaatcaatattttagttacctagtaacctagggcacacgagagtactatcgaaattcgtaatactagtttaatagtatagccaactattagctccaaatcatctatagtaatttaatagcaaattcatacaatagttgtttattatactattaatacatggtcctacttgtcatacacacattacgtcttagagtctgtagccagctgcttttctctcttatcttttatctctttaaaatatttttatagccaactaatagtctgctattgtatctgctcttagttgtattttgggcacttgtattttagaatggaggggtagtatcttatttagtgtccaaactagctagactgataggctagatattaatttgaaaaaactttgtgtacagtaggtcaattttttttttcattctcagtgtattattttccaggttgtctatcaacaactacaacgctgagcttgtgaggttagggcatccacaatgtatcactaaagtgggcattatgcaataaatgcagctctaaggacaggcaatatacattgtggaggtagtccatatggcattaattgctaaagcagtctttagctatatgggctggccacaaggaaataaaatacaatactttttcagttcactgtgtacaaatgaatataaaatctaaagcagttggtgctggtgcgtgagcagccgagcaggtgtccgttgaagtagccattgctgctgggtgttggctctccttctccatgctcctataaaacagaccaacaagagatttcagtttgtatctcttcatttcatcaggagatggattcatccaaccaaaaattcatagatcttctcagtcaagactctccaaaccatgcagaaaagcctagccacaactcccctccccaacaattccccaataattttccccaatctcagtttacccaaagcttcaacccacattttttacacaatttctatccatttcattccccaagcaactatccaccatatggtcattctcctcccagctttcaaggtactcctccaagctttcaaggtattccacatcaaggaaattgggcacaacctaatttagccagcttacaaggtttccatttgcaagaaaatatggtgcactcaccaaatcaggggtttggaactgcaaaccaccaagcaatatttgcactgcaacacccctcagttagagccactcccaacagttctttccatgggtcggagtcatcgactccctgccctgcaagacaacaagaagcgccagttaatctcgagtcgtcaagtgaaagcagcgaagacagaggtgaggagagcaacacgcaccaattggacagaagaggagaacttacggttaattagtgcttggttgagcaactcggttgatcctacagatggaaatgacaaaaagggagagtattattggaaggatgtggctgatgagttcaataacaaccgtcctacaaatggccacaagaggacagtcaagcaattgaagacacactggggaaatgttaagaaggacattgggaagttttgtggagtttatgctcaagttagacgtacctgtaccagtggacactctgatgacatgatcatggaaaaagctcatctatggtacaagaatcaatcaaatcagaagaagcctttcaccttagagtatatgtggagagagctcaaggatcaaccaaaatggcgaagtattatcaaaaaggaagaaaacaagaacaagaggactaagatttctgagtcaggagcttacacatcctcatcaaaccaagagactgaagaagaatcatcaaacaaagagagacaccccgagggacagaagaaagcaaaagagagattaaaaggaaaaggaaaaggaaaagctcaatcttctccgttggggaaccagccatctcagaacatagttttgtacaacgaagctatgaaaattaaagctgaagcattattgaaatcagcagaggcaacagcaaaatcagcagaggcaaaacgggaacaaataaggatggaaaagtggcaggcatacattaaactggaagaaaaagatacctctaattttagtggagaagctgagaaggcatgaagctatgttgaacaaattatctaaagaactagctgaggaataaaggagaagcatgttattgttccactgtagtgcttagtgtatgataagtttagttgtcaaatttggtgtattgctgatgtacttgtcattttcagaatttagctctagtactaatgtaaaagcttagtgtacgattaatttagttggcaaatttttgtgtattgttgatgtacttgtcaatttcagaatttagctctagtactaatgtaaaagcttttactatatccccacttgtattatgcaagaaatcacattttttaccgcacatctctgctcttaatattatttttcattcatgagtcatgataatcttcatgaatacattgcagtacagaaaaacccatacttacaagatgtagggataattttcttcgcaattcagttattactccatacctgcacatataaccataataagaaatatagatgataagcaaaacatagctgttggaatagtgccaaaaggaagaaatagttgtcacaaactagctgttggaatgctgccaaaagtaaaaaatagctgttgcaaactagctgttggaatgctgccaaaagtaaaatatagctgttgcaaacaagctgttggaaatgtatcctacatataagagatgaagtgaggaagacactactcacattctcactacccacttcattcagcctcttggaagataccactcccctctcactgccccctccattcagcctcaaccaacttaggaaaatgtcagccaactcccaagaacaatctaatcgtatagaagattctctcaccagttccaatctagaagagttgatgtgggaagaaatcaatgaccctatggaggctgaaattgaagatcagattgaagcagagctagaggcagaactagctggaccatctactcagcgtgggggctacacacgcaggtacatcaacagggatcatgaagaggatcataacagattgtttgctaaatactattatgacaatcctttgtacactgatgaccaatttcgtcggagatttcgcatgagaaagcatctatttttgcgcattgttgaagctcttggtgtttggtccccatattttcgtctaagacgagatgcatttggcaagatgggtctatcgccactgcagaaatgcacggctgccatcagaatgttggcatatggtacaccagctgaccttatggatgaaacctttggagtagcagaaacaacagcaatggaaagcatgattaattttgttcaaggtgtgaggcatttatttggtcagcaatatcttaggaggcctactcaagaggatactcaacgtttacttcaatttggagaggcacatgggttccctagaatgttaggtagccttgattgcatgcattggcaatgggaaaattgcccggttgcgtggaaagggcaattcccccgtggtgattatggagtatcgactatcatgctagaagcagttgcctctgctgatatatggatttggcatgcattttttggggttgctggttctaacaatgatattaacgtattggaccagtcaccattgttcactgaggtactacaaggaagagcacctactgttcagtttacagttaatgggtctgactataatatgggatattatttagctgatggtatttatccagagtgggcagcatttgtgaaatctatcaagagacctctgaatgacaaagctaaattgttcgcacaacgccaagaatcagcaagaaaagatgtggaacgagcttttggggttttacagaaacgttgggccatcatacgtcacccagcgcgtctttgggaaagggaagaactggctgatatcatgtatgcatgtataattttgcataacatgatagttgaggatgaaagaggcacctatgatataccggatgacaatacatatgagcaaggacatttttcggcacaaatggcagggcttcaccatggcccaatctatggatttgaagacgtcctagagaaaaacttgttgattcgtgatcgagcaacccatcgtcgtctcaagcaagatttgatggaacacatatggcaaaagtttgctggccaacaacattagaatttattacttttatcactcttgactagtttattagtttgttattaatcttgtactttgctagtttgtattcatgctctcatcttaatttgctagtttgtattcaggaaccgaatttaagatttacatgtttcttggactgagattttaactatttgtattttgactccgatttgttctcttttacttttttttaaataactcaagcacaaccagaactggatattcaaccacaagatgaacacatatattattgttgcactaaatgaatcgagctgcatgcatacgacttgcctccagcaaccagatcaggacatcaataacctctagtgccaagcaaatcattaaaatcccaaaggaatatagaactaggtgatgattaacctgcattgcatctgtgctttcgtctcagctgagagacgtgcctgctagcttcttgtcacaagctgcagccttgccgtggccgtccgtcccccgcgcgctagcttgcgggactctagccggccggccgctgcgcgctcgccgctcccgcgatcggccggatggccgtctggccgccacgcgcttgccgccggctgccgagttcacgcgctcgtcgctcccgtggctggccggctcctggcagccgtccgctcctccagatttccgcccggcgacggtagggtttcaccttgctcgcgcgaattggggatctgaggcggaggagagacggggaagttgagaagaagagatattttatttacacgtgggacccaccttatcttcacataggctacaaacattgtgagatttgctataactgatgcctcctgctgtgggacccactcttatgggctgcttcatacatatacattgctcatgcccttatatatttgcttcctacatttctctcctccgaacttctgcacatgagaagaaacaatgggtaggttcattcactattctaagtggcaggaagtaaagactgtcaacaattatgctttgtttataggatacatgtcgatggccgtcagggtgatgggctatcttgtggttttatggacaaccgttatcctccttggcggttttgtatcagcgctagagaagaaggatttttggtgtttcacaataattaccctcgtccagacaatcgggttagtttggttttcaattagtcttgcatattcaatttttcactactagggttgccccgtgtattagaatagctagatttgctattgattatactttttatatataactgatataggaattcagcccccatgtctacatatggatatacacaatcaaagagttgctgcctataccaaatttgctatggaattacaattgtgaatatcaccgctagccatgctcagtatcaataatgaagttataacttatgaaaagaattagacaatatagattattaatgtgtttatcaatacaaaaataaagaaattccaattgatttacactgggaggaaaaggcgccatgcatatactacctctatgcacaaacatatgacattggttagtttaattttgagctaagcaacgtcaaacaaaaaaaatatggagggagcattaatttcctttcactctttcagggtctccactgtatttccgagagaaaatctgaagaaaattgtgttgtcgtacatcctgggctttgtatcgactacatataccttttacgtacccaaaaacagcaaggatgacaagaatattagagctgaaaatatgaaggatgaagatggtgatggtgggcgcaggaccagcaaggaaaaacccaagcattggccacggtggctgcgtagattggcggcatttgtcgcttatctggtacagcagctggtgttcgccgtcgtagcgggcctctcgcgcttgccgtagcggtgctgtacgcttgcgggctggtcatcaccaccggcctcgccgcttggcgcctgctgcatcgcgactacggcgacggcagcaacaacctgcggccggcgctggacgtgctctacaccatggtactcctccagggcgtgctctcctactaccgcttctcctcggacttctggcaatcaaggctgacaaacaacgtggccaaggcgtacaacttccaccactggcgtcatttttatgcattcgtatcgttgcgtaggtacatccatgaaacgaggatcgggtgcgagaaggacccgtccttcgccaaacgaaggaatttggttaagtatgccgtggacaccatgattgagtctgaatttccaaactgctggagcttcgtctgcggggcaagcatcctcggtgcgcttcttgagaaccccaagctggaagagcaacacagcctcatcaaggagcacctggcctggtcgccctccggcgccggcgacttgctccagaagctggttcagtcgttggatcccgcgaggggataccattacataacaagcatctccgcggcgcggatccttgcacacctcgccggtgatctccgccgcgagcagctcaatttcccgcaaggcatccactcgattgcctcgctggtggagccccccggcgatgagaagggtgacgagtacaacgccttggaacacttccaagagctgatggtggagggccttcgtctccttgcgaaactcgtctccgacgaggaatggtgccgtgtcattgctgagaaggaaggcctgctcgccaagatcatggtgccactacgttctgacatgcaccacactaagtaccactccgtttgtagtgattcggagaggccgatctgcagagaaatgatcggcgcgtccatccaagtgatgcgccaatctggtgactactcctggcgccaccggcgagatggtacgctgtgaaatctcaggcaacacggacgcaatgaccagcctggagagtattgtccactgcgaccgatgcgatgattgcctgctcatggaaggagcactggagatctacagccgactgcggcgtggggacgacgcaccttcgaccatagcaacaatgagagagcatttcatcaagagactggtgctcatcttcactcaacataccactgctgaagatgacagagtcgatttgctggctggtgaaatgcttgcgaagctatgttcccatggcaaagaaaacaccaccaaaatcctgcgagcaaaacaagatgtgatcggtgatctcaccggcatgcttgaagacaaaatcaccaagtgcggtataatcgcagcgcaaattctggagcatttgtgtattcatcactctgacgatgatgaatgtgcccagaacctcaaagaacgtataaagtttgggatgctaaaggtaccaaccaaaaaaaaaagaagaagcatgcatatgctttgtttttgtcaacatgttatactgatgatagacttacttttgcaggtgcttgcaaaaccgcgtgacgaatatgtgaatagagaaactctcacagcagttttatctctaagtgtgacgatatcacgcaacttaatgaatgcccgagatttacctcctctgttcgatgctattaccagtgaagccggcggcttcagcattctaggtaaggtccagctccagaagatgatcgagagatcaagttgtttaaatacggccaacgaactgaaaacagtgaagcttgtcgcggatttattaatactaactgttaaacatggaagccgcgacgccatacgggacgcaaaggaattgattgaatcactgtccgaggttgcgaaagaaatatcggatactgagaacttcatggttatcgctggcggtagcgacccaaagacccttgattctttcgtgaaagaagcagaggaccaactcctgcgcagagtcggcagagaggatacacctgaaatggcagtggtaattcaacatcctagctctgtcaacggagcccaggcagagtaaatcatatgcatcatttattcgaaaataaaatcatgttcagcctgtactttgttaatctgtactctaacaatcgttgcaaaaggaattttagtatccttgaagaggtaccattggatgccatctattttgaggtagttgtcacatccaatgttcatttgctaggcatgataggcattaggctgtagacagtgcctatcgctagacatacggctagtcatcgtcttctattttatgatatctccacttctcttccggcgagcaggggcaccggtgtcattgtttaggacaaaaaaatacgaaaatatctccctctatgtttagagagaaaataagtgcgggcgtgccagtgtacctaagtacacaaaataaaacaaaagagatatagaaacacatgatctttattaattgaattaacaacatacattttccatgtataatataaaatgcgcgcgccattgcctgtcgttggacaaatcttgacatcagcgatgtggtcttctgattcccagggcctcgagaagctcctggttaattacctctgcaggtttaggcctgcagagaacctccgattaagctgctagtggtcgtctcattgtctttgcttcgcattcaacatgcatggttgtgatggtgatgtaaatgtgggtgccggcagcgatccacggcctcgtcggtccgtgcgccggtgttggtgacgtagccttagcgtcggcttcgcccgccctcgtcgctccgcctcatcagtcttgagcgacgtggtggtgtagatagattgatcttcagcatgcatggaactcgcgtagcttggacggtagagaagtcacagcagcgacatcgggatagtattaaagggaagaagagttgatgacatcagttggtgtacgcgacagccgaatatacatggctgggcacctcctggctaggtgagatcaaagtgacgaagagttgacaaagacggttggtgtagatggcagccggaataaacatggctgggcacctcctgacccatcatgccccttatacggcagggacttgtaatgaaaatgttgatgaagaagtcggtgcagacaacagccggataaacatggcttagcacctcctttagatgatgggtctactattgatccagttgatatgataacgagcccgtaaaaggggctctatgagggcgccggtaacgacggcgaccttggaagaagtaaatgcctcgtcagcggaaccgttgagggcatttgttggtgtagattaagcatgaatggttccctggcatcacagatgacaccattcttactttatgctgatgtagactagcgacgctccaatacacggacaagcggcgacatctcgatcccaacgaagagggagggaatcacggacggacaacatcgatcgtgattaagaggagagagcacaacagacggatggcatctcatcttggcgtgatgaagtgaaagcattgtagacagatagcgtctcatcatgtggtgtagagagagagatgtcacggatggacggcacgacaactccggcttggcgaagtgcaggcgtcatggaagaacttgatgacgattccgcctagacgaggtgaagtcttcccgaacggacttgatgatggtgtgcgggcaccaagcaatggcgctccggctttctcctcgaacggcatggcgatgagtgtgaggaaagtggcaggaccgtcgaagatgattgagtagacattgacggtgactaaagagaccgcgacgagtgtgaaggcgtcgccggccagtggagtctcagtgagacgtcctcacacaatagtgatcacaacaggggcatctttagggctcggcgtcggtgcgatgatgccggcacaacggcgggctttgatggggtggcactcggtggacagtgctaccagcagcttgatagaacagcgagcgtctgggcgtcgccgatacggtggacgagatgatctcctggttgacgatggctctgatccatcaggatggcatgggcggctcagcgacttgacgacgtccgcggatgcgggtagttcagcgacattccggcagttcgaatgagacttctgtcgggcacggctcagtagtaaccatgcttgctccgatgacattctgcgcgctccggcggggtggcatgatgtcgacctcttacaaattagcatgcccgacgaggtggttgatgtagacggcagccggccatttaaccacagctcagcatcgaattgaaaaagcttgaaatcaacaggatttgtttagccatcgcattgacaacttcttatgcatggcactgaagcatggtgatgatgtgtcaccctccggttggtcggccacgttgccacaccatgtatttgctgaatggagttgactcggcatgctgctgctttgcttcggcttgtgttgctgccatgcgatgtgtgtacatgaggccgccgatcgccgatctgatctgtagcccgacgatatttgttgatgtagatcgataaccaccatcatctgcacgcggcgccgctgccatcgtgaggaagatagtatcgccgtcgtgagaacagtagcagcgccgaacatcggccgcgtcgggggaaagggctgcggccatgatttgatacgctgtgcgtggtggaagcaggagtcttggcagtcgacggtggctccgggcctccggcgatcctggcgtgccccagcagagcagcgtcacgacgactccgacatggtcagtccgccgcggtgaaacttgcagccgacaaagcgaggacgcccgacatctcggcatctcggcgacgccgcagtttcaggtggatgcatcaccggcgactcgattggcggtgtcgactccagggataaccagcatctcgtcgactcggatgagcggtgggcggtggcgccgatacgattacttcccggggagcacgtacagaggatgcaactactacggcagcaacagcacccgcatatgtacatctcctacgcatgcatgcatgttctgcaacaagaaaagaaggaaccaatctaattagttcttttgccttgagcagccattgatctctgcttgccgatgatcagagcgccgcgtctcctgccggacgccggtgctccggccgaagtcgctcgccgccaccgtggatgggttgatcgtcaatggatagatgtgtgttgagtgttttcgggatggatgtgttatgtgtgttgagtgttctcgggatggaagtgtgttgatctatcgatcttgttgatgccaggagttgatggatggatcctctcttttgccgtggttctacatctgtgccccctcgactccatgatcaatctgtaaaaaagaaagaaagagaaggcctggcgtgctggtgtagatgaccgtgcactgcctctctcctctgtcattctgtccagccgccggccggcgtgctgtaccttctcatcaggaagagggatggctggacgaatgtcgatcgcctggcgccgtctcttgggtgaccgcctgtaccctcgccgagcgtcggatgcgccggccggcagccaccggcttctctcgtgccgtcgtgttcttcctccctccgtgttctgccttcggcgcagccgccgccaatggatggattgatgggagttgaatgactgtccatgcatatatgtgctgaaagcctgaaatatacatgtagagagagaaagagataaacagaagaactggacaatgttagatgaaatcgtcctggacggcgtggcgtcgatcttgtcgcagccttcgtctccgggtagattgatcttccagcatcgagcggcgcccccggcgggccacacttttggtgtgccatgctgcgccgccttcggccggccggccgcgcacacgttggcgtgcccttccgccgaggccctgtgttttctcttgcgtgtgttcttcatatatgtgtagatggatctccttcttctctgttgtagttctccatctctgccccccccccttatggctgacgagctgtgccttttataggcggtagccgcgtacgcgagacccggcgccgccagcgtgtatacgactgcgtgatccgatatctccgcacagtcgcgcgcgatggatatatactatccggcagtttgtttggatggatagagcttgaccgtgcttatcttctgatctgtttgttgcttcgatcaacttgtagatgagggcggctatgcgcatgcatgtattagctagactgggctgccattcttgttggtttgccggtctgctgggccatcgacggagctctcgaccacacgcgtgcatgtgtgagactttaattaatttgttggcttgctctctatagctcagtgcgtgcacacacatatatgcttatatgtatagccgagcacacatgcatacgtattcaggctatgtgaatcagtacgtcatagtacatgcatgcatttgcatggcccatgcacgaatcaatatttaatgaactggcttagcacattggcattgctagctaaactggttcctgaaaatgcccatcaatatgcaatatatatgtggttatatattttgaaagtatgtacaaaatccggtcaaacagtcatcaacctgttgaccagtgcgagctcgaacttaacaataacaatacatcatacatgctagtacttgattgttttcggtccaaattttcgaatcgaaatttccagaatttccgaaattttgggtctttctatgggacggacagcgcatggcggtgtggtagccggactgctggagccgaggtggagcgattggctacggcattctccgccagggataaagctatgctgccagaggagcaagagcgacgtgatcctgatcggcgtaccgtagttccagatccgtaaaaaggggagtggtcggatctagctggagcccgggcgatcaccatcacctccctcgatcgcccttcctcaccggcgctggagagagggggcgggcagcggccggcctcaaaccgccaaagaagaagcgacaatgtgaacgtggcctcagaacgacgccttgggtctccctgttggagtgtataaaagtgaattgcccgtctttccttatcagcttaggttttaggtgcaactggttagtgcatgcaacttaatatggtatcagaaccagaggttttgagttcgaatcctggcggccgtcgcgccgcatgaaactaccacatcgccgtcgccccacctcctccaagtagagctccgcccgtggcctgcgagaacggtgccccataccgtgctcgacctacaggctacagatcaaatcctccgcgaatcttcgccggtgcagcgctccacccatcacctaccgcctaggctcgtcgccggcaccttattgccgtcaccactcaccaggtcatgtgacgtggaaccgtgccatgggacattgggacccggttgttggatttcttactagcagaacagaagtttttcgtggaatcctttttcttttcttttcttttcttttttgtaaatcactcaaatctttcgtgggagtactggtttttccacctctattccgcacattgtgtcatcgttgtgcatgcctttctagcttttggggtaaaaggtgactaacctatttctgtttttttttttgttgatgaaaaggcaatttgatttctttaattccctttcatttatacaacagtactggaaaatactaacagagtttacacgactggtttgttatcatccaacacaaatcttctcaaaatgcagataatgatatatcagcaaggcaagaagctaattaaccctctgctcatacgcctacgccattgggtttacctctacagagccacggaggtagattatgccttccttctgtccatccacaatctcctgcgcttcaataaaaagggagacgagagtcttcaacggaggttttgcgccattgttgctatcggctaagctcaggacgccatctacgccgtacatctgaatggaaacttcggacagatagcccatcaactccttcaggttttcctcttctttggcgtagctgctgctccttagtcttaacatcgatatgaacatcataaaaattagcttcacaattctcagccagtgagccgtgagttcatagtttggcaagatgtagatgcataccatctcctttagcttcccaatgggagtaaaggtagcatctccagggaaaaccacatcaaccagttggaccaaatcttgatcttggcttacatcaaatactgttgtaattaaatataggaaagcctccagcaatttgctgtctacacggagccaattgtctccatcttggacttcaatacttacgctaccgggtggtgaaaacatagctttatctgcttttgttcccgccgtttggatgtctccacacccaaacatttctccaagcacctgaaataataaatttgtacagaagtttaatttgacagactatataggtgcgtggctaggaattgagataagagttcagatcacactatatatgtgctcccttcgttccaaaatataagaacctagtatcagatatgatattttatagtactacgaatctgcacaaacaacttatctagattagtagtaataggaaatatctaatccagtcctaggttcttatattttgggacggagagagtattaccaatggttcactatttgatacaaggattaattacctttggcatcacatccttgatgactttgttcaattcaccgaggtactcgtcgtcataggtgtagtggttatataggtgagctaggatttccgctgcacttattctgctctcgttttctttagagtgtagaagcatgtctttgagcacaccaacgacattgccgtctgcctggaggatgaccacggcaatgctttggctttcgacgcagagcatcgccaatgcttgagcagccgattttctgacagacatatccttgttatcatcggtgaagatgcacagcatatacttggctaattcttctctgcttgccacgctcgtactcatagataaagatttatcaaaggctagctggctgaggatcttgatggccatgatttgcagcagtggcttgcatttgctacacttgggaatgctgtccatggtggtgacagcctccttgttgccagagatctcacggcggagcctgacgccggtcactccgggagcaacgacgagaagtgccaccagttgcatcgactcctctacaaccgagtgccacacctcgtggtcgatgcggtggagcaggtcggagctcatgggcgccatgatccttgagaggagaccttcagtgtcgcagatgactctacaattgtcactgtgagcagcgaggatccggaggattttcaggccccagtgaagcatctccatacactggtcaagcttcagggtgtccttgaactgctccagctgtggacctgtggtcgatagctcgagcatgtctgatatgcattcgatgcctcctggcagcttcttgaggtggatgtcgacagcgaagtattcgactatcctcgctgcactctttgtcatattgttctgagttgggctgcacctggtcgcagcctctaggagcttgacgagtatgtgggaagaagacgcggatccggtgagcagctgcctcatcagcgcatggtgtccctgcaactggctttgcacgagagagtcgataatcctcacgccattgatgaaattgtcagtgtcgatcgacgaagattctatcagtccaatggcatgtgtgaccatgttccttcctctgacgaacgacgggtccttcatgcatccagccatggtttcgaccgcgtactcacgaacaggtgattttgccccataattgagattgtacttgtcggccactttcctctccatcttccttcccgttgtgatgaaggtcatgccgtagaagtaaagcacgccctgggcaagagccatcaggtagaggacgcgcaacgccggcttctgcaggttggcgccgccatcggcggcggcgttggccatgccgaagcccaagtcacgccgtgtgaggcggaacagcgagatcgcggtggagatgtacatgcccaacgtgtagacaaacaccagagggacaacaatggtggtgaacacaaggagccgaaacaactgcaacgtagcatacgctacgatgggcccatggtcaagtatatagtgtttcaaccactcggccacaatcttggccggagtcttggccggagtctcggccggagtctctgccggatcagtctctatcttgcgaagtgaagaatatgcaagagtatctgccgtaatctcggccttttgctcggtcgaagttggaggcgacttgggtgtgctaaatgctgtagcgagtaagcgggtgactccagaaaacccctctataactccaccagtaatggcaccggatgccctgttgttaatttatatttgatctcagctcataagttttctcgagagagggtcaacggataaacataaactacattaggcgattttcatatgcaattttgcacgaaattcattttgcatgtagaataggattcgagttgcatctcgacccagtgattagcctgtcctcaccagatctgatggctgcgaagatttcactgtcacgccatttctccatgacagggaggtggcatcaactccatctgtcctaaaataaatccaatattggatttatatgtgtgaccaccttcatttttaggattagatttattttagaacaaagggagtagagacgacaagagggtagatctggtcaccaagtcacatcttgccgacaaagacaggttgacggttgaattttgatttggctggacttttcactttttggttctttttgaaaacttatttaatttgtaaataaatccctaaaaaagcttattctgggaatggatgcttttcgccgagtcaacatcgtcattgtattggtccaagataacagagccaatagcattgataacgtccccctaacctcctcgtgaaaggtaggtggtcacttatatgaagggggctaattaagtaaggggggcgacgccattgtttttggcgccgatgacatatttgtacatatttttttattataaataggtccctttttaattataaataggtcatttttcaaattgttttacaagtaggtcctcgacgtcaataacattgacattgtcccttttctacaagtgacttagctttcgcggcaagcctatagagatgacgtcaatgtcattggcaccgtcatgttgttagactaaggtgctgaaacgttgacgttgcaaaaggattcatttccgaaataagtttttagggtctatttgtaaaataaatttttaaaatctattatattattaaaggaatagaaaaaggagcctccacgttcgctctcatggcctagaaattctcacattaatcggagaaaaagaaaaagcagagtccatatagaaatacaatttagaaatagctgaaattcggaattaaaaaataagaaatattagaagaggagactatagtccatatagaaatacctataggaaataactgaaattcggaattaaaaataaggaatattagaagtagagtatagagtccatatagaaatacaattaggaaataatagaaattcggaattaaaaaataaggaatattagaagtagagtatatagtccatatagaaatacaattaagaaaaaaatagaaattcagaattaaaaataaggaatattagaagtagagtatagagcctatatagaaatacaattaagaaaaattagaaattcggaaataaaaaataaggaatattagaagtagagtatagagtccatataggaatttaaaactaaaattcagaataaacataatgaaattaaaagtagtgtttagagtccgtacaaaaatacaatttacaaataactaaaattcaaaattaagaaaaatatgggaagaagagtttaaagtcaatataggaataaaatttagtagtaactgaaatttgaaattaaaaattaaagaatattgaaagatgagtttagagtccacatagaaatacaattagaaatattaaaaattcagaattaaaaaaatatattaaaagacgagtctagagtccatataggaatatatataatttacaaataactataatttgatattaaaaataattaataactaacacgtatataaaatacaatatgaatattacacattagtagtttcgtaaagttattgcaaaatttaaaattatgttgtcattttgatatatttgaataatacaattcccacgttcactatcaccatctaaaaattcccacgttaactgataaaaagaaaaaaaagtccacgtagatatacaatttatatctaaaattcagaatagaaaataaaaaagagttcatgtaaaaatacattttagaaagaactacaatttgtataaaaatttaaaaataattaatattgagagaagagttcatgtagaaatacaattctgaaatatctaaacttcggattaaaattaaatggtattaagagaaagagtccacataaaaatataatttaggaacatgtaaaattcgcattaaaaaataaatatctgataagcaaagattcatgaaggagttcagtttggaaatattttaaattaggatgaaaaataaataatattatgagaaaaaaagtgtagtttctaagaaatgccattacaaatatcttcaacacagggtaaagtgaaatattattaagtaaatatttggtgtaaaaatacaatttaaaatatatgaaattcagattaagatgtgaaagtatgtacgctattatgtgagaaaaatattataatgatgatatccttgtaatctgttggggacaaaggaagtaagtaaacatattgtagaggccggcggccaccaagctaataagcaagtaaacaacaaaaatattcataagaggtacagggggactaactcttttgtctggcagagggtaatcatcgtgagacaccaaaagtccttcttgtcgagcagggagacgaagccaccaagcaggacaacggtagaccaggtgaaaatcaggacgccgagcccagccacgaccctcgacaagtattctttgaacacagcatggctgttgatataccgcacttcaggccattcttcggaattttgatttacttcaccggccattcttgccctgaacataaagctccaaaacctaacacataatagcaacctctagctagctagccaggcccttaagtactcagctaacgctgcttcagggtataactgacgacatatgattgtttacaccaagaactaaccatattagatcttgaccaaattacaccaattaatctatcctaggtcgctattaaatagacttagccaggccttttagtcatgtgtattaaggtggtcgatttagatcgccacttgaaatcgtcgtcgtttgtactaatggagcatgcatctttcagactacttgaatttttcttgacgatcgagttgacaaggctttgttaacatctctgtacgtgaatcatgtgttggactctctggcatgcatggtatagtatgcccatatgctctgacaaaatgcatgtgctgcttctgtaagctacttcctctatcccaaaatgtaagcatttttgaggttagcacgggtattaagaaagtaggtgagaataattgaagaaggtgtgtgattggttgaaaagagaaagtaggtgaaaaagaatggttgtgattggttgagaggagaaggtaggtaaaaaaatagctttattttgggataaagtattgtgctagaaatagctatattttaggacggaggtagtaagctataggttaattgatttggaataaacttgtttatgttcatgtggagcgagaggcctgagccctgccaatttaaaaatgtacgatgatgttgctcaaagggcacgtgtgggacgataaacggcgaacatcgctgcctctggcactgtcgatcagttggagaagaggaagaaccatttgttgtcgaagatgaatcacaaggaaacacatactaatctagaatgaaaacatgctatagagcaggtacaatagcaggctataagccagctgcaaacatattttaagaagataaattaggagagagaagagcagtgggctacagatttgtagccagctgtagcacggactccaagacgcagtgtgtctatgacaggtgggactagatattaatagtgtagtatgtaactattgtatgaatgaactactagattggctatggatgaattggagctagtagttggctatactattgaacttgctctaaggggtggtctaaaatttgtaaaagtatatagcccaacatacagtttactttaaaaaaatcttctcgaaacgggaaataatctcgcatgcatgataattccattccaataattatctccaatgtcctacaacaaatagccataaaattgtttttatgatactcgctccgttttataatgtaagactttccagcattgcccatattcatatagacatctatatgaatatgggcaatgctgaaaagtcttatattatgaaatggaggaagtatctttccgcatgtacgaactcttagtgtcctctagaaaaaaaatgccttgtactatttcttaatagagctctaccaggatgttctagaacgccttaaaaagaaagctagctaaaaattgcacagcgttgctcaagtcgcacccatgttataatatagacaatattgttgctgatcaacgtttcttcaatacgccagaggagcatcacgtgtgagtaatgtacaaatgtaaacgtgagttcaatgtaagtgagaatgtcagaataacatacaaaaccacgccaccaaatctgaaa

SEQ ID NO: 9401 - DNA, 54619 bp, Oryza sativa
cagcccatgcaaatatataagatataaatcacacttaaagtactatgagtgataaaaaaacccataataaaataaattataattacataaattttttgaataagacgaatggtcaaacatgtgagaaaaagtcaacggcgtcatctattaaaaaatggagggagtattaaccagtgtccaaatcattcatggtgcttacaattaaatggtacggttatgcgtattcataggttggtatagattaacgaatatatagttctatgtttcccaatcgactttcgacttggaagaatttaaatatatgcatgcatcctactgccatactatacactttatggtttttcctgattgagttcctgtttcccactttaaataatgagaaattttatggtacataagaaagtaactagaggtattaagattttacgctaaaaattttggtacctcaagaagatacttggtacctgtaggtatttacgctacaagtgtgatacatctcaataccttatcaagaatagtatctaatcaggaatagtaaaattagccttgaataattcatgcgtatgcatgcatcctatcccagagcatatgcatatgagtgtgggagaagggaagtaaagatcaggaagaggaaactaacaaccagatcgacaagagaaactgaaaataactgaaacaatggacaaaataactcgatgtaatagctatggggaggatcgtcggaggcaagacgactaacccggcagtctggatgagggtaatcatcgtgagacaccaaaagtccttcttgttcaacgcagagacgaagccaccaaggagaacaacggtggtccaggtgaacatcaagaaggccaggcccctgactgccatcgacaagtaccccatgagcaccgcatacttgttgatgttgactacttccggccacagctcgtccatgggctgccgctgccgctggccgtggcgatttgttcgctcagatcgactgtaactgatcagctccgactcctcatcacctagctcggacattcttgtttctttccctctcataccagcagaagcagattcgatcgatcgaatgaagcatgcagcagcaatccaatgtgactgtgtatacactactagaaaattaagctgatcgatgaaggcatggatctgcctgctgctgctacttaattagctacctaccatgggcatgggttttttttccagttatatataaacgacctgcagaaattaaatgatagatggtttaccttgaagaataaaatagtgggaaacgagtattgtatatatgcttgcttaccgcatgattgggaaggaattaaaccaaggtctagctaggccagctcactccatgatgggaaagcaaacaccttgttgatcttgcttgtcgctgagctcaacacgttagcagctggctggagaatggagatacaaatagtagtagtaattaacgaaaaaaaataaaacctcgaccactttctcctctgaccacataaacaaatactccctccgtttcgaaatgtttgacgccgttgactttttatcacatgtttgaccattcgtcttattaaaaaaattaattaattattaattcttttcctatcatttgattcgttgttaaatatatttttatgtaggcatataattttacatatctcacataagtttttaaataagacgaacggtcaaacatatgctaaaaagtcaacggtgtcaaatatttcgaaacggagggagtatatcgtttactcagatcgaatcccaatcaatcagcttgccattatatatgtactccacatgatgtgaaagcaaaaacatggatcacttgctgcatgtcaatacctaatctcgcgctcagcataaataaatattccaatatcatcgtttacttcaaatccaatcctaatcgagatcagctcgctattatgtagtcagcttgaagttcaaagctggccctgctaacaacagagctcaattcaatgaaattagcctagtcttttcttttctttccctttatagatttatacttgtacggttttcctcctgttctattcagtgaaattggcactttctagtgccggttccttaaaaacaacaacaatagagctcaaccaatgagaggaagaacagccaaccggaggaccgagagcagagcggatttgggtgtcgtcgatgctaggctgctagtcatggtcgcaagtaacgttttctgaactcgagatatcattaaaggaaatacatcattttttcaatgattttgtaggaaatatacacgtttagaatgcagaaatataacattatcgcagaatggaagtgcgagaccaaggtcttgcgcggcgagcatgcgacactgcacaatctcgcgcagcacaagaccgcgcgaactcgcacgattagttaagttttcgcttatactccctccatctacttttgatagtcatatttcattttaacacacagatcaaggataagtaattctacttatcatctatttaaacatgctactagacattcatcgtaaacaagcgattcattaatatttgcatttctcgatgtccatgtagccaattttatgtggaagaatgaagagtcatgcattaaatttgagaaagttattaagataataggttgttggattgaaatatgcctatctccactacttaaaaaattgaaaacgtttccatcgtccgtaataacgaaaaagggcgaaaaaaaacattaaaacaaaaaaaagaaagtccgattcaatttacttccgtcgtccgtgaaaatcttatcttatcttaatctcaatctttccgaggggactgaccgcgccctccgtcaccacccgcgcgatgaaacgccggccaaagcaaaaaaaagtaattaagcaaagggataaactagattaaagttcctaaaattaaaagtggataaacgatattgaaactcccataactagaaaaaaaagaaataaaatagattgcaatttcccaacaaaattccccaaattcgaagaaccctaatttcgggtaagaaccctaagaatcaaaatccaaatcaattaagctaagggtttgggttacttaccggacttgaagcccctaagctcaccggaactttctgggaagcggcacctccactccttcaccttctcgcagtcgcgtcgggttccccgtgcacgcgctgtcctggagtactcctccaccgtcccttgccgaagacgggaagcgtcggcttggcatcgcccctcccaccgacgaggtccaggccactcggcgcttgtcgccgtttgcgcgcccgcctggtcggaccgctgacgtcgtggcatggctttccgccaccctcgggtccgtcccccatccgccaaagcaggagccgcttggcggtcgtcaccgcacgcgtgccgccttcgccgttgtaccgctcgctcgtcgccagagagaaaggggatcgggagagagggatttgggagctagggttttgcccctctctcccggtcggtgcttcatccgacgcggggacgatcggagccatccaatagatcggacggctcagattcgtccaacatcgggccgctaccaccgctgattacgctgcgcaatgggccacggaagtgcatcgtcgccgcgtatgtgggccgcgctcatgtgctcggcttgtgggccatcgaatggactcagctcgcgtgaagatgggccagcccaagtttgggccggcttgggatgacctgggccgaaagcaaatttgatcaatcaatgtggctcagatttttaaattaaagttagataaactcctaagtagcctcgaaaaataaatctaagactaaagcctaaatccgatgctaattcatcaaattagactcgattctaccgatttggtaatatatcaaattagacttgatttttactgatttgagattctcaaggtgtcacactatcaaacggtgttttttccgttgcaatgcacgggcactattgctagtcaaaaataaatttttcagatttagaaatatgcctatcaaaagtagatggagagagtattgtttatacaaagatttgaaaaacaaaatatcccaacctccatctcccctcacatatgcacattactgctcaccccttcccttctcttgctcgagttgtatcctcttcatttgtaacatcctgaaaattaagtatattatctaagggtgtgtttggttggtgggatatacctggataggacatggccgccgctctttggagggtgtttgtttgctggacgaaagtgggatagggcggcccagaggggaatatacccccccagatgctggatagagggatctggccgatttggccggatgcaaccactcgaggctcgggcgagtcgggcgagtgagtcgcgtgactcgcgtcaccccttaccacgacgacacgagcgaggcggcggatagggcggccggcgcgagcgacgagcatggcagccgtgggtgacgagcgcggcggctggcgagagaggaggcgagctcggtagccagcgcgggtcacaagagaggaaggcgacggcgggaggaggcggccagcgggaggaaggcgtccggcgggaggaaggcggccggcgggaggtggctgccggcgggagtaggcggccgacgggaggaagtggcggcggcgagcccagatctggccctatttttttttcttttttctttttctttttttcttttttctatgtgtatttataatagaggtagtggagtaaaattgtattatgtattaatttgatgggggtattgttaacaacgaaatttggtaagcccaaagttatcatcggcctaaagtcagtatcggcttcagagtcctggaatcggccgatgagaattatcaagccgccagttgtcggattcttgctaaggaaattgatctagtaaagaaagcttatccagaagagaccgagttcaaagagaatgcggcatggcaagttgtctattaattaggaatagtttggtagtttcctttttatctttaggaaagtgtgtttagtgtcctataaggactttatgttttccttttatctttaggaaagtttctttcttgtcctacaaggattagtatctacccatgggtataaatatgtacacgcggggtcattgtaatctatcctcacgatcaatacaattcggcgcatcgccaccctttttacttttacttttgtttctacgttctggcggaacttggcacccgacgcggggctgcatcggtgttcgatctccggctaaggggtaagtccaatgttccgtcggcccaggcaattatatcgtctacgtcggcgtcgttcaaggctgcatcaggacattcgacctcttagattgctctggtttggatgatatacttgcctacctatttatcatatgtctctgttaatctagtcttagcatatcaatttagctctatcggctgcttcttgttttagggtttctgccggtatcagctaaatcgcgttgctagattagattagcttagacatctaccaccctgaaaactcattcaacggtttgattgtctagattgtgtatcttttcatacttaatgctgtatcagttaagtttgatctactaagtcgtgcttagaaccataatctctatcctgcttcttgattgccaataagggtttcatcggggtttcagccggtgagttatctagacgttgcatcggctcataaggattgcatatacatataagttggatttagccgatgacaacaaaggtttcactgtttaatctaatcttgtggattttatgacattggacctccagtcgatgtatgctttaaccatcggatcagtgcttattctatcatgtcattgttagccgattggtttctactggattatattattgttatattttaatatcatcagctgattgtctttgcatcattatctacattggacacatagccgattgctcaaaccctatcgctatcggctagtatcggcatcggctggaatcactacattggcttgtcagccgatcggctatttgatctactgtttacatatcttgtcagttgcaggatcaaactgactagcacgcccgcatctcaacaatctttagacctgcacaggatttaagcagatctctcaggccggtgtgttcaattttttcgtcaacgggtatattcaccatctcaagtgagaggtgaccacacctacaaatccaccatacttcctccaaccaaacaaaaaaattagatcaccaactccaccttcgtccctacaaccaaataaaaaactggatcgccatattcacataaccaaacaaaaaactggaccgccatatcccatccaatcttagaaaccaaacacaccctaaaactacatcgagttgtattccgattctaaacctgcgctgcggcaccaccggtcaagtaccagctgcctatagctagtcccctcacggagacccaccatgcatatcgcctgaatttggatctgcagaaaaagagaaagggaaagggaaggaaatggagggggaaggaagagggtgggagaaaggatggggacagggaaggaggtgccatcgctggcggtcacgccgacggtggcgagtcaaggtggaacagaagaaaacgaggaaaggaaagggagagggaaggaggaaaggggaaaaggggtgggaggcgccaccaccgccgcaccgccgtcgccggtggcagcgacgcgagcggacgtggctggggagcattcgctcggggctgttcgcctccagtgtcgtcgcccatggagagcggcgcgggagtcgctccactttcacgaatatcgggacaacaaaactttctgaacttcccactattccgttttattacgaaaaagcactgatcaagcgatcgatcggttatctcgttgaggccatcgccgccggcgacgcaccggaacgaggcggtggcagggacaggcagtgacgcgcacaggaaatcgacaccgcttcttgctgctgggctcagtcatttcggtagtaccgaaatttcggaaatttcagcattttttggaccgaaatttttgacacagtttaactgaacttgactaaattttgatcaaattcacaaaaatttcagccgagatattgacttaccggggggtccgaaattttgtttcaaaatttcaatcactggctgggctgctggcagctaagaaatggatcacaagatgagactggttctgtttggggaggttaagatcacaggccgtcgccgttgatgtactagtgcagccagctaatgtcatcctgctatctactctctccatggccgctgcaagtacttgttgatggtgaatggactgtatgggttagtgtggttgtggtcgattgtaatggccccaaatggtttggaaattggaagggtggattgaacccatagatgggaaatggtttggtttagattctaaaagaagacttctggattgttgggttggtctggactactttagctggctgttgtggtttggattgggaacagggcgggttttaacctcattggcaggcctacagtcaagctgcatacagttctaccaaaaataaaatacgatacaattatattataagttcataattttttgaacaaagaaagttaacctctagttggtcaagaaagaacattattattgctgaatattttgcattcaatgaccaatgcataggacgcaagcacaaaaaactaacgattttcacacaaatactatatatatgtggtttcatatattaggaaagtccaaatagttgcccgagaatccatctcctaatccaaaaggtttagcgcctgaacttgctagccccccttgttaggctggctgtctaggcgattttggctgtgcggtgtgctgactggacgcactttccacgtcatcttgcctattgtaccactgactgaataagatgaatgggaatagtagacttagagtcatttcttcggtaaagctttcctcattccatctttccctctgaatgttgttttctctgtttagagtcctagatggactcttgggtaaagttcagaggatatttggacttctccttcctgcagagattacatttttttcgcggtaagaaatctaaataataagagaacagaaacaacatcattttccatgtagcattaagaggcttaacatcaacaccgtgaatgcagggcatgtaacactcagcttgccagagagaggaacccaaaaaaaaaagatgttctacaaatgcacgagtaaacataagaacgtagagccagctctaccttatagccatttcattgatagaaatgataagttacattgttacatgattgggaaagagtagaaaaaaagaagagaagaacagcaaaatggaatgtacaaaagtgtaagaaaaaaaatactatacattggcctcagatgattaaaggccgattttcactttgattttattactgaccggcacgagtaatttttaatttcggttttcagatcgattatcagatttccccggcacacagttttccaatgagggtatggattaaaataatacagattatgtacgatttaattaatctgatttcgattgacacagctaggatgctcaattatcacttccatttcggatgcccttgctctaggcaggagttcctcagcttctttcacgagggaaccaagagtctttaggctgctgctacagccagagataaccatgatgtcctcgatttccgacatgttcctcgcagccttcgacagtgatttaatcaagttctctgcttcttctacggtgtaacggcttccatgtctaacgattagtatgaatatctcagtgataagcttcaatgtgttcaatctgttcactatagtcaccttactcttcattgacagctttgtgaccatcgattggagctccgttaagatgctgaagccgttggctgccctgttaattgcatcgataagaggaggcaaatcttcagcatccattaagtttcgtgtcatcgtcacaatcagagataaaactgccgccagcatttgtctgtccacagattcggcacgaagtgttctcacaagcacctgcaacattatgtttatcttcagtatgacaagcgtaacgatccaacacaaagactaattatcaccctatatatgatgctgataaaaataaagcaagtgtttcttttcttgcctcaaacagactatacctctggactcttaacctttaaggcttccttgaggctctggatatattcatcatcatcagtgtgatgaacacacagctgctcgaggatttgcgcggcgcttattctgtattccttgggatatctgtcttgtacaagtatttttgtgagatcaccaacgacatcatctttcacttgtaagattaacttggcatttgctttgccatgggaacatagcgtcgcaagcttttcacctaccactgccaacccaaaaatgatgttggcctccttataaactttgtgagtgaagatgagtaacaatttctcaatgaaatattccctcgtcactatgttagaaagcgtgtgctcgtgcattcgtgtgtaaatgtccaatgcttgcataaacagggaactatcatggaacgatccgagcccacatccttggcaacctagaatcctctccatactagccatggcttccacgtctcctgagattttgcggcggagttccttgccagtctggccaggagcatccacaagccggagaatcacaaccatcgaagcatgcactgttctgaaccacgcactattagggtcatcgttgtggttgagcaggccagaccgcagaggcgccatgatcttggctagcaggccctccgtcttgttgatggatcgctgacagtcctcgtgtgcagcgagcttcatgaggatactcaggccctgcagcatcagttctcggtaatttacagggatgttgccatcacaatccttagggggaccttcgagcagagaagctatgcaatggatcccttgtggaaactgctccaggtggaggtcaccagcaaggtgcgccacgatccttgcagcgtgctccctcgcctcggcattgtatgccctcgtacaatcaagtgactgcagcagtgtgtgcaggccgccatcttggctgtaggatgccgataggaggagctgctttaccattgctttctgctcttcgacctcgacctcaacctcgagaaagaaattgtacttgtacattggcgtattcaggagggagtccaggatcctcaccccagagaggaagccatcaggggatccagacttggttaaaccgacggcatatgtgaccaggttccttcctttgacgaatgacgggtccttctcacacccgatcatcgtctcttgcatgtacgccatcactgactcgctcaaactagtaacaaagcgatatttgttaaccaccaaatccaccagccttttctgctcatagcacaatgtgaaccggtaacagaagagcacaccctggagcaaggcgatggagtagacgaacttcagcgcagatttcaggttggcgccgccattgttgacctcacccccgtagtcatgctgtatcagacgacacgcggatatggcagtggtgatgatcagcccaaacatgtagagcaccgctagagggcagatgatggtggcaaacacgaacaaatggagcagccatatgacaactactactaggttgttcaggtagtaggagcgtgaccgtgatcggccatagaaccagctaatggcacccctttccgtttccaatgtatccgtagctgagaaaaagcctaaaaacgacctccaagtatatcgtagcttttcgttcagaaagatgtcggagactctgtgggtaaatttcattgttccagttagatggtgagataagtaatcaagagctatataggctggtggtaaatctgtgcatttcacacttatcaggatatattacatagattttgaacctatctagcactaatatttttttttggaaaatacatatcaacagccatcggatacttacatttttcatatgtattcatatacaaaataaactttcaaatctctatccttgcaggggaaaaaaaccgatccattataattttgaagtttgaaatggattaatgtaagttttctattcattctggcctttgtgtgtcttcgacacaacagccctgatccattatactaaaaagttcaataataattcaaagttcaaaaaataattattaaaaatatgtatttggcttcaaaattacatgggcaatccatcctaaagtgttctcaccaatgtattaggataatgtcgaccccacgatggagtttggcacttggtgttgcacaaacgaccttgtcagcggtggaggaatttggagcttggcactgaggcactagtggagtttgaagatcagtgcactgcatggacgcactgagtaatggtggaatttcatgctcaggtaggacgatatatagaggtatgttttcctaattgaggaaatgaagctcttctcacaattgagagagattacaagataaagaatacaatcgtgtttggaataggccagattgtgcatatgctcatcgcggtattagtgtggccgtttttgtattggtcatagcctgaagtttgtaccaaaactaataaagttgacaaaaggtcaaaaagcacttacaccaaaagtgagacctttctaactcgcaatgaattcaattgttgaggtttgctagctctagaattcgactcaaaaaggagaattgtccaatactcgaatagttgttaagctattgagatttgctagctctagattttagctcctgatgtcctacatgccagtgactgaatggatatgcccacatgaactttcatcaggggatgtaaactacttgccagtgactgaatatttagaaagtggaactgtcttagcagaaaatatagctccaaaataaatgttttatgcgagcttaaaatataaaattaagatattgagcagtgcaaagagactaacccagcggtctggacaagggtaattattgtgagacaccaaaaatccttcttccccagtatggagacgaagccaccaagaaggataacagtggtccataaaacaagaagataacctagccccttgacggccatagacatgtgtcccatgaacagcgcgtagttgttgatggagctaacttcctcccactctgagtcatcaacgggctccattccactagtcattcttcccttgcagatgtgcagagtggaggtcaactgcaagtctgcaacgcaacaaagccaatatgtaagcccgcatgctcagaactctattcgttgtatactcgtacataataaagcctggagatgcacgccaagaatggaaaaaaaaactgatctacaagaagcatggtcattcttaacataaatatgtccatcctattaaatttaatcagttttgattagcatcaagcaaggtaggctgactttggttttgtcaaaatctgttcagttgattgtttgagaaagtcaaaggaaaaaaaatcatatggtgaggaagcaaaggcctcggctagctggctggagttagtgtaactaaagaagaacagcccagatcagtggatcacagatgttaccgtaattcgtaaacatataatctggttgtcagcataaataattgttggtgccttttcgggccaatacagattcacctaaatatttgttgcaaatttggcctagtgccaaattgtggtggtcaacaataatattccgttttctcaaatcgaatcccaatagatcaagttgacattatatatgtgtacgatgggaaagcaaataccatggcgtctgagctgaacagcagaatagtcaagctaactgttggggactttggaacagtcagtcacctgtttaaaacaagaaaaataaaattgattcgatagcatcaaaatttcacgatttcagttccatatagcacataaagtcagtgatttcagttcccttttccgaattggttgacttgcgttgaccggctcacaaatccaaacagcccatttcgctgcccaataaagcaaaaaaagattatccatctagggagcaacatgcgagagaactgcaataccttctcgtcggcgatgggcgaggagggacaaggcagccgggacgagggacggcggggtgaggctgatgctgccggagagccgcgagcccgcgacggacgaagctgatgcggggcgaggagcacgccggcggacggagatgaacgccggggacgatggccgccggcggtggggatcgactgataaaaggttgtgcagccaagggcagtatagtaaaaaccgagtcactcggctaggtcaacacaagtcaaccaaaacgggtaagcaagcagaatgactgatagggatatataccactaataaagtgaaatgcggagtttgtatgcaataaaactgaaattactacgaaatttcgacgatattataataccaatttcacctatgaaagcgattttgggtggaatttgccgtacgtgtatggcaactttggttaagtatgcgctccctctgtgatcaatctatctatacctctatactcgtattaattaggtactttctacgagcttttacgttaacatgaaagatccgaccattagattagattgatggtatactagggccgtagatttaaactgtaaacatggacttttttaagggaaactacggtgggtgtttaaggcaccagcctgaagttttattgaaatgaagaaacatttacaggagaggggttacaggggatgagagggggagaattaaattaagaattaattacaaagaggtataaggcccacttgcggagctattgtttgctcttaacatttttacatcgatgggaccaaatgtcaatgtcgctagcacaacgccggagaactaacttagcaggttcatcaagagaattgaagaccttgttgttgtgtcgtttccaaatattccacatgacggcaaggaggatagagcgccagactcgtggagtggcgggttgtctgggtggagggatgtcccagacaccttcaagctgcggcagggaggcgatctgttgttcgtccaggccaaaggtgtgccatattgttgccactccggtgcagcgtaggaagaggtgctccacatctttaacagaggagcaaaaaggacaacgtgcggatgctactaatccacatcgagcttgtctctcattggtgaagatgcgcctcttgtgtgtagtacaaaggaagatcttgcatttgacttgagcgtggttgtcccaaatgggcttagcgaaaaggtcatcctataaccctaagaagcttaagtcgtaggctgtttttgctgtgagggggcgatttgtggacaaggtgcgtctgttttttatctctgggtctagctttaggtggcataccagggcttggatattggccaattcgtgtatggccactgtcgacacagtcggggccggagatgaaggagcaattcaggagcggtctgttagaataattgggctaggcccaacttataatattaaatctcaaaggcccataatacatgttgaggataataataccacctctggatttaagcgagaaatatctcaacctaaatagggagttattagaggctccctgttgaccagttgaggtgggggtcggaatgccacacgcgcgcgcgcgcgccgggccgggccgtgggcgaggcgaggcgaggcgtggctggctggcggcgtgcgtgcgtgcgtcacgtcgctatccttttgcagccactaacccacgttcccacgattccctccgcaacagcgcgtccacgttctttctcctgatagataaggaggccgcgagtccgatccgagttcctcgcttctttcccggtgttagtttctccttctccgcgcctgagttgctctcgcttccccgcttctgatctcttgcgcgcacgagagattggaagaagcagtgcctccgaaaccacaccttcgcctgatatctgcaccgggtaggcgggtgatcaggtttttggggagtgcctcctgcacgactgctcatcgccatgtctggagttgctgccgccgctattggcggaggtggtgcgccgccgccgacaggagctgcgccgccgccgacgccgacaggagctggatccggagctggtgcgccaggaggaggtgccgtgaacgactacaacaacggaggcaattctgcctcaccatccagcggagggccattctcggggtataatcttctccttctactgctgttagcgctactcctgttcccattgttagcgctatactgtgtgcgctatgttcttgtttctgttctacatgatgcctctagcatgttatcgcattactggtatgttcctgtttctgacattcatgatgcgcatagtatgctactggttatgttaagatcaccctacactgcttatgccatgatcatagtttcaatttcttggattaaaatatgccgaataatgactatatttccaacattccaaaaacctgataggtcattttcggtagttggctttgctgctgcactgaaaccacatgcttttgatggttcaaactataagagatggaaagcacgtgcactattgtggttgacagcgatgcagtgcttctatgtttcacggggtaaacgaagtgaaccacctctttctcctgaggaagaggctaagttcgaggcttcggattgcctgttccgtggagcattgatcagtgtactcgctgacaacatagtggacgtgtacatgcacatgccttctgggaaggacatgtgggatgcacttgaggccaagttcggagtttctgacgccggcagtgagctgtatgtcatggagcagttctatgactacaagatggttgatgaccgttctgtagtagaacaagctcatgagattcagatgctggctaaggaacttgagaacaacaactgtgagttgccggacaagtttgtggcgggtggcattattgccaaactaccaccttcttggtcggactttgccacttctctaaagcacaagagacaagagttcagtgttcctgatctcattggctctttgggtgttgaggagaaggcgagggcaaaggacgtccggggcaaaaaggttgagggaggttctagtgccaatatggtacagaagaagaaccctcatgcatcccacaacaacaagaaagtcaagcctgatgtcaaacccaaggctgcaaccaattttaagaagaaaggcaagggaaaggcaaagggagactgctttgtgtgtggcaagtctgggcattgggccaaggactgtcctgagcgcaaagacaggaagtctgccaacatgatcattagcgagggcggaggaacatcggggtacggtaaaatattacctacagttctctctgtttttcattcacctgattggtgggtggatactggtgctaatattcatgtatgtgctgacatttctctgttttcttcttatcaggtcgggagaggttcctccttgttgatgggaaacgggtcgcttgcagttgttcatggtgttggtacggtcgatctgaagtttacttcgggaaagaccgtgcagctgaagaacgtgcagcatgtcccttcaataaagaagaatctagttagcggctctctattgtgtagagaaggttttagacttgtgtttgagtccaataaatgtgtcgtatctaaatatgagacttttgttggaaaaggttatgacagcggaggcttgttccgcttttctttgaatgacatgtgtaataatcataacgctgtgaaccatattagcgagaatgatgagtctaatgtgtggcattcgcgactctgtcatgtgaatttcggttgtatgatgcgcttagctaacatgagtttaattccaaaattcactttggtcaaaggttccaagtgccatacttgtgttcaatcgaaacagcctcgtaagcctcacaaggcatctgaggcgaggaatttggcacctctagaacttgttcattccgatttgtgcgaaatgaacggcgtgttgactaaagggggaaagaaatatttcatgacactgatagatgattgcactagattttgctatgtgtatctattgaaaacaaaggatgaggcattgcattactttaaaatctataaagctgaggtagaaaaccaacttgaaaggaaaatcaaacggttgaggtctgatagaggtggggagtatttttccaatgagtttgcatccttttgcgaagagtttggaattattcatgagatgacgcctccctattcaccccaatcaaatggggtggccgaaagaaagaaccgtactctaactgagatggtgaatgccatgttagacactgcggggctttccaaggaatggtggggtgaggcagttctgactgcgtgtcatgtcctgaataaaattccaatgaagcacaaggaagtaacaccattcgaggaatgggaaaggaagaaattaaatctctcatacctacgaacatggggctgtttggccaaggtaaatgtacctatagtcaaaaagcggaaacttggaccaaaaactgttgattgtgtgtttcttggttatgctatccacagtgtgggttatagattcttaatagtaaactctggagtacccgacatgcatgctggtacaatttttgagtccagagatgctactttctttgagaatgaatttcctatgaaatatacacctagcacttctagtaaagaaactgtcatgccccatgagcactttgcaccgatagaacacaatgatcaaacgcctgaggaaaatcctgaggaggacaacattgtagatactcgcaagagtaagagacaaagggttgcaaaatcctttggagatgactacattgtatacctcgtggatgacaccccaagaaccatagaagaggcatatttatctcctgacgctgactactggaaggaagcagtacgcagtgaaatggactcgattatgtctaatggtacttgggaagtcgttgagcgtccatatggatgtaagcccgtaggatgcaaatgggttttcaagaaaaagcttaggcctgatggtacaatcgaaaagtataaggcaaggcttgtggccaagggttatacccaaaaggaaggcgaggatttcttcgacacatattcaccagttgctcgcttgactacgattcgagtactacttgctctggcagcctctcatggtcttctcgtccatcagatggacgttaagacagctttcctaaatggagagctggaggaggagatctatatggatcaaccagacgggtatgtactagaaggtcaggagggaatggtgtgtaaactattgaaatccttgtatggcctcaagcaagcacctaagcaatggcatgagaagtttgacaccacgcttacatctgcaggctttgttgtgaacgaagctgacaaatgtgtatactatcgctatggtgggggagaaggggtgatcttatgcttgtatgtcgatgacatactgatctttgggaccagccttaatgtgattgaggaggtcaaagactatctgtccaagagtgatttgggagaggctgatgttattcttaacatcaaactacaaagaggagatgagggtgggattacacttgtgcaatcccactatgtggacaaggttttgagtcgctttggatatagtgactgtaagccagctcctactccttatgatcccagcgtgctattaaggaaaaaccgaagaatagcaagggatcaactgagatactctcaaatcattggttcattgatgtacttggctagcgcaacgaggcctgacatctcatttgctgtaagcaagctgagccggtttgtctcaaatccgggagatgatcattggcaggctctggaaagagtaatgcgctatctaaagggcactatgagctatggaattcactataccgggtatccaaaagtactagaagggtatagtgactcaaactggatatctgatgctgatgagataaaagccacaagtggatatgcgttcacacttggaggtggcgctgtttcctggaagtcttgcaagcagaccatcttaacgaggtcaacaatggaagcagaacttacagcactagatactgcgacagttgaggctgagtggcttcgtgaactcctgatggatttgccggtggttgaaaaaccagtgccagctatcctaatgaactgcgataatcaaacagtgattattaaagtgaacagttcaaaggacaacatgaagtcatctagacacatcaagagaagactgaaatctgtcagaaagcagaaaaactccggagtgatagcattggactatgtccaaacggctagaaatctggcagatcagtttaccaaggggctaccacgtaatgtgatagacagtgcatcgagggaaatgggcttgatacccacctaaggttgcataatagtggaaacctgtccattgtgatcggagatcccgtgaatttggatggtgaaacaaattattgtgtgactgagagaagagacccttgaaaggggctcattttcatgatgtgcttctcttctttcctgcatggtaggatggcttatgtcttaatgtgatccgagtggcttttccaagcagagatgttgacctgcagaacatctcagaaggaacacacctatatgagttcgactgctagtcacagtctatgaggtttgggcaatctctagatactcatgaaaggcctggagtttgacttatatgctccaaacagaggggatgcgaacggcagcccagtaccagtcaaggttctgagtgaaacctgatcacacaaaacttacaattcaaggcatagtccattgttcagttgtggtctgatgtagctcatttcctaggtggaagttcaacttaacagtctccaccaaaaccctggtatatcaaacaggcacagccttgagaacatttcttatgagccttgaaatttggtggggattgttagaataattgggctaggcccaacttataatattaaatctcaaaggcccataataaatgttgaggataataataccacctctggatttaagcgagaaatatctcaacctaaatagggagttattagaggctccctgttgaccagttgaggtgggggtcggaatgccacacgcgcgcgcgcgccgggccgggccggggcgtgggcgtggcgtggcgtggctggctggcggcgggcgtgcgtgcgtgcgtcacgtcgctatccttttgcagccactaacccacgttcccacgattccctccgcaacagcgcgtccacgttctttctcctgatagataaggaggccgcgagtctgatccgagttcctcgcttctttcccggtgttagtttctccttctccgcgcctgagttgctctcgcttccccgcttctgatctcttgcgcgcacgagagattggaagaagcagtgcctccgaaaccacaccttcgcctgagatctgcaccgggtaggcgggtgatcaggtttttggggagtgcctcctgcacgactgctcatcgccatgtctggagttgctgccgccgctattggcggaggtggtgcgccgccgccgacgccgacaggagctggatccggagctggtgcgccaggaggaggtgccgtgaacgactacaacaacggaggcaattctgcctcaccatccagtggagggccattctcggggtataatcttctccttctactgctgttagcgctatactgtgtgcgctatgttcttggttctgttctacatgatgcctctagcatgttatcgcattactggtatgttcctgtttctgacattcatgatgcgcatagtatgctactggttatgttaagatcaccctacactgcttatgccatgatcatagtttcaatttcttggattaaaatatgccgaataatgactatatttccaacacggtctagggcgtccgtgatagagatgttgggggcgagttgcatgtgagaacaaggcaaggaacagttgaaagagggcgccgcctaaaatccaattatcaaaccagaaggaagtggaccgaccatctccaatgatggatttcgaaacactacggaagtgtgtaaggcccgcgacgatgtccttccagatgatcgtgtcaaggcgcaaaagatcgcctagatcacacgaggcagaccatccgtagtgatcgcgaaagcaatcgatccacggtgcagaatcaccctcgtgcattttgaggagaaatttttggagaagacatatgttctgtgtcttgagattttttatccagcaccacctttcgctttcggagagcaaactatgttacacgcaattttgcaattgccgctgtgacagttttcttcccccgtccagaagaaggcccttcagcgcttgtcaatagtggtaatcacttctttaggaggaaggatagcccccatcatgtatgatgggagggccgagagcaccgaattgatgagggcaagccgaccatcggaagacagaaggtgaccgcgccaaccggcaagtcgcttgtcaatcctagcgatgagaggttgacagtttgcaagacaaagcttggtaacaaacagagagagggaggcataaataaggttgggggaaggaagctatggagcaaccaagaatccccgccaactgaaacgccacgtcatgctgaacgttaatggggaggaaggtgcttttacccatgtcaattccttctttttaccatgcatcccccgttcgttttcccatgattttagatactttttttttgtccccgatcgaatcacagatcatttttcattactgcagttgcaaggatgtggcaaaaaatatcatctagaccagttggttgatttgtcacctacatttattcagatctaataagaatataagtcaacaagttggtttttaaattcgatgtgtatatatctttaagccgacgatatgtatttcagtaatgacctttacccggtgaagcttttttttcttaattggtatatacaggataatagtatgttttaaactctctatcaagaaagagcagctaagctggatgggctctccaatttatgttaatttaataattccctcgataacaagataaatgatctccagtcatttcttgaccattgttctactttacctatgactttataaaatcctgtagcaacgtgctgagtatcacccaataaacataagaaaacacaccatgcatgttctagtgagcatcttgatgctggtaggataactagcgagctaaataaagctaagggtcggatgcgacatgggtgctagcgaatagagcttttctgccttgttagggtgcgtttggaatcagctgttgcatgtccgagcagtatatgagcgcgtgattaattaagtattttcttttttttcaaaaatagataatataattttttaagcaactttcgtatataaactttttttaaaaaacacgccgtttagtagtttaaaaaacgtgcgcgcgaaatacaacggagagggattggaaacacaggattccaaacacagcctgaatcgtcattgatacaaggaaagatgggaggaggaacaagagggagaggagcaatagtttgggggatgatcccctccattaatttctcattctggatctgtgctacttcctccgtttcataatataagtcattctagcatttatctatctagattcattaatatcaatatgaatgtggaaaataccagaatgacttacattgtgaaacgggggagagtagctaggaatggataaataaataatgttatcccaaacagaaaaagttacgtacggccgggtatgtgcttcacgtgaaatgggaaatatatacaatcaatgacgactaatttggcagcaaacatgcatgcatgggccagttaattaattatgctaaatggatagtttgattcgatgagcagccggacgactgaggctttcttttgttgggaaaaaaattaggtttgattgtcacatcagatatacggatatacatttgaagtattaaacgtagtttaaaaacaaaataaattatagattctactaaaaaactgcgagataaatttattaagcctaattaattcgttattagcaaatgcttactgtagcaccacattgtcaaatcatggtgcaatttggtttaaaaattttgtctcgtaatttacacgtaatatgtgtaattggttttttcctacattaaatacttcatgcgtatgtctaaacatttgatgtgacagtgtgaaattttttttttaaatagggcctgagagcaaaacacatgctgcatgaatagtagtcgctcgctcgtgtatcatacttaaagaaagtttaactaggaaaaaaaaacctacttcatatataaaatcacaagaccttttatccaaaaattgaaactttcaactaaaagttcaaaaaaattatactcttggctcaaactttcaatataaaaacccaaaacttctaatccaaaaactgaaacttcccaaaaaaatcaaaaactttgtgctcatggctctcaatctttcgatacgaagttacagaatcatggtagggtagctagctaaataaagggacggatgcgatatgggtgctagcgaatagagcctttctaccttgctgaatcgtcattgataattaggggaggaggaacaagagggaaaggagcaatagtttggggatgatcccctccattgaataatttctcattctggatccgtgctagggatggatcaataatgttatcccaaacagaaacagctagtgttaggtacgggtatgtgcttcacgtgaaatgggaaatatatacaatcaacgatgactaatttggtagtaagcatacatgcatgggccaattaattaattatgctaaatggatatagtttgattcgatcagcagctgaacgactgatcgagagcaaaacacatgcataatgcataatgcattaatttatatatatgaatagtagtcgctcgctcgtgtatcacgcataaattatatatcaatgatcgatcacatgcaacaccggcaaattaaattgacccatcatcgatccatctagctagctatgcctatatatatacgccatatgcatgataaatacgcaagctaattaagctagctacatatatactctctcaaaagtttacattaattgctgatagctcatcatcagtttgatcgtgtccggaggtgtgaggtcgtcggcgagatgagctccggcggcgaggaggggaagacgtcgtggccggaggtggtggggctgcgggcggaggaggcgaagaaggtgatcctcaaggacatgcccgacgccgacatcgtcgtggttccggtggggacgccggtgaccatggacttccgccccaaccgcgtccgcatcttcgtcgacaccgtcgccggcacccccaccatcggctagagctagctactagcctcatctgcctgccttcagcatcctgcttatcttaattaaataatcacatgcacgcaagtgatatgtactgtgcatgtttcgatcgatccatcccccatctgaataatgttggttttaccctacgcacgtgttaatgtttttctcctacgaataaataaagagaccttcatttaatgcatggtagccaactactccctccgtttcacaatgtaagtcattctaacatttcccacattcatattcatattaatgaatctagacatatatatctatctagatttattaacatcaatacaaatgtgggaaatattagaatgacttacattgtgaaacagaggaagtacctagctaatctttaggaaacaactacaaatagaacgtcccattttattatttttctttaaaaaaatttggcggtgtttcgcctctcataaactaatgttgtagcatttagtgaaaaaatgttttagttcttaaaaagaagtagaacacaattggatagtcatatgaaacaatttgtttcaacatataaaacaaattttttaaaaccattcaaacatcaacaagatccaagtgaaaatcgaagagaatgaaacactataaaaatacccactaaaacacttcgatctaactaataaaacatctaaaccatttttgttcgctggcatcgtgtttcgcaagcaggcatgctaagacagccgctagcaaaaataccatttttgtaggcagcaaactaaagaggacaatagatgaaaacattttttgggataaaacagttgaaaatcgagatgtcgtcgtatagcggcagggcagggtcgacgatagcggtcggcctgcgagggtcaacggccgtggtccggaggaccaccgctgccggatctacctccttcaccgcccctcatcttcgccgctgatggaccctaagttcctctcgacactcaaggctgttgttggcccgatctttcggtgagttgtgataactacgatttgggagaaacgttaacgatccgactacaaccgtacgagacgttgtgttgcgccttagcgatcgatacacctctccgtgggttgttgatcttgctggtgcagatcaaccctattcctgcaagcaaatcgaagaaacaagcaagaacaagataaaagcaatctgatattgcaaataggaatttaatacaaatgataagttggggttccgaatacaagcagacggacggtctagccgacacgcgcgctacaaggaagtagcaatagctaaactttcatctaaacaaaacctgactaaccctggaggggttactagctatttaagggatggaggaggtcagaagggcgtcctccctctgtttggggcacagccccccttgggccccacttgggccggggtcccagacgaagttacaggcccataggcccattacagacaatgcagccccttgtttcttcaattgcggctcactgagatggaatatcacaatgaggctggatccgttggaaagaggactctgagagctttccatcaagtactcacgggacgaaaacggagctcgaatggagatttggcggccgtttgaagtcagcaatgttgcaggtggccgaattggattccagcacttggaagacttgatcttgatatcttcttgttcatccatgatgtgaacaatgattgtatccatagtagccatgatcacatcagccgcagtcgaatctatcccctacactatcgccacccgtctccattgccactatggaggaggatatatgccaaggggaagccatagccgggaggaagtcgttgctgccagatccccaccatcgtcacctgccgccatcggattcgcgccaccgtgacccgctgtcgccggatccatgcccccgtgactcgtcgccgtcggatccatgcccccgtgactcgctgctgccagatctgcaccgtcacgacctgccgtcgccagatccggaccgagccaccccctcccctccaaccaaatctaggagggggaggggagagccaggccaccgcaactgctctgatccctacagtgcgaccgtctcgtcgtcgtggtcgcgtcctggacggaagcacaccgccgcctcccctccgctgctgccgacctccactacgtggctctccttgcctccgccaagcatggccaagtcgtgctgccgctgccgccgagcgccgccatcattgaccgccgccgctgcaccccttcgctgctactagctagagagagagagataaagaaagaaagaaagaaagaaagaaagagagaagggttggatctgaggggtcgaggaaaaaaagagggagcacgtgatgtttattccctcccacgatttttgcaagcgaggctcccaacaccccgccagtaaaaaatagtttttttttactggctgcatcttaagagcaccacttgcaaaaatacctctatttttgctggcggccctcttaacctggccaccaaggacgatccattttcgctgctggccattagcccccaacccttgttataattccactggtggttttcacgtatggccgccagagaaaaaaataagttgacgccatgaaaaatcaattttgtagtagtgagcgtgaggagcgggtggagagaaacggttgagagagaggaggggaatgcataatatggaaggtgggggtgcgagggctgggcagcgggtggagcgaggcgtggggcgcgggcgcccaatattcttgttcccatcgggcgcccgagtcaaagggttttcgtaatctttaccacatcgggagcagagaagttgtttttatcgaagtaaattgtttactccgataatggtggaagcaggatggcaggacgtgcggtggggtggggagcagggaagttgtttttatcaaagtaaatcgtttactctgataatggtgggagcaagatgatgggacgtggggtgaggtgggcttgggctgatgcatgcttggcgctcggaatactaggagcatgctgcgctcctagtagtatctctatataattcatagatttttcttttgttttgtaaggagtactccctccatttcatattataaattgttttaacttttttgggtttaaccaagtttatagaaatattagcaacatctataataccagattagttttattaaatgtagcattgtatgtattttgataatatgttgttttgtgttgaaaatattgctatatttttctacaaacttggtcatacttaaagcaagtttaactaggaaaaaataaacctacttcatatataaagtcacaagaccttttatccaaaaattgaaactttcaactaaaagttcaaaaaaattatactcttggctcaaactttcaatataaaatccaaaaactgaaacttcccaaaaaaaaatcaaaaactttgtgctcttggctctcaatctttcgatacgaagttacagaatttgagaaaactttcaactgaaactcctcacgagggtgtcaagtagggatgaaaacggtcggaaacaatcggaaaaaaggctcaaccattaccataaccatatttttctcagaaacaaaaacgatatcggaaatatcgaaaaaccagaaagggcagctacgctggatgggctctccaatttatcttaatttaataattccctcaataagaagaaaaattatcctcagtcaatttcttgaccattgttctacaattttacttataaccaaattttacttataaccaaatattacttatgactttatagtaataaaatcccgtaggctgcagcaacgtgctggatatcacccaacaaacataaaaaaaaaacatgccatgttctagtgagcatcttgatcgtggtaggatagctagctaaataaagggtcggatgcgatatggatgctagcgaatagagcttttctgaatcgtcattaatacaaggaaagagggaggaggaaccagaaggagaggagcaatagtttgggggatgatcccctccattaatttctcattctggatctttgctagggatggataaataatcttatcccaaacagaaaaggctagagtacgggtatgtgcttcacgtgaaatgggaaatatatatactatcaatgacgactaatttggcagcatacatgcgtgcatgggccagttaattaattatatatgctaaatggattgtttgcctcgatcagctgccggacgactgagagcaaaacataatgcatttatatactcgctcgtgtatcacgcataataatactatactactcctatgtatcaatgatcgatcacatgcaacaccgacaaattaaattacccaccatcgatccatctatctagctatgcctatatatatacgccatatgtatgacatatacgcaagctacatatacactctctccaaagtttacattcctgatatatagctcatcatcagttgatcgtgtccggaggtgtgagaggtcggcgatgagctccggcggcaagcaggacggtgcggcggcggcgggcgaggaggagcggaagacgtcgtggccggaggtggtggggctgccggtggaggaggcgaagaaggtgatcctcaaggacatgcccgacgccgacatcgtcgtgcttccggcggggtcgccggccggtgaccaaggacttccgccccaaccgcgtccgcatcttcgtcgacaccgtcgccggcacccccaccatcggctagcctgcctcatctgcctgccttcagcatcctgcttatcttaattaaataatgatcacatgcactcaagtgatatgtactgtgcatgttccgatcgatccatcctcatctgaatcatgttttacctacgtgttaatgttttttttcctacgaataaataaagagaccttcatttaatgcatggtagccaactacctagctaaaaacaactacaaatcgcacatcccattttattatttttctcttaaaaaaaatcggacggtgtttcgcctctcataaactaatgttgcagcatttagtgaaaaaaatatttcagttcttaaaaagaagtggaatacaatcggatagtcatatgaaacaatttgcttcaacatataaacaaatgatttaaaaagaagtggttataagaggctcagtagcaccataggtcgtggattcgactcctcatgggagcgaatttttcagaatttaatggctttgtgcagccctggattcaactccccatgggagcgaatttttcaagatttaacggctttgtgctttcagtggtaggtaacgtatccgtcgacagcgaggcgcctgtgatgactttgtccactccaggatgaatttgccggcccagtcttcaaaaatgctcatagggatagggtttgcgtgcgtgcgatcataggggtgattgtgcgtgcgttgtgagtgtctgttttgtaccatgtaattctaaaaaaaaaccatcaacaagatccaagtgaaaaccgaagagaaaaaatgaaacactaaaaaaaacccattaaaacacttcgatctaactaatgaaacatccaaaccatttttgttcactggcatcgagtttcgcaagcaggcgtgctaagacagccgctagcaaaaataccatttttgcaggtggcaaactaaagaggatagccaatgaaaacatgttttgggataaaaaaaatttgaaattcgagatgtcatcgtatgagggtagggtagggtcgacgacagcggtcggcctgcgaggatcaacggccgtggtccagaggaccaccgctgcctgatctacctccttcaccgcccctcatcttcgccgccgtggaggcggatccagtggtatcgaacaccaccccagtcagatctatcccctacactatcgccacccgtctcctttgccgctatggaggaggatatatgccaaggggaaaccatagccgagaggaagtcgttgccaccagatccatgccatcgtcacccgccgccatcggattcgcgccgccgcaacccactgtcgccggatccacgcccccgtgactcgtcgccgccggatccgtgcccccgtgacctgctgctgccgaatctgcaccctcacgacccacgatcgctagatccggaccgagccacccctgccctccagccaaatctaggagggaggggagagccgggccaccgtagcttctccctgcagcgcgaccgtctcgttgtcgcggccgcgtacgggacagaaccacaccaccgcctcccctccgctgccgccgacctccactacgtggctctccttgccgcccccaagcatggccaagtcatgtcgctgccgctgagcgccgccatcgttgaccgctgctcctgcaccacttcaccgctactagctatacagagagagaaatcgcgagagattcagagagagaaaaataaagaaagaaagaaagaaagaaagaaagagagaagggttggatctggggggttgagaaaaaaaagagggagcacgtgctgtttattctctcccactacttttgcaagcggagctcccaacaccccgccagtaaaaattgttttttttactggcagcatcttaagagcaccgcctgcaaaaatacctctatttttgtcggcggccctcttaacccggccgccaacgaagatccattttcgctgccgacccttgttaaaatttcgctggttgttttcacgtatggccgccagagaaaacaaataagttgatgccatgaaaaatcgattttgtagtagtgagcgtgaggaacgggtggagagaaatggttgagagagaggaggggaatggataagatggagggggtgcgagggtgtgggcggtgggtggagcgaggcgtggggcgcgggtgcccgatattctcgttcccatcgggcgcccgagtccaagggttttcgtaatctttacctattattaaaatttaagatgattatgtaggcacccaccttttcgtccgttgtgacattagtttactgatttttcgtaacctttacctattattaaaataatcttcctaggtggccatacgtgaaaatgatcttcacctggaaaaataaatgcaccccgtctaagaaaattgtattcataatagtgggtcctcccactgcagccaccaccgctgcccaatgcagttgcgtgccgcggcctgacagagccgacacctgctgcagtccacgtcaggagcagagaagttgtttttatcaaagtaaattgtttactccgataattgttggagcgggatggcaggacgtggggtggggtggggagcagggaagttgtttttatcaaagtaaatcgtttactctgataatggtgggagcgggatgacagaacatggattgaggtggacttgatgcatcaagagcgggatgacgggacatggattgaggtggacttgggctgatgcatgcttggcgctcggaatactaggagcacactgcgctcctagtagtatctctatataattcatagatttttcttttgttttgtaatgagtactccctccatttcatattataaattgttttgacttttttttgtttaaccaagtttatagaaatattagcaacatctataataccaaattagttttataaaatgtagcattggatatattttgatactatgtttttgtgttaaaaatattgctatattttactacaaacttggtcatacttaaagaaagtttaactaggaaaaaaataaacctacttcatatataaaatcacataccttttatccaaaaattgaaactttcaactaaaagatcaaaaaaaatattcttggctcaaactttcaatataatatcccaaaacttttaatccaaaaactgaaacttcccaaaaaaaaaaatcaaaaactttgtgctcatggctctcaatcttttgatacgaagttacaaaatttgggaaaacttccaaactcctcacgtgtcaagttgggatgaaaacggtcggaaacgatcataaaacaggctcaaccattaccataaccatatttttctcagaaacaaaaacgatatcggaaatatcgaaaaaccagaaagggcagctacgttggatgggctctccaatttatcttaatttaataattccctcaataacaagaaaaatgatctccagtcaatttcttgaccattgttctataattttacttataacaaaattttacttatgactttataaaatcccgcagctaggggtgaaaacggtcacggaaattcccaatcgaccgggcgctgtttctgtttaaggggtaccgtttccgaccataacgtttttggctattttaaaattttgttttttctaatttctttctgtgtcgtattaatgtcgatattgagtagtttaaatgataaatatgttcaattaccgaccgatcgagcatcgtttctgaagagatgctactgattccgactgttttcacccctacccgcagcaacttgctggataccacccaacaaacatataaaaaaaacacaccatgttctagtgagcatcttgatcgtggtaggatagctagctaaataaagggacggatgcgacaatgggtgctagcgaatagagcttttctgccttgctgaatcgtcattgatacaaggaaagatgggaggaggaacaagctagagggagaggagcaatagtttgggggatgatcccctccattaaataatttctcattctggatgtgtgctagggatggataaataatgttatcccaaacagaaaaagttacgtacggccgggtatgtgcttcacgtgaaatgggaaatatatgtacaatcaatgacgactaatttggcagcatgcatacgcgcatgggccagtttgattcgatcagcaaccggaccactgagagcaaaacacatgctgcatgcataatgcgtttatatactcgctcgtgtatcacgcatatcaatgatcgatcacatgcaacaccgacatattaaattgacccatgcatcgatcaatccatctctctagctatgcctataaatatacgccatattaagcaagctaattaagctagctacatatatatatatatatatatatatatatactctctccaaagtttacattgctgatatatagctcatcatcatcaatcgatcatggccggagttgtgaggtcggcggcgtgcagcggcggcgagggggagcggaagacgtcgtggccggaggtggtggggctgtcggcggaggaggcgaagaaggtgatcctcaaggacatgcccgacgccgacatcgtcgtgcttccggcggggtcgccggtgaccctcgacttccgctccaaccgcgtccgcatcttcgttgacaccgtcgccggcacccccaccatcggctagcctccctcatctgccttccttcagcgcccgggcccccggccatctttatcttaattaaataatgatcacatgcacgcaagtgatatgtactgtgtgcatgtttcgatcgatccatccccatctgaataatgttttaccgtcaatgtttttttcctatgaataaatatggaagaatcttctcccatcgaacgtccgacgtcccaaaaaaaaatcagacggtattccggtgaccaacgagtgaaacatcaaattatatatgactagtaatatacccgtgctaacgcaacggtgatatttagtagagtaaaatggacgggcggctcttaaacttgtagaggtgtatcatctaggtccctaaactcttaaaatgcatatccaagtatcagaacttgtcatagtatgttctctaggtcccaaatcgctacaaccttctggatcctacatgatactgatgtggcatgccatacgtgcatgacatggcataattttgactgacaaatgagacccatttaaaaaaaattctttttctttttttcttctttcttctcttttatttttcctttcttctcctttctctatgacccaagcagaagaaagaaaaaaaaaagaagaatgagaagaaaaccaaaaaaaagaaaaagaaaaagaaaagaagaaaaaaaagacccatcatgtccatgtggcatgccacattagtgccacataggatcttagaggggctgtgtcgatttgggacctagatgatacactttgataagttccgagacgtggatccattttaagagtttggggatctagataacataaccctacaagtgtaaggaccgtctatgtactttactctgtaatctccaaaagttaatattgtttttagtcaaaaagaagttaatattgttttaattataaagcatagaataaggctgctggatttattgaagaaatagcacctatagaacctttcaactgatatttgtaactattggttctatagaaatagcacctatagaacctttcaactatttgtataataataactttgggatttgaaggatcaaataacagtgacttcacagtcgaagtatgtgctgaaaaaggaaaaatagaaacgttgttgctaaatgaatagaaatgcccaatccccagctctcaaaaacaaatagaatgaaaaaaaaattgagaaaccgaggttaacttcaactgcttctctgtgtcagacttggcgagcgaaaccttcagccggtggcgagcgcacattactcttcactatgtgtaggtatcagctaaataccagaagcgtccgtattctattctaacaaaatacatatattatctaccctgcttatcccttgaaatgacaaattgaactgcagtctgaaaatgagacataattttatcaaaatactaatagtaattagagaagagtggcacttacattgtactcggaacaattctgcaagcctctctacatataaaagcatccggtcaaatatcaatggttgatatacatgcatgcatggttgctttttgcaaaacattcgatcaataaaggaaagggctctttatattttcttcggtacaacatctaacaaaaaataaaacacaacactaaatgctgtagcaattaccagtgtacatattctgtaaacatatacttatagtaatatgcctgtgctaatgcttcaaagccaatcagtaatgtaaattaaaagcataggatgagatggatttaagttagtatattgttgattccatagccgcatgcataaaataaaatcacaatttttatacatttctaactatctacaacacatataaattcgaccagctattaatttatcgtgttcaatacagtgtattacaaaaatatttttcctcacttttattcccagtgcagcctctcttctccactctacatatccatgatatgtacattttcttcagagaacaagtactacagtgttaatcagaaaaaaaaaggaccgtggaattgatatgcataacatcatttggaaaatgcttagtaataggacaaatctgcccgaaaaaaagattaccaatatttgactctggcatgccaacaacgagaagaaatgtttacataatcaattgatactttatttattacagttctaatccaaagcccaaaggtcaataatattagctcgtaggcagctacatatatcactacattcgtcatctgccctcttagccttgaagcctagtcattcattgatggaacatattaccaatctcacgaaccacatagtaaatattcagaaggtaccaagtagccaagcactgattattatcagtttgctgctctatgcaaaaagtaaaatataataaataataaataagaagaagaaagaaagaaaaaggagaatggaagttcaagaaatattaaataccaaggtgcatctttattttttacacatatgtacatgtaatggccaatcacattccagcattttttactgctgttacagcagaaggtgcattttgaaaaatcaagaaattatctggtttcgaattgcactgaacaacacgcaatgcacctgcatcaggtaaaattataacaccgtgtttagtccaaagaacattttaaaggaaatagcacttacatggcaatacctcagattgagggcaaattaccctgttgcaacaaccattagtaatccatcaatttcgtcccaaatcaatttccggagaggaagatatctgatgcattcagatccaattgataagccaaaaccataatgtcttgcttgcaattcctatcaggcaggatcagagaaatggacctgctcacgcgcatgagcttggaagtagatcagccagtggcctggttggtgtcgactcgggatcagcggcgtccgcgccgacggctgcaacgtcaggcggatggatgcctccacacttgcaggcttgcgtttccccaatcttcggaaggggaggagatcgcgttcgcgtgggggagggggaggaaatcacgcgcttgcgttgcggcgaggcgatctgcagccggccggctcagggagcaatagccaggcttggggagggggaggcgctactgcggccagggcgacgattgtgagggacatcggcgctgggagaggggcggattggcggattgcgggatggcgaccgtattctcgggcgtttgacgcgcgtgggaggtggagacgatcctgagcattggatttcacagaggtgatctgaaccgttgagtgatgaatgtaagagtgtaggagagaaagatgagtaaaatgagttggtgaattataaggtagatgaaataaaaaaaatcagcaactgacacatttaaaaattttaccattttcattttcgttccaatcgattaccattttcatatggcttggccggtagaaagtcggaaacgaacatcggtcagctaagaatttccgttaccgttttcatcccagtatcaagatttgacgaagaagttgtcgggtctccttaacgtcgctgaggagtgactagtgaggaagggctcgtaacgcctcgccgagtagagtagcgaggaagaagggaacccgggctcgcccaaatatcactgcgtgccattgggccgtgcttgggccggcacgaagcacgatgggccatgccgtgctagaccggcacggcccaagtccccacaattacctgagtgtgcccaacgctccagatttaatttcgcatgttgagccaatatgctttatggctaatctcaaacacaagcacttagctggtttttcacctatagtcttgattttgagattttatttattttcggctatgaagtaagaaaattatcaatgccttcagtgtccagactttcaggtgttgagaggctgaggtacaaatgagagcttctgggatgaaatatcaagcagtaaaacattatctcaagaaatgcaagcaccaaaaaagatcaaacgagtatcccttagcctcctcatttgtgggttgaacaccaatacggtgacaatttcataactgctgatcaagatatggctcatcagccaaatgaactctgcaactctgcacgagttcacctctgctgggagctatagtacaacagtgacaatcagtcatcggtcaactgcctgagataattttgaacgcattcatctgcataatgacttggaagttggagctttgctggtattgttctgaaccaattacagacatgccaggagatttgacaacagagagtaatcggtcaaacgcaaaaaagggaatgttgggtattacaaaaaaggggaatgtcagggtgtacagtcatgagaaggccgagctttggtataagctactttactctgctgatctgaactcatacataacccctcaaatcaagaacaagcactgcatccagttcttgcactgatctgggagcattactctacaagccatggtgtcagaacagattcccattcgcagagttcgccttctttgaaccatagagctacagacagaaaatgtgtaatgagtttatcatctgtttgtaaagaacaaaatagcaggtcacaataaagttaagtccaagctaacaaacatgcacgtctctaagcacatagtgctgctgaattattatttttaaaaaaaaaaaacatgatcctaatcactgtgtcaactacttcattcttcgtagtacttaaaactcatgattctatgcaccttatattgttataccatgactactgggaaaaggagtagaacttaccgatttcacgcttgccgttatcaggactgtcacttccatggacaacattcctggaaagcagagtccataagaaatttaatttctttgacagagatatatatgcagagatatccgctaaaatgtgaaagatgtggtagatataataatgttaaaacatgaaaggttgtttgattccaaccttcctgtttgaactgcaagatcgccccgtatggtccctggttcagcttgaaggggattagtagctcctattaacttgcgagctgatgcaacaacaccattcccctcccaagccttacagaacagaacaacaataaatttaattgaaaacagtttactgatcaaagtgcagagttacaaatatgtttggttctttacaaatatatataccatgcaaacaacagggccagaagttatgtactcgatcagaccgggaaagaaaggtttttccttcaaatccttgtagtgctcctgtgcacataagagagaattagcagctcgttgattaaacataatatactcctggtgattcccttcctatgtgaaaacaaagataatactgtatgctctgacggtgagcagaaaccaggtttaaccacaaatttcgatggcatttctacaaaattttctccagctgcttggatatttaatggatcacttttcgttggctgaatacaagaaaaagtgactcgaaagaactatctcagcagtcagcaaagaatgagtactttggatgatcaaggctgtcctgaaataacataccagacagacatgctatttatcatttattcgattgtgaaatttccattcacaacaataaaactgtgatctcctcaaataagtccattcaagtcttggcaaattgcccactaccaagaaaataaactgggcatgatattttgtcatgccacgcaaccatggtatattttgaaatggcaccattgctctccaacgatgattaaatggtgagtccccagatggtggaagaaaacactttacttttgaagaaaacggtggatattaagaggcaaacctgtgccaagtccttggggcactgaaaaagctttaagcccttcaacacaaagcctttcttctcgaaacgggaaataatctcgccaacctatatgaacgaatcgacaggagtgtttatctgagctgaaagaaactataatggaactacagtattcagtaatggaatatattacgtcaaaaaaaagtaatggaatctaaagttagaaaagtaagtaaaatgatataccaggcctcgctgaacaccatcaggcttgatcataatataggattgctcaacctacagaaaaaatagatttaatcttatggttgatcaggaagagatcacctaagtggagagttctcaacttctaactgaaataacagaatattgaggtaatcagaaatgtctgacatctattatataataaaagtccattaaacttcctacaaatgctcccaaactgccacgtgtaccctacaaacgctcccaagctgccacttggcactatgataaattatagaaattcttaaaattctaaaaaaaaagacaacacccaaccgttgattttcatttaatctggtggacccgatatttttaaccattagatcaatctataaagaaaaaataatcctccaatccctatcagtattgtacctacgtggagtcgtagtaggtatacgtacgtacttggacccgtatgcctcctctcttcctcctctgttccctctcttatttcttattcctattcttatgcaatattaggtagaaagcacaataggtgagcacaattgacaattaaacaaatataacatctaaactgcttatatttaatctttcaaaaagaatgtcatgttttggttacaatttctgacttttacgtgccatttaaataattccaaaatattatgaaaaaataacgatatagattttatcatcaaacataattacacaataattaaattagaaaataaattactccccggtaagtcaaaataatataattatacgtgtcttatattatattatatactataaacgcttataaattgccacatgactctttaataaattagaaaaattcctacaaattctaagaaaaaaagaaaaatatctttagcattgattttcatttaaaatgttagaccaattaattttaaccattagatctatataaaataatataatggtgtggaccatgcgtacatcgatctaatgtaaaggatatgagaatggttatagcttcgttcgtacacttacggaagaagaaaacattatatagtagtctaaaaaatcgagattcatttttctttctgaaacttaaaaaaatactaaaagtccattatacttccaataaacattatcaagccaccacatgcatattctacaaatgctcctaaatcatcactttacgctataataaattaggtaaaatcctataaattctaaaaaaaagaaaaatatcttaccatcggttttcattcaaatcggtggacctattaattttaaccattagatatatataaattaatggtgtgggccatatacattgatctaacgcaaaggaaaagagatcggttatagcttcgttcgtacatatagagtacaagacattggatagtagtctaaaaaattgagattcatttttttttcttgaactgaaaaaaattaagactttgatcggtcacaattttgcccccatcgacattactcaggacactgtcagcgtgagggggcaaattagcttgggactacatgtatgtatcatgcatgaccgagctaaaagctttatctaccaattattttagaaacttaaaagttaaaaactatttagtatttaaactaccatggttgtataaatggctaattctttcaaacaacaaagataaaataggataagcattgtaggcttcatatttaggattatgcaatataaacataatcactaaaggcctaatgcatgttagctaagataaaatcacaaagtgattgtttgcattatgtaaaatcctaatgtttaatcataaattttagagtaaaaatatttaaatcatgacaacaatcataccacactacataataatcacacatgcggagttatttttcgcaatgaaaattatgttcctgctaagctacatggagtctcacacactctacacgaaacaataaactatctcctacgctgcaaaatcaatttagactcgagaaggctttttatttgaaatatatattgtgtcacgtggaccgaaggcatccattaataaacaatgagacaatcaagtatacagagaaaaaaaagcaagtgcatctcagcaaaggatacagtaagttgtaaaatatgtagccaatttgctacataccaaaaggaacaccaaaagtaactatcaagttcgttgattgttggcaaacaatgatatcggcacaaagatttatatataccattattttcataaccaatcaatgtgaaatgacaactttaagccacttttctaacgtttttaattgaatatacaattatgttcatcacattctaaacaaatgatttccgcgagaatattgttctcatgttcctcaaatgtgcagcctcctatgtgatgagccttttgcctcggactcatgggctacctttagaaataacttttgtaatgtgtttacatataactactttagtggagtacttaacccagaaggtagagttgaagcttttacacagtgaactattttagtggagcacttaacccgcaaaagtagtattgaatcaatctattccattggttacagaggaaaaaaaagttcattttacatcctaacgatattttattcttttaaactttttttcttctctacatacaagtcatatttcactttgacacatcaggagatgaaggtcaatgataattaaacgaatacactaaattccacgacctgcatgtaaatgcctctaaggtgtcaatacaaaatcaataagcatttcgtataacgatatgattagaaatttcctactaatttttattttaagactcatattaacttggtatttttcttaaaaatactgtaggatcctacgcataagaatcactatcttacatatgtatatttggtcaatttaaaaaggtgatagcaggttagtaaaaaatatatatttatgagcaattaaagtttctcaagatttttaaagaaaaaatacaatgaacattcaattaagaagggaaacacctcactttaatttaaacttattttgttagacatgttttcgaaacgaaataaaaacatgcccgcgcaaatgcgcgggctaccttcctagtttcataaatagacagatccacacttattctgtgaaaatagaagcgacgaactcaggttccatacttaagctaagtcaaacagcatccgtaatacctctcagatataggcatatatcgtgccatgaaaagaataagtggacataaaaaatgaaacagttctacaagttctgctgatctgcatctttgatttcagggattaaatgcgtaagattaataaaaccaacattgatgcactaacacgttactgagattagcaaacagaaaatggctttatgcttgaggggaataatgaaaaactacaagaataaatttggcatcccttcaacataactcaattttctcaactatgcataaacagatttagattgttctacagtaccccttcactgtgtatttaagacattgcaagttgcaacaactgtcatgctgcatcgcaaaatgagattgcctaaggaaacttggacctgttcaagtactggaatttgaaacacgttgttgaataattcaaacaatctcacagtagaaccacagagatcattgcatttattaacaaaaagagtaaaaaaaatgaagaccaaattttggaattctgatgggcacaaaaattctacataatgacatatatagcaaacatcttcaattgtactgcacgaactaggcagcaaattagatggttatcagagcatccaaaataattgccatgaccatttccatatgcgcatcacggtacaaaagcaactcctacttggcaatcaacacaatgtagcatgcctaagtgccatattttcatcagtactgtctgccgctgacagcagcaaggcaaaattcttactttcagttcaagttcgcttcctttttttccaataacttatgtcaataaccatagaatattccagaaacgggtactaaaattttagactgactcttctcaacaaaaaaggaaattcagactggccaaagcaacgtatgaatatgtgggacatttcagtgaattatctgttcagtttttgcaatcaatagggagccaaaaaaacgattatcttcatctgtgctcagctagtagcatgtctttttcttccccaatctatcaaaaaaaatacgactcgggccaatacaacagtagagtaaaagtctgaaaccaacatcacaaccaaaccaaattgcccctctcaacccacaaaaaaggaactaatcttttcctgcaatttggaccaaacgcgagtaggtaaaaacaaggggattaattcgagaggtgaccaaccgacgacgcgacgatgcggccggcggcggagacgcgccccctggccgccctcccgccccacgcggcgctcagcgcgacgcggccgcgggaccccggggaggcggcggcggcgaaggagacggccgccgggcgccgggacaccgcgggggaggtcgcggcgaggagggtcggggcggggcgggaggtcctcgcgagcacggccatggcgtccatcccggtagctgcttctcctccaacgtccgcgcgagcgagcgagcgaccaaagcagccgcctttttttggattagggagagcggagaagaagaagatgatgagcaggagcagagcagagcagcggccatcttgtcacatttttcaagatttgtttattctcgagttgtgaagtgccgaaaatacccctgcctctcattttcctcctgcatgggggtgaaaaaatggacctgatttgtcctcatttcgagtcgctatatacctcgttcgtttatgaaaattatattaggagtagtctttttaaggttagctgaacataaaattaataatttctatgcaatgtcgaagagtcctcgtttagtgggattgttcatattgttacaacctctagcatatggtcaatgatttgttgtcataagtttgctcgattgaatttagtactaagatgtttgaattttttcaataaaagtactttttcgagataaatctatttatattgttttatgttttcaaactaaaagttatcccgattattgataggccaagcaataaaaaataaccagatttatcatagagcacaaatatttgtgatcacagggtgtacgcacccttgtttcaaacagaaatgaatgtatacgtgcttcatacaccactatcgactccttgattgatctcgcctctaccatgtacaacatgttattagtcgttttagattgtttttcctagtcccgtttctctctggttgaaatcaataaggttaatatggtatgagtttttgatatagccgtgttctatatggttttattcatcgggagataccattcttctataaattaaggtaagatgtacaccgctcttctacactatgctggtcctcgaatcatcgctaaacggtgatgcttaccttcttggcatggtacatgtatatacatgtgatgtgatgcttattttacaagtatatgcattgatacttggagcgaagaataacatacttttcttcaatgttcacttcattagaagagaaaaaagatgcctctccatccaaatgcccaataaaccatagctgcacaatgattgactttccttacaccccttatggttgcatacttaatcaacaattgccatccaaaaaagtgtgattccacaaagaaaaattgtgagcatctatcataaatgtatatctacttcatcctagtatcatatatgtacggcaagtataataaccttagtttacatgcaaacgttatcactcaagccatatcaacctacatcctacatgaatgagaaagaagtaatcatatgttcgttgagtgtgagcgcatagccaccaagtactagctgttgtgcatgagctagtccaaagtaaaagagaaagatttgagactcggtaaaagataaaataatttttaaagaaagcattgagaaatattgttgtatatgtatatggctttcaaatttaggtgattattctttagagccaacaaaaggtcatcttattggctgttgccaatttgaaagtgagtttagcttttgcaactcgttcgtttactatgagtatgtttcctaaattattagacggtgtatttttaaaataaatttttatataaaagcttattttaaaaaaaatcaaacaaatctagcttatcgatttaatacttaattaataatatgttaaatgtttttatttcacgtgcagaaaaaagctaagtcaaattgttgccactgcttcctccacactgcccacttgtccagtggttgccgaggtgcttattcctacacctaatttatggaggtcaataacaaaattattattgtaatatacttttttttatatagtactagctcatttcacccgttgttatgtaaactctttagcccatattgtatatgtggcatctgacgaccgtccagtataaaaagcatgaggcctactggcctacttaccgtaaaaagtcaaatgatacactttgtattcaaaacacatgttaccggtgtacacatgcatagaccaaacggaacacctcattttagtaaacctagtctgacgctttctatacagcaacgcggtacctcaaggtttacgccttcaggcggatcacgcacggtggagacggacgagcgcgagaaaggaacaaaccgaacaagtggacccacccacccgtgggcccatccacttcgtccaccacaccgcatcgcacaaaccacacaacaccggttccgaccaatcacatccgtccacgtaccccccaaacatcccccggccccacacaccgaatccccccgcacagcgcgtaagccgccaccgacgcgctggcactcccacgttcaagccctcctcaccaccctcacacctcacagacaggtgggaccaacaaaaaccagacccacctgtcagtgacgcggttcggacgaatcccccgtagccgtaacacgatctccaactttcctcgtgggctccacgtggcagtggggaaagcacgggtcccgatgatatcgcccacacaccacctctctctcttctctctctccccatctctctctctcctcctcgactcaccgtctctctctctcccctcccgtctccggcgatctctccggcggcgtctccggcgaccgggccaccgccgccgccgccaaggagcgctccccctcattccccagatcggtagctgtctcgtcgccgtccccgatcctcctcctcttcctttcccccagatccacaccccccccctcgcgtactcgctcttagcctccgcggcgggaggtggtggtggtgtgggcggggggtgagctcgtgagtcagatccggtgatctgtgcgctgttgcggttgccatggacgacttccagggcctcctggcccgcgactttgggctgcgcccgcaggggaaggcggcgcccatgtcggccgcccgcgccgccgcgtcctccggatccgcctggtccaactccagatccgcatcggcgtcctccgccgccgccgccaccgccccgcccgcgcccttgtacgatgacctcttcggggccgcggcgccctccgccccgccgcccaaggccgcgccctcgccctccctcgacgccatctttgactccttcaaggagccctccgccccggatgccccacccaagccgaagcactcgtccatgccggtgtttgacaagccggtctacgatgacgacatcttcgatggggttcccggggtgaagagcagctcctcggcgcggtttgacgatgtattcggtggcagccacgcgccgccgccacctgcgtacgatgatctgcttgggggatttgggagcaagccggaggtgaaggaggtgctgccggaggagaagaggaagcctgagccggccgcttcatcggctgggtttgatgatttgatcccagggtttggcgggaggatcccgatgcgtgccaggtgagcacacctttttgcatgggaatttcgggcattatgttgtctacatgtgcaatctaggagtaaatttagtagtagtttggatcaagcggaagctttgtcggtatgagccaactcggcaacgagagaaccatgtgataattcagttgagttggacaaattatggactcccatatctaatttatgttgcatttgcttagattttagcttgttaatgtgcacgtgcgattgtttgaattggtaacttataccagttgaggtaggaaattcattgatggcttatatcttcaaatctatttggtaattgaatttataggctattttccattaggtatgatctgtgttgaccattgaatatcaatggcatcttgtggataaacttatgggcatcttgtgaattttatgggctctacttcgattttactattagaaacgcctaggaacatatgctatgctttttataagcattccctactttcctaaagataccagtgcactttctcaggcaaacttgctttggcctctatattgcgttatgtggataatacagtgtatgctaggtttattatggtttatttaaattgcacatagttcatagagaatgttcagcatgcattaatgaccggatgtggtaggttcataggctgcacaactttgattgcaaattaccttaggttcaaatataacgctttatagtgatggaatatgtagtgagttatgcaagaagaatatctacgaggttctgaaattgctttgtttaaagaatgatttggatctttttaatctaaaatatgtcaatcatatacagatttgttaccataaattccctcatcctttttttttttgaatcatagggagactgttggaactaaagataagaatgtgtccatgtcaacgtctaagccagctagcatggcaagtgacccatttgatgttcttggtacaacttcaacctcaaagcatacatcttcagggatattcacggatcccttggatgaactgggcaggcctgcaaaatctcaagggaaaaaacatgataatactgctgttgacagtggcctattcgaggactcaagcacttttaatcaggtcccaaaatcagaacctctgtttacctcagagttgaatgatgacttgaaagataggaatggctccaccaaagatcgagattcaagtcctgtgcaaaatttttccagaaaaaatacaacccaaaaaccttctgtggagaacttcgaaaatatctttcctaagtcacagtctgctcgatattctgatgttcatgttgacattggtgcctctggttcagagaaatacagtgggaatggtatggatgaccagtctccaagatctgatgagtccgaagatgagatctggcttacagtttctgagattcccctcttcacacagccaactagtgccccaccaccttcaagaacaccaccacctcttgctgttaagcaaaaaccacatggatcacaagcaaaaagaaaagatgacaattatccacgccggtctaaccaaaaccacaatcatcacagaagctcgtcaaatcaagctggttcttcttcaatagatgaactggaagattttgccatgggcaagtctcaaagttctgcctatgacaatgcaaatccttttaatgaggaagaatttgagcatagttcatcagcagcagcatctgcagctgctatgaaggaagcaatggataaagctgaggcaaagttcaagcatgcgaaggttgtacgggaaagggaacgcgatgcaaaacatagaaatagagaacagcaggaacaagatgatgaagcaaggttcaacacccaggatcatgaagagagagataggcaggaaagactagaacgggagagagagatgagacaaagggaggaaaaggagagagagcaaagaagacttgaagaggagagggaacttgagaaacagagagaaagagagagggctgctaggcaagctgtggaaagggctacaaaggaagcacgggaaagagcagctgcagaagcacgtgcaaaagcagagagggaggcacgccagcgtgcagagcgggctgctgttcaaagagctcaaaaggaagcacgtgagagggctgctgtagacgctagggaacgagctgagagggcagctgctgaagcgaaggagagggctgctgctgaagccaaggagaaggttgcaactcaagccagggatagggctgcagcagaaagagctgcagtggagagagctcaacaagaagcaaggaggagagctgaaagagcagcagtagagagggctgcttctgaggctcgggaacgtcaagctgctgaggctcgagaaaggcaggctgctgctgctgctgctgcagcagctgcagcaaaagaaaaacagagtaaaccggacgatcttgagtccttctttggtatgggagctcgagccaatagtgcgccgaagcaaagggctccaacagcggtgattactctaccaaaacatgcatgctaaaattttgttcatggcaatttttgggttattgttttaccaactgtggacgtttcaggattcgatgttcaattctcaaactcaaaatagaggggcagcatcttctgcttcagcatctatgcggaaggcatcatcaacaacaaatattgcagatgacctatctgcaatatttggaggaggtacggatcaacccaaatgcagcagttctgaacatacaaggttttgcaatattattggctatcgctataactcatttggttgatttcttttcttttagctcccacatcatctgaagaatttcaagaaattgaaggagagagtgaagaaagaagacgtgctaggttcgaacggcatcaaaggacccgtgaacgagcggtaatgttgctaatgattttagtaactaaaatagatatttgtttgtaacttgctgttataatttggtactgtggacattcattttatgttcctgaattttatcatttacatgttatttttttctatttattaagagttgtgatgcatgaatttgagttgcagtgccatttattaacttcaccgtgtatgcaggcaaaagccctggctgaaaagaatgaacgggatatgcaggttcaaagggagcaggctgaaagacatgtaagtactttttatctttcaattgcccaattttacttcttttaaatacttgtcatactggttagtctccatttattttcatatacaagtttactgatgatgttgtggtgcattttatttgttgagtaaattacactcacggtacatggaacttgtgtggtgggtgcaaatagatacaaccacttgcaaattgctcactttgatacaataacttggctagttggtgtttaccgggccaaaatgatccacacaagtaaaattgctctaaattagcacacactaatgatatgacagcatacacgtatgactgtgatttggagatcttatttcgaatccaaataaaaagaggaattagatgtgcaaaagtttatttttcatgtccaggatagagtatttatttcatttattgggaaaatttgatcctctatataactcgtctaatgtttatttatctgttcaagaccaagacaatttttatctgtacatttaactcctaaaagaacactttaattttcatgttcatgttcagatactctttcatcgaaagtgtatttaatgattgggcatttttaattattttacttttttgttggtctaaatcttgaaaatatacgttgtcagtataaaattttgatgtgtaacaataattacacaccagtatgtaatgtatcatatttgatcaattttacttgtggatcggtttggcccaggtttgcacaaactggccaagttattgtactggaataagcaatttgcaagttattgtacctatttgcacccaccatacaagttagtgtaccatgaatgcactctctatcaatattttgctaatggctagttcctttgtttcgttatctgttaatccagagaatttcagaaacaatggactttgagattaagcgatgggctgctggaaaagaaggcaatttgcgtgcattgctatcaactttgcaatatgtaagtccttattcctgatgctgctaaaaattgaatcaattatccttgtcttctcaatttttctattcattctctcggtgttattcttgcaaagaaagttgcttgactcttttgcttgtcttctggaagccatacttttccctgatcagtttggtagtgcaatttttaacgtagagtgtgttcctttatcatggtcacatttcaacacatgatattttctatccaagggtagttccgaggtaattttgttaagcatgcaggttccagtaattgtattccctgctacagctttttgtaagctttgttttcacctgtggtgaccaaaaccatggtattgaggtgaataggtgatatcagatagttttggtttcttgctgatgtttgaatgtaacatagctgagtggctcaaagaccagattgctggatgggctgaatatcttttgtttttctaagtcttccagtaaaaacgtttatctggtgttattctcttggtttgccattacctgcatacagtagctccttcctcgcaagctataatacatactctgtatgtaagtaaatagaaaattgtgaaggactaataattactcctattcaacaaacattgcattttagggctagtttgaagagaattattattaattctgttctttctgacaggtactttggccagaatgtggatggcaacctgtatccctgactgacttgattactgctgctgcggttaaaaaggtatatagaaaggcaacattgtgcatacatcctgacaaggtgcagcaaaagggggcaaatctacagcagaaatatgttgccgagaaggtgtttgatctccttaaggtgtgtatgctgccaaaatatattcacaaaccataatagcagcatgctgcttcacactaacaattggtcaaccgtatgtttttatttcccttttagtttattgtggagaaattagggactgcctagctacagagcctaacaggacttattaatgtgtttttccaattttaggacattggcctctacatggaaactgactatttgtcaattatgaatatttaggatctttcactgtacattttgagatattattattcatgtgtggtccattgagccaaataaggcttcctctatgatttcacatggaaagtgccaaggtttgacagttttcatatgattgatggtacactagaataacccatattaatgcaaactttggtttgtgtccacctggaccaccacctggtgccaacgcaagtatatctggcatgccctgcctactatgcccacaaccaaattaatgcaaaccttagtaatggcctgatagtctgcctagaggaacccaaaagcaaatgcttgacatatacacgatacgataatttaatacatcagattgatcttgttgatatttagtactttggctagtatatcttacattagcttacttctttatacaatgttgcatatttaggatcttattatttatttttagcaagaaaaaagagcttgtactcaattgttttccctaaaattgtttaccaagtgccgggacttttaaagagttctattttctagtgtttcccattacatccttttggtataaactttaattaaacctcctctatgtttgcacaaaacaggaggcatggaacaaattcaactcagaggaactcttctaaacggcctgcgcaaatgaaacatattgctcaccaatcttcacctgcatgaggcaatcggggtgggacagcacctcatagaacaaccgagctggagcagtcggtcggcggacccatgaaacgatgaagtgaaagttccaccataattacaattgtattgttattaccaatattgtttgttttattatacaccctcatcttctcccttctgtatgtgttgattcaaatgacatttcacagccacatgtggtggccctgcggcagaccctcatccagtaggtgtatattagcgttctttttgctcggttgatccagggttgtgtagcagcggatttggggtggccagtgttgtggtttttggattaggcacagggtttatttaccatggagggcccaaattgcatggatcatgaatgttgccagtttgatgccatgggcttttcgtaagttcaattatcttgtttatagtgaacttctggaacacacattggggatgttcctctgattcctgtgtgattttgtataaagttgatctggaattttgatttcctcttgttctctgttaccgcttcgttatttgctcgttccttgaacgtataacgctagtatcacaaaatcctgtagagtttcctttaaagagtaaattttacggaacttcatgtattaaccaattgtgcataagtcatttgttttggcatgttgcttataatggtattatgctcctataacttcagaaaacagcagcagtaaccaaaatttcatctgagttctttaattcgatcatataaaagttatagtaatctaagttaattcttttttattttgctatagtgttaattcagattgattactagtagtgtggttttgtgaaatctaataccgatggtcactgtgcaatatgccaaaacccatatatcttgttccatttaaaaccataataaatagggttatgtgatatttaataaaacagatctgttaactcaaataaagattgaattgggaagtgttttaatagtttattaaaggttggattgggaagtgttttatagtgtagtggcttgatgaaatcatgggtctgccaccgtgttgcatcgatctcccaaattcttttctcgtttcactcgcatcctcatcatcttcatgttacttctacctacaagtatattgttttctcactattttatatcttttgctcgttaaaggacaatgatttgggtgtattcccaatttcccatcggatccagtaactcgtgtaat

SEQ ID NO: 9402 - DNA, 1160 bp, Oryza sativa
tgcgtagatgttcatgttccttttgatattttttgccctcgtttacaactgcagcttggttgtatcaatgaaatttatgatgtgtggccatacctgtctaataaatatggtgaaatcaagcttactaatactattagtattctggtttaagttaatttgctagtgccttttcaaacctgttgtgcacccatttctatcgtctattcatgccagtgcatacagcaattcctaaacatgttctgtgttctgctaaaactgagagcttaatactgtacttctcatttgtaaacttcaggtatatacacatcaatattgtcaaactatttcctttgatgttataccaaattggttctactaaacattacatttagctgatttatcttgttttgcaacaaatttgatgtatgatagagttcttcctagaattgtatcgcgtggaacaatttggatttctgtagcacataaaacatcttactatttaattttaatgtgagccagccaaactttgaaccttgatgtgctctggagttagttttcactatttctcaatttggttccggcttcctagctttgtaatctttcacttttttggtcctcagatcagggaagacccagttggctcacactctatgtgtctccactcaggttcatttttaatacatgtttttgtcatcaccaccttactgccatagattcagtgaattattttctttttttttgttcataaactgcagcttccaattcacatgcatggggggaacgggaaggttgcttacattgacactgagggaacattgtatcttttgaatttacttagcaatagcttcatctgatccatccattcaatggatttatttgcatttctgtatctctccaacttgtttccttaatggagttttcagccggcctgaacgaattgtgccaattgctgagagatttgggatggatgccaatgctgttcttgataacgtatggcccttaatttgactttaccatttcaggcctaacaaagaagctatctgttatatttgcatctatttcttgtttagatcatatatgctcgtgcatacacctatgagcaccagtacaacttgctccttggcctcgctgccaagatggctgaagagcctttcaggcttctggtaggcatggcttaacat

SEQ ID NO: 9403 - DNA, 3872 bp, Oryza sativa
acaataactgaatgttttgtcttgatacctgttcagtgttcagtcacgaagtctcaaccatgtgcataattttttttccctttctaaactacatgatttaaaaattgatcatagcaattgatagtcgataggaattactatcgattttttttggcagaatagtctaggtcatttgtactgattgctctattttatccacatttactagactattgttctgttagcatgcaagttgagcattgaatttttgctactgacaggaaagaactcaggttaaatgtttgatttcacataaccaaaaaaaaaagcaatggagaggcagatgatctggtaagaacaactgatgggtgcagcactgcacaagatagtaatctttttatgacttcatccattcaggtatatacgcatatatccattcaggtatatatgcgtaagaacaactgatgaggcagatttctctactattattgatagcgtacactatgcacacattaatttaatggtggaatagtcattgtcgttaaaacaattaacaacggcgcaatatcaccatcgttaaataaataacaaggacactatcgtggattctatattttgaagaaagtttcactcaaaagtgaatcagatatgaatcagtactgcaagaaataagtatgtcttgtcatatcaattttttttaccacgcaaagaaatattttatttaccgctctaatggatcgttggatgtattttgactgccttggccatctggtggtgttggtacggcacccatccaagctccatatggggaaacaaatgaattaatctgcagtggaggtgctgtccaccaacctacgtcagaagcacaccatcattagttttctgttgatgacctattcactagaggctggaccaacggagacgacggcggaaagtgcgattttacttggaacagccatggcttcaccagacaaagggaaggcgacgccgggcttcactacaccaccccaccaaggaacgccgggaggcaaagcttgaggcgttggaggagcaatctcccgcttggatctatggctcatcacttgaggtttgaggagatatgaggattagggatgagtttcaggaagactgagcgacaagcggtggatttatggattaggggcaaacttggcttgggtctaccgcgggaataagagggtgatttggcgcataaactacgcgggaagattagcagccatggggatttggcgccctagagaagaggagagcgcgcgaggaggaagacgcaggggcgtgcagggaacacccgatcccctttggcgagaaaacgcgttgaatagcggcagcttgtgtcgatacggtgtcgttgcgagtctcgatttgtgtatatcggctctcgccaggtctgtagagagctgtgttctctttcctaatttattgtctttcacctaggagagattgatgacatggatttttgtagagtgcttaacggcacctgttgcggctgcccttagcctttgccgccgatatcgatcggatctccgactcgggacacaagtatgtcttaaaatcgcatcattaatcttaatttagatataagttaatgatcttgtgtgcttccatagttccatcaatcttgtttcctgttgagtgcattattaagcgcgcgcatcactagtcttaagttagatataataatcatcttgtatgttttcatcaatcttgtttcttgtcgagtgcattaagccctatgctggaatttgtaatttttaagggacaaaccacttcaaactttcgatgagagagagcaggaaacatagtatcattgctagcaacaaacaaatattaattccgcaccaaatactgtcccaaacaaatgagtagtccatatcccactaaacagtagtattacttcactcaaataagaaacaaatatgaattatgcatcaagcactgttccctgctgttttttagataatggattaagaaaccggcctctacatccaactgttccctgctgttgatcggtgaagtttcatttcgtcgtcagatggaagggctcgtgaaatactgctgtcattgtttgcttggccagtaaatagaaggcgcttatttcatcctgttgaatatacaattggcgaactaaatctcctgtgttggttgaacctttattctgtttgttactcgggtaattacaacttggactttgttgattctgcttcacgcagttgtgcgtacatatctgcgatttcttttgcaaagtatgccttagcttgcggtcttttgatctgcaacatcattgagatagagaattagcaccttaggtatcgagatctcctgcaacagaattaacgggcctaccttgaatgttggggtgaggagaccattttctagtgtgaaaggctcagcaacaagggtaacagctttggcaaattcaaaacctcttagctggtacagtaagtaagcacagagagatagataaggatcatacacatcatacagaacttttacttattaagagagcatgtaaggtaagaactaagaagtgaaaattaaacctgtgcctcctttccaatagagtccatgtcagccaggacagcagctcttgcccttgtatcagcgcatagctgtcttaaatcctcgtactgtaggttagaaagggaagatcataacataagcaggcaatgcggatgtaaggagctctatttgtagttctgttttttaataaataaaggcagtgtttgtgtagtgaactggaaaatatataataacatacaagaaggtaatctgctgatttggagaaactgggctgtacaaatgtatagtatgtactctttacttcaaaaaaaaggtcagcacatttacctggattccttccgatgcagcccaagccttcaacacctctggttcaactgctactacggcaaccaaagaagagtttaaactatcacctgcattcaaatcaacggcttagaatatacatggtaaataattagtacgtaataaccaatataagatcatgaatattaccatatataaagcactgcgcaataaacttgcacttagcatagacattctcaatcttctcgggagctatgtattctccttgagctaacttgaaaatgttctttttccttgagaaaagaaaattgcatcaattaaaatttaataagaaaagtaatcagacgaaacagagttccaggggaataaattaaaatagatagcctaaaaaattgtgtggaaagaggataaataattacagacaaaaagatttcagaatagagttgtggttatttctcaaaaaacatccatgcattacaacatttcgcaattgaaagctgtctgctacaataacagtagaggatagttaaggtttgctcttcgatcagtagatgaggagttaatatcttgcttttactttagtcttttagcacactagttttaaccttatcaagtccctaccatcttagtatatggtatgtattcacagaactacaaaatacagcaaattctataatttagaatagcagtgagctttcacatattagagtttcatcaccaaccatgcaaatctcatataacaaacaatataatggtgagaagaaaatagtagaagctgaatgaagatttcaagtatgcattaatatttaacaacttaatttagcaatcactgatctggatatcattaggaaactgcaaggaagctaaaagtaagtcctaagatgtacaccctctctttggaagatttgaagcatagaaaaaattgtgtgtttaacagcattaatctcagtgtaactacagttatccaaacagtgaccaatgaatgttggatcatgcccagggcttcttagggagtttcctaataggtcgcttgggtgaggttgttttttagt

SEQ ID NO: 9404 - DNA, 18531 bp, Oryza sativa
tctttttgtgtaagtgctttgatgatgtgctccttccagtcacaaaataatgatgttcacatgtagtcaaaccaattaactttgaccatagtaattatttcaaacggtaagttttgtgtgtataaaactgatagagtaaattatcataatattacactagtttaactttttcgtggcttttatgaagttaatttttttgatagaattatgaagttaaaatttaaagttctgccatgttgaccttgaaaagccaaaaacttgattctttagtaaacgtagggaatattgtacaaattcatgtttcacacaattaatttcgttttttttttgttgaagcaggttcagtcaaatcataattttcaatttaattatttgttgtgtttaataggactgttgctgaacataggcatggtaatccatctgatgtgcttgattggaagatcgttggagatgacagtgttttccctgctaggtattatgatgcattgctttactgtatcacgttcaatgttagtataaatttgttgataacagaaaattactgaatgacagatggttggtacctaagccgtattggtgttatcctgaatttctggtccagcataaacttgcagttaaaatgagtagaatcgagaccattccgtgttgaattgctctccatatcatatcttgtgaacctatttaacgtcgagagaccttatttaaattgtcggtatgttcagtgtttataagttgtgtttacatttggacaaagtgctctgagttttgagcccgactgcccgagggccatccgatccgaccagtgatggacgtcctacggggtcttttcacagccaaattcaatccttacattttttataagctcaaaaacatatagggtgtgtttagttcacgtcaaaattgaaagtttagttgaaattggaacgatgcgatggaaaagttggaagtttgtttgtgtagaaaaattttgatgtgatgaaaaagttgaaagtttgaagaaaaaatttggaactaaactcggacgtagtatgaaattcagcctttgaacgcgtgcaagctagtagcttcgctcgtcatcctcgaacctgacgatgaagaggtattctcagatctgacttctaagccccttattcttgagccagagagagggtggatcggaagggaggagagatcgggagggagggggggatcggatgagaaggggagggttaaagttcaaaatgccaatatttgaaaagcaatatctcacaagatatgtattattttttaaaatcgctcccactacagtaaattaggaattgaaacaaaaatatataggttaaaagtctcaaatgctaaccatatacttgttactgcacaaaagtaaaagtgttactgcactgaaggtatacgttaccacgtgtttatgcagtaacactatccaaaaaatacagtaaaacgccatgtagtaacatcatgatgcgattgtagtaatgtacaacagacaagtagtaacaagtaatagtatagtattactacttgtggagagacaatatctctcaagtgatgtaaggttttttaaaaccgtttgcaccatgatgctagaaaaaaagagctaatcaaaagtagatccgtcatgactatatttcaactatattttaacgctgttactgcaagtaagacacagtgttactgcatagaggtcgtcgtgttactgcaccgtcctgggacgagagctgagaagaggtgggtggtggggggagttagtaggcgggtttgaccggtgggaggggcctttaaccgaggtgggaggtgggttttgggccttggtaaggaggggaggtgggtgtgacccttgggagggaggctgttctatacccggaagaatagtttttctatatatatgtgtgtgtgtgtaacggactcaaattttcagggaaaaatttttgcaaaatatttcaagtcatgctcttctcgattcttcctttgagtaatctcacttttgatcttttctttgacttggatctaaactttatttgctaagttaaaagctttctttaaaatccctttttaaattttacaaaacctttccgtttattttatttaatctttaactttggctctaaattatatttcctttgaatccattcccgaacatctccagcaaatactctttcaattcccgttcaaccatctctagaacacatgaaatattaatctctctagaattaatatcttttcatttagagcttactacactaccaccaaatccacttttatcttccaccaaatacttcccctttgatctctacccaaacacatgaattatcaattcttattttctccagaaccaatacctttcctttggatctccacctaaatattcccatagtccataaaatatcattgtcaatctccctaagttaatatacctatcccttagaatttattaatcaaccaccaattccgtccgtagaaaaattcccatccacatatactggaggttaaaatcccaaaatttatccaaagttagtagataaattaattatattttctttccatttgactattttaaattttaaaatattagagaaaatattttgtgatgagttctatatttggttcttattgaattcttttaaaattggagcatctttatttttatccttttcaaatttatatctcaaaaataaatatcttgattttattttaaacagtatttcaaactccttttacttcaaaaaccttatattcgaatttattttataaagtttaaaagaccctcaaacattcctcttttaaattttatctcctttaagatatatttaaaaccttccattcaaaaattcccctagttttcaatttcttttgaattctatttaaattcattgtccaagttcaaaaagtccacatactcccttaggttccattacctttgaatcccatctaaattccttgaccatatccttggcacaaagaataatatattcctaaaataattgctcttgtgctaaggaaattccaacttatattcttcactcaatttccccttttagccaaaaatatacataataccaattttagaattcaaatcctatttattgccttcaactaattcccttctatattcccaaaaatattttgaggaatattattaatttcccttcctatttgagtgcttccaaataaattccctcaaactccacctctaaatattgcactcaaataaattaagaaatctcttttatgaactctttccaaattcaaattctttgtaaaacctagctatccaaatcaagtattcaaattagacttctttctttttgtcatcgggccgaaactccgttctttcttccttttggcccaatcttttatcttttatttttttcctcctccctcttgggctgccggcccagctaagccgagccggtccaattcggaccatagcccagccgcctctctcctcctccttccaggtgtgcgtgttgtacacgcgcacggcgcacgccgcctcaaactcccttccgtcgtcacgaagtaatcggcgccgtcttttcttccttcacgccagcgtcgccgtggtcaagccgtcgaccgcctccagaaccgcctctccccaccgcccctctcccctataaatagccggccatccctccccttctttacatacaaacagagctccatctttctctctcttgccatgtccggccgtcgccgtcgtcggccgatctccctcaccggagcttcgaaagccaaacccttgcgccaccaactccgcctcgccgaggtgattccattttttcctatttcccctctcctttagccactgccacaagcactaccggcaccaccatagccggccagagctgagctcttgctgccgccgttccggccattctatttactccctatgccttccaccgacctccccggatgcatagcgagcgggaacacgcttgtccgccgccgtcgaggccattaaaccaccgaagcaccggtgccctgtgccctcttcccctctgttgttgctcgggagaagaaacagaaggaaggagagaagaacgggaggaagaagaagagacatatgacagtgggccccgctgcacagtaaacttcctcttttatttgatttcaatctttagacaaccgtatctttccaaccacaaatccaattccagtgaacctttgatctaaattcatctaatttcaaaccctcccttttgataccaaatttcctatttaaaattttgtttaaatacccttttaatttaaacctatttgatttatcttaaatccctttaattttaaaatttcttattttatttaaaaccatttttaaattaaattatctttaaatatcatttctttatttatttaattaccttttctttatttcttttaaaataccattttaaattttatttctttaatatattttttaaaaaactctatttgaattcaaatttctttaaaccattcttttacaatccttagccaccaaaaagccgctgtggaaactttacaccttctatggagacgttcgcgtggtctcaaaccccgatgtcaaaccgttggtcgtaaaacccggcataacctaatcctaaggtcgaagtgtcgctcttcgcaccccacgcctcaacgcgtacagtggtcggagcctcactactccctcgacctccacaagcatgccacacactagtccttgagctatgtgcgaccctagctgctctgttgtcactcacaactgcagagtaacactattccgctccacacaaatctcctaactcactagccgttgtgctacttaactgtagcatcgactagacgagccgatatttagccgttatgctaccaaccttagcatcggctaaccactccaaatatctaaccgtcgtgctactctattctagcaccgactagaaaaccaaatccaccaaatcaaccccacctatccattttatccttttcctcaattccaacatttagaaaccaaaacctctcttttgttttccaaactaaaatttattttgaaccattcctttttccttcgccttgctccaattttatttattatttggtttttatcatttctttgtagcaatttgcttataggctttatttgctatcttttcgtattcgtacgttagaccgtacagcaagttttatcagcatccaaggagctgacgtggacccagatggctacgctaaagccgcaagaaatcttaaggtgcaaggaaagacataattaaaatttgatcatatagaaaacttgatatgatcttcatatttaatttgatgcataataccttactcttttaacatctcatgggtagatgttaaatgcttttaagcatgattgcatgagaacatagaaagaagcattggttatcattttatgtgatttactattccaaacaactttacaaacttaggaatccaattaaaatgggcatttatgagttgagattataaatgctgtgattatgaatgttgatgaagtttgtgatgttggtgtggggagtttggaaagttttgggtggtttaaccggattataattacccccttataccatggaaatgacatagttgcgtccatccacacaatcaagtaattggacttagcgtagtacattgtcccactatatgaaagactgttgggtggctctatgagcggttttggggtgaacttgcgtaaggagtttgggcggcagtgtttcacaacagtgggattcatgaaagtgtgacgatatagataccttgcctaggcctggcaagagttcgaccactatgatgaaccaagaccccactgtgtagtaactagtagtaagtgggaccttcgaacggctctggtgtccttagccttgcaaattgttgacatcgtgtgggtaaagctggacagtctctgcagaggtgaattaaatcattcgaatgtgccatactcccggttctgcagttgtgtcatcagggtgattcctactcctgaagtataagtagttttaaaattaaagagttgaggataaagatgatttatggtttttattattcctttactttatttttgtttatttattcatatctactcacctttaattatttataatatgtcttgttgagtacataagtactcacccttgcataatttgacatatagaggaaacgtgctaacaaggagatcggaaggaagcgagattttacggcaacgacaagtttatctaggctagtctacactcgagcttttgcctgtggagttatttgaattctttggagtttattagctgtagttttagtagttgaagagcttaggagtttagtagtttagcactttagatttttcttgtattttcaaataaggatattttagtttggatcttttcaacctttaacaattgtataattagcttgtataaccaaatttgtataattaattgaaagctgatctgtatatcaatctgtgatcgaaatcctggacgatcacgagatcgaaatcctggacgatcacgaatgaattttcggggcaccaagcctaaattgggtgtccccacagtgtgtatatatgtctaaattcattaacatcaatatgaatgtgggaaatgttaaaatgacttacattgtgaaacggagagagtatataagaaacactgccaaaactccaaaactgggcaatactgtcaaataaccaaaattttgacattaaatttggtaagattcattttggatacaatctaaatattcccgttcttttggtgaagcgtcctccctcccctctcatgcttcaagaagcatctccgtcggatttgaccatgctaaaaaagtcttgattttgtgagctcgacctgctgtcaggaatagaattgtcacacataaaaaaatgagttattttaggtaatggtcaatttagcaatcgttatgggcagtagctaatgatggagatgcctatttggacggacattgtctcctgaacagacttgttccatgccctttcttgtgctagttgtagggaccaatgacatgtcattccatgatccagcaggcaatagagcccagaaactcacaaacctggcaatttcaaccaatacagacagacaaggcatgcagatttaacaccaggatttggaggtcacgactcacgatcagtgaggcagtgaccaatcttgcattcaaatatgttaagatgataatatcgataatttacatgtgtacatcctaaacagaacctaaatcggcatgttttgccaatacacggcacatgttaatgggactttttcttcatccttaggaagctaaccaatgtgattctggagggagcacctgtgcctgatctcttcttgattgctgtcgttttacacagctttccatctcttacggtagtcgtggttgtagatgatacattatagaactgcatacatacaagttgtgttcaagttctaaaaacgtctggatgaagatttcacttcttctcaagaactgctggagagcaattacctcgcatacaccgtgcaaaagcaatctctgaaatgggtcctggacattcagtacaagcatatctttaccactagtgtcttcgatgaaggtcctaactcgttcctgcaaatgtgaaaaacagataaaccaatataaaacagctactgaatgaccagcaagtgcagcacattatgcttctcaagtacttatgcaatacaacccaaatgcaaaatcatattgtaattattaatttccacttgcattcacatagcatgtgagtgcatacatcaaaagtttcacagaaatgccaaatgccgacaaattagaactcaaccacctcatttctgactgataacatgtcgtaacacaaaatcaggtcacccttgtttatggctgaagcctgagcagtagaagagtagaactgcttccttttcattaagaagataactgtactaaaaattgtagagacagagatgcaagagcaaacaggatgtcgtttaaaaagcttaggtaccccaatggtttatactttgtaatagaaagccaagagacagatgcatgtttatatggttgcgaaggaatattctagatcttagatgtatgtaaagaaatctgagaccctcaaaagtggcaatcattttagatctagatgttctttagatggtccaaactggtgtaacaagatagatattctaatgcaattgaacactagaaacaaaaactccaaggaccctaatttgcaccagattgtttgttaaaagacatctcatttgttcctggagaatagtgcttaaacttttatagttgtaatcattgatcacaataaaaatccatcaacactactagaagtagataacacaggaggatatactgtcagtttttataacataaatatcatttgatcctttaaaactacaaaaccagaaagatgcaatctgatgcagcaaaccaaaaactctcaaaagcaaacaaatgttagcaactgttgtgacaaacagaaacacaaaaaggttaattcaatgagatagaaagccatacttcgtatatttcaagaagatctgggaggaaatttctctttatggcttctcttgtttgacgatctatatgatgccaagaattgagagcaaccaattcatctctgtccaaatggttcttctgttttgtagaagactgtttcatctgttgcaccaatcgtgcctacagatgaaaagcacagtaagtaaaatggatccataaaaaagtgcacatgatacctaatgctatgcagctcttatttctcattgcacagagtagcaacacactagtatacctcaacatccatgtcaatactcctgaaggcatcccattcaccgacacttgtcctgcagaatgcagaaacgggcagttcctcacctacatgcagaacatagatcggtgtaatatagaaatgaaatgttccctatctctataatagtacatgaaaaatgtaacctgactataatgcctgcattaaatgtcaatgcaattaaagtgcacaactgatcataagtgtttaaggaaaaaagtgacaaacagggaaactggatagcatacagcattctcacgaatccgtacatttttagttaatgacataattcttgttaaagttaacgtgtgcatgctgtaaggaaaaaaaattgtttctcattctaatgtcaacacatagtaaagagtatgcataacatggattttatcttcttcataacttattactactctctaaacagaatgaaacattcaatgacttagtaccccctaaacagaatgaaacattcgatggccaggctgtaagacatgcaatatggtgttaaaaaatgtgagcagcactggatcttaccccatggtggaggagcaaaaaggcctttgatttcttccacatgaagacgggggacaagttcaatgagcaaccggtcattcaaccacctacgagatctccgattactaacctgtgcaacattgcaatctataaaccatcaacccgcatattcttaatgtcaaagataacaacatactgtatcaaatataacagggtttttttttctgagctgctattccatagatcatcatccatttctcataacagggatcaaaccataatttcattcaatcataaaactagcagcaaaggaacaaaatcacttttttattttccctaataggatgagccgcctcaccttggcggccatgtcctcaagaacttcaatcttcctctcaatcatctgcccacgcgacttgacggcatctccacctaagttcacaaaatcgaacaagggttaaaaatcgcttgcgtcaggacgcattggggggcaattcggagatacaaaaaaggaatctacctttggcggagtcgaacaaggaggcgtagaactcctcctccctccgcagcagatccgcgctcgccatgctcgacttccccgtgcttctcgcgatcaattcctctcctccgccggcaaggcaggcctcttgctccgattccgggatgtgcgtgttctagggctaaaattggggaatcgcaaacggtgtcggtgtctcggtgatcgctaggggagggggaatatgcggcggaatcgcggatgcgactgtgcgacctagcagatcgcagtgggccgagaagcccacagttgtggagagcaactagtttgggcctaatgtgatgggcctcccaagcaaatgaaactgaaaaaagtgcaccgaaggtccctcaacttgtcagcgagataaaaaacgtcctccaaccgcaaaaccaccttaactatacaaaaccggtcacccgaggtccttcagcagttttgatcctggttttagtctacgtggcagctgagttagcgtggaccccacgtgggccccacgtgtcagccaaccactctctctctcccctcttctctcacttatctcctctcgggtaagccggggcgggtggggaggaggtcgccggggcggccggcgacgcggcagcggcagcacgaggcgatgcggccggcaacaaggtggcgggagccggggcagcgccgcatccacgatcgcctgccgctgttctcctgccgtcacccggaactccgacgtcggcaaattctaacgacgcccactagctagtctgaccaccatgagcagactccctcaggattccacgaggtagcgagcaaggacctgctcctcctcctcgtcacggcgccggcgccgacggcgcgtgcatcacgctctagtacgtctccaacgtcatcatccacaacatccatgtccacgactgcgtccccgccggcaacgcgaacgtgcgcgcatcgccgacgcactatgggtggcgcacccgctccgatggcgacggcatctcgctctactcggcgcgcgacgtgtgggtggaccactgcgcgctgtcgcggtgcgccgacgggctcatcgacgccatcatggggtcgacggcgatcaccgtgtcgaacagctacttctcgcaccacaacgaggtgatgctgctggggcacagcgacgagtacctgctggactcggcgatgcaggtgaccatcgcgttcaaccacttcgggatccagctcgtgcagcggatgccattgtttgccgtgttcttggcttgttttgcttgtgagttgtgatagcagaagaggggaaaaatgttttttttgtgtgtgtgtgtgttggattggatttcgtctgtttgtttctcattttgtttcccgccgtcgcgtcgccggccacgtcgcctcgtgctccagccgccgcggcgtcgccggccgtcccggcgacctcctccccatccgccctggcttgcccgagaggagagaagggagagagatgggagagaagaggggagagagagtggttggctgacacgtggggcccacatgggtcccacgctgactcagctgccacgtagatcaaaaccgggatcaaaacagccgaaggatctcgggtgatcggttttgtatagtcaagggacctcgcatatctggttttgcggttcaaggacgtttttttatctcgctgataagttgagggacctttggtgcactttttccaatgaaacttgtgacgcctaggcccaaggggataagcatgggtgccccaggactaatggttctttttttggtattctcattcgagatattcttaatttgtttccatccaacaaaaagtatctcaagataccattatctcatggtatcaaatcgtttccgatcgtcggataaaacaatgcacatcctgcccagttagatctaacgattaaaaacgatttgatatcggtaccttacgttattttttattggattgaagcaaatatcttcttacaaagaacactgttctatctatccctataactcatttacctatttgtaatcactttttaatttaatatttaactatttgtcatccatatatcaataacatgtggatcctcatatttatgatatgtatgtccagtgataaatagttaattgccacctataaaattgacaaatataagggctcatatgttgttgatatatgggtgacaaataatttaatatcaaatttacaaatggcaaatagttaaatgtacattaatcacgtccctgcctgatctcttaaaccacctctctttaaatcctgctgattgctggtctcatggatcatcttctctagtgagacaccgattctttgggtctcacgagtcacgtgcgtgggtgtttcttggtgtcaaactcgacctgtgtttgattgctcgaatgtacttagcctggctcgtatgtcttatccaggttgagtttggccttggttggtaaaatgcaataaaatgcaatagagggtgtttggttgtatgcattagatgagcctggtttatctgagatgttgtttagttggttggataagaaaatttatacgcaagagattgtgtttggttgctcgtatgtaccttgaatccaattatgttttttctattgtaagagtataatcctaccaagtatatagaaataataatgtcttaagttcataacacttggggtgagttcttatgaacaatttacaactacagctttctcattctctataaacacgcgctttaaaaccgttaaacatcagcgatacgttttatgtaaaaaccttatatataaaagattcctttagaaaaattcaaataaacctattatgtcttagtttcagttcccaacaaacatacaagctgaactgctcggtcgaactcgaacccagcctatacgactgtcatttctgaagccaagcaatacgaagctttgtttgaggctttgagctgctacatgaatggatccccaacgatagcgcataacaaaagatctactagtatcagtcacacgataatagcattctgaagctgtcgctattaaaagtcgttgttgccactcgaatggaaccatattctatgaacgtttcctcctcaattatccgcaaaacagaaatcacgtgtgtttgtctcagttcgtcctctcctctcctatttttctgttctacaagccctgtgctggcgcgtcaaaatatccttgcagtcttaggctaaatttagttctaaactttttctttaaacttccaactttttcattacatttacacaaataaactttcaacttttccgtcaatcgttccaattttaatcaaacttccaattttgacatgaactaaacacatccttacacgaagtaccactgttttactttgttttggatgactagatgatttgtgatgattatctaatggtaggaacgaattggttaactattatacttttttaaaaaataatgtattgaaagtttttgaaagcttagcaagcttttcatgagaatagaacagcaggctggctgacccgttcgcggaagatggaagacgacgttgccgtccatcccaacacgcaacgccgccggccgcaacgcgccggtttccggtccgatccgcttcacacccaccacgtctgcaggccagccgcacgacgcaagcaaaagaaaaaaaaaacaaacagaccggataagattacctactactctcttagaaatacgaatctaaactataaaccttatttttttcttataaaaatataatattttacattaatttccgttagcacgttttcaaactatataagttttgtgtgaaaaatttctatataagctttaaaatacatccattcgtcaagtttgtcataattaaaatttaattaattatactacatgtcaatagttttttcgttttacgtgcactaacttaatctgcgtctttactagttttaaacatcatttatttgttccactaatatcgtttagatttataattttaagaatgcaaactagttataagtaagacgaagggagtaagagttatatgtctttcccaaacagctaaaaaaaggccgaaaaacagcggagatttctatggaattcgtctagaaagctgcgaatcttcccttaggattcgcttatccttgccaaatcctctccaaattcaaagcatcacttatttttttttttaaaaaaaacggcaaacacgagtccatgagaccacgagtgacgacgagtagtcctccacccctacgcctcgccttctcctctcttcttttcccacgcaaacgccggagacagaggaggagacaagagtccaagaccaatgcgaggcaacggcagggggcgggaggaggaggggaactccccaatgggccgccggttgcgggccgtctcggcccacctcctgccgccggcgtccaccaccaccaccaccggcggcgttgacctcgccgccaaccccaccgccggcgagtacgcgcacggtatgtcgtatcttcagtcccgtgtggtgatgcccgcgattcggatctctttggggttggattcccagctggtcgagcagactagcacttttgcttttagataataatctaaaattgtttctgattcccaaacggtggtggtaatacgcgtcgcaacactgtgttcatcggatttagttatggtcgtgtggagaggtttcgcttttctgaatttgtgctgccgagtccgcgcatcagttccatacttccgttgcttagctcggtagtatccttctcgctattggattagagtaatcgcttctaaagctccctttatatatctaaaaaattaaaaatatttagagtattcgcttgtgtgctgaataaaggtaaaagggatgaggccttttcttcctttttttagtatgccggcacacgaaagttgtggacttgtggattccccaactactgcatgtttgatttatctttcttgacaaaacagcctttttttagtttgtaactcaatgtcatagcttctccagtgcagggctacagtgctgtgctccctgagaagttgcagaccgggaagtggaatgtataccggtaggttatttatatttttggctgcatttgcttatgttgcagctcacaattgctgtttccaatcttgcaggaatgcgaagacacctcttaggttaatagatagattccctgatacccctgatattgcaacgcttcatgataatttcgtgtaagaatcctcgaaatctcatttgagcatccggcttttatttcttaatattattctcaacttggcgaagtctcagttatttacaaaatgttatgctatgatttatcaaattcttgttttgaattgtcagcaaacatgtgagtgcacaaacatagagttaagcaaaatgaacgctagttctgttttccctaggatgaattgtatcaggaggattcttaggaaaatctgattacataaaaagaattattggcaagggaagctgttctttaagctattttattgaaaccttggagccggaaaatgtttgtatctataagggaaaagtgagttaacctttatctattgttagatccacagcctgaatgcagatggtttttatctgatggttttatgaaagctgataaatttagatctgttgcaggctacatgctttacaagaaaattattattcttcaaatttaagttctgtgctaagttctgaggcaatataccccaaattgcgcaggtatgcagttgagacctttagggactgtagatacctgggcacaagaatctgcgctgatggaacagttggggagtaaggattagttcctggatatatgtgttattattggcttttgtagctttgttcaaatcttttaaatgatatatgtatggaactttgcagctacaaatggatgacatatggagaagctagtacaaacaggactgcaataggttctggtcttatttatcatggaatacctgaagtgagtcataatggtcgcaacaagtaccgtccttctttttttaactagtagcaggcagatcttgtcacacatggacaatgatataacatttgtatttacacttagagagtcccttttttttttaacttgctttattttttttaactctgaaccagggtgcatgcattggtttgtattttataaacagacctgagtggatcatagttgatcatgcctgtgcagcatattcattcgtgtctgtgccactttatgacactcttggtatgcactattcaccaaatgatcatctatatccttatcattcatctagcaacaatatttatgtaatctgcaggtccagatgcagttcagttcattgtcaaccatgcgacagtagaagctattttctgtgtgcctcaaacactaagcactgtgagctttaaccccttatctcagccttgtatagttattagtttatacaatcattaaaatttgcacttttcatgtcactggtaccagccattaactactgaaggtggcaagtagctagttatttccaggaaatagatctgtgctttcaggtgctgatctcatcctgctatgaacacacaatgtcaaaagactgcacactgcataaactgcatgctcatcatactgtttgttcttaaccatatccacatacgcacatgatcaatgggctgagcgctgggccctgaccatgaaatatgtttatgtggattctgatccttgtttcaaacactacatcagtttgtacctttaatttaatcatgatatattctttggaatgaagtatttttatgtttgcttatgtatatgtctctatttattgcagctgttaagctttataactcaaatgccatgtgttcgccttatagtggtaagttcgaaccatttataattagtatgttcaatcgagcagtcatgattttttaagaatctttgttctgttttttttttcttaacttgttttgtataggtaattggtggagacaatgcaaatatgccatctaccccaacatctactggagtggaaattataatttactccagactactcaaccaggtgaatttgctacatgatccttcagtttttgaaaactatattgtactaccttcatctcaaaatataagaacttttggggttgaacaagggtattaaggaagtatgtggagttaaatggcagaaggttttgattgatcgaaaagaggaagtagatggataaattaaatgagggaagattgcgattggttgaaaaaagaacgtaggtggagaagttgctatattttgggacaaacttagaatgctaaaagttgctatatttttggatagagggagtatatgggatactagtcttaacacctcatatagttttagagatgtctgcaccagatgagtttactaacactatatattgttcattgtatttgttctattccacgcaaaaaatgtatttgttctccaatttcagtcaaccgaatcaaactgcataccagttgactgcactccgtcatgtatgttgctctgattaaatttagacttgttccaaatgatttatccatatcagacaaagttgatgtggcatctagtttccacttatatttgtgtgagcagtgtgcctacgttttcatttttctttcttatggacacacatagtatgtgcattctgtacatattgtctttttaagttttgcgtcaaatgcctgcatatctgtatccagtcatatacataatctttggtgttagattgaaggttgctagcacttttgctcactatttttccatcgcttttgaatcttcaactcagggaaagatgagttctagaccttttcgtcctccaaaacctgaagatgttgccactatttgttacactagtggcacaaccggcacaccaaaggtaaataacccatgtttctgattattctttgctccattcaaagggcctttctaattcgacctttcaatcttgtggcacttgatgtcatatttccagggagttgttctttctcataggaacttaatcgcaaatgtagcaggatcaagtgtggtcattaagttttacccatctgatgtgtgaggagtttacattaaatctagattcatatctttctgctataacttaataaatttatatcatctctaaatgtttttgatagtagtcatgttgatatctctccacaggtacatctcatatctacctttagctcacatctatgagagagttaaccagattgcactgcttcactatggagttgccattggattctaccaaggggtatgcagatccaaaaccattcaggatgttaatttggtagttctttgcatttgctgtttgtgtaaataatagaacatgtagaacaatggagtttctgacttagaaaaggtatatatcaataaccggggccaggtgcacatgaaataaaccacttggaaaagcaattggtaatgctagttctcctgtaactgtaagttacccctagacataggagcagaattggatcaggtagtgcaatatttctaactgttagataagaatcatccagagatcaattgaacacagcagatttcgacagtctaatgtcgtttatataacagttctgaagtctgaactttctactcttcttaatacaatttcggttggttgagtttcggccgacccggctaaaaaattgaacacaatagatgcattttatgctggacctttcacctacaagatatcatcccattatagtagttgttatggcatccttgtcttaaatggatccattttgttatctcatgttagtttactgcacctctatgttgctcaccataatccttt

SEQ ID NO: 9405 - DNA, 9055 bp, Oryza sativa
gcgcaaggacaagggagagccgagaggaagaagaggaagagccaagagtagagagggagaggggaggggagccggcgttgtcagcgtcgttccgcccaccgccgcccacccctccgcccacagccgctcccgccgcccaccgccggccgccgctcccaccgcccaccacccgccacccgccatcgctccacccaccgcccgcaatcgctccgtccaccgcccgccgccgctgcgcccttgtcgctccgcccaccacccgctgccgcttcatttcacgctgctgctgctccgcttcctcccgccgcccgccgtcgctccgtccaccgcccactgccgcgccgcttcgctccgtcgccgctcgcccttctctcctggcaatgtatgggatagagagaagagggaggctgacatgtgggaccacacgggccacaccttttttattaattttttgtgtagctgacatatgggtcccattatttttattattttttcgagataaaattgccacgtaatcgctacgtcaatgccacgtgggacggagacctagtcaaaggctccacgtagacgccatgtcaaccaaaactgccctccatactgccgagggatcttgtttgcccaattttcgtaagttgggggatgggtcgtacccggttttgcggttaagggacgaaaatcagactgaccgacaaatagagggatctaaagtgaacttattccagacgcaaaattgtcggtgctggcccatggaactaaaaccagctcttgggccaaaccaggccaggccgattgtccctcacgccaaaccatcacgtgtgcgcttcgaccttcctccctcgcgatgggacccaccaagttcggcaccgccccattccctctccgcgtcggcgtcccgtctgttcgctacgcacgcactcactcactccccaaattccccaccacattcccccgcgattccctccactccccactcggcagctcgccattccaccaccaccgcgccgccgcggcgcatcgggccatggcgcccgccgccgccgccgcgtgcgccgcctccgtccgcgccgacccgccgggcatcctcgactacggcgccatccacgcctgcctcctgggcggggaccgccgcgcctccctcccggcgctcgcgctcctcctcctcctccacttccgcgtcctcgccgccgccgcggggacccacttctcccccgcggtctcccgcctcgcggcccgcctccgcctctccccgtccatggccgccgtcacgctcctcgcgctcggcaacggcgcccccgatgcgttcgcctccgccgccgcgctcggcggggccggcgggatgcggcgtgcggggctcgccgcgatcctctccgccggagccttcgtctccgcgttcgtcgtcggggccgtcgcgctcatcgccgcgccgttcgctgtcccgcccgcgtcgttcgcccgcgacgtcttcttctacctcctcgccgcctccggcctcttctacatctaccttagcgccgagatatacctctggcaggccatcgggctcgtgctcttctacgtcttcttcgtgggcttagtggtatacatggatttggatgctgaggggaaggcggtgagcaccaccgagctggaggtggtgaatggcattggtcgcgtggtgatggacttgccggtaacagtggaggatcgcaagcaacaacaccctactttgtgcacgatgttcagtaaggtaatgctccaatgagtggctcccgttagtttgttttgtctccactgtggttaatatagtattgagtagtcagggacaagtattctaatataaatagtttctttggtattcatttgaagatggtcgtaaaccgtcaatttgtttatgtgcaactgacaactgtgcaagattgttgacttacccttctagtttgaactcactgactgtattgtactcatttagggtaagctttagtttaatggtccaacttgtttgttatgcttttctatggttcaatttgtacaaacgattctagtatagatagttactttcgaagtgcacttgacttgaaaatacagtactaatgtgaacagtgctataagctgctgattggtttatgttcaagagtgttaacttcaccctggtagtttgcaattactggctgcaatcaacagcgagaaacagattactttatggctagtagaaactttagtagtgagccaatgttcccctgaaaaaatagttgttttatacaatacccatacaattgtagatattaagtagaaacaaacattaaatactttgataactcagtagtacactttgacagaaaggtaactggtaacaatgctgcaattcatggtgtgtttgtgtactttgataattttaagtagattttttcatgatgcaacctattctgatttactatatgcacaggataatgtacttttaacatagatacaattactcagcacactgagtgctaatgtacatttgatataaataggattactcagtgtactgaataatgtatcatgctaaacaagctaagtccttttagctgcaccaacatcatgccttgctgggatcaattcgctatgagtttatttatctgtatgtgattaggcagcttatgataaatattcccatttatagtaatggttgaagttagtaatgtcagctttgctactatgacaagaatgcatcgactactgtattgaatatatacaattgcttaatgatcaaaagatttttaaacttaacagacttgctgattgtttaactttgtttttatgaggaaatcgatggcatgttctggcaaatcctaagttctcatttccaattttttgtgacatttagctccttgtttcttattagactttgctaaaacatgaatattttcctctcggcatctgcattttcatgacactgattgtcatctacccctggcaggtgacaaaagtttgggagtggcctgtagcatttcttcttaagctcacaataccatcaacgcttcctactgaatggaacaaattttatgtttgtgcaaacatctgtctatgtcctctcctactcctgtattctttcagttcattcattccatttgatagccgaatagtatttcttctccctcaaagtcgtttccccatctggtccgtggtgcttttcgtgagcatttctttagccctgtcccacttcatttttgagaaagaagccccaataactgaaaacattgcaagcaccacaatttcctttgtaatgagtgtcttctggatctcaaccatggctggagagctcctgaactgccttgcagcaatcggagtcattatggatttccctccagctatacttggcatgacggtcttggcttgggggaattcggtgggtgacctcgttgctgatgtagctttggcaaagtctggccagccgacaatagccattgctggctgctttgctggtccaatgttcaatatgctggttggactgggaactgcacttgtaatacaaacagccagggtgtaccccaaagcttatgtactcgaattccatgttggaattgttgttgcatttgtatttcttcttttgagcctgatgggcaccctgttgatggtcacctggactaggtttcgggttcccaggttttggggttactgccttatggggctttacatcttgtttacagtagtgagtatagctatagcgagctcttctggatgatacatatttttatacataaatagcagctagtcgtttgcagtatatataagtgtttgcaatttttccagttgctgcagagcaatggttcatttcgatggggatggttcacgaggtgcaagatgcctccaggctgcaatacaacttcttatcttggcagctgatgcatacagcccttcacactgaattggcttgtactggtctggcatgttcctgtggattcttctgtaccttcattttacgagttcatgagttcaggccagaggggagatcttgctggcgatgtgcatcagtgcatgcactgtctactcggttcttttggttgaatcactgcatgtgcggatgtgccgcagcgtacacaagatatcactggatctctttcctgtggccatgttttatttttctcgaaccggtagcctgccgtcgacgttttatataaagaaaaagaaaaaggacctcatttttaaaaggaaaatgggattatggcagagaagtaactcaaagaagaggaccctgcaacccccgaaggagacctccagcgatagagtcgtagaggcatatgcattcgctccgctctcttgcacgcgtcacttctcttctccatatctatccatcgaccatcgcaggctacttcccggtacagttcccctctcctgatctcctctagctcatgccatagtcgccactcgccactgctgcaatggctactgaaaaactaccaatgccacaggccaaaaaccaaaaagtatagcacaggtacactcgaaggatcgacgcgaggtgaggaagttaccgatgcaacggaccaaaagccaaaatctaaccccgctcgcaccagctatgcacccttcgtttctatacgctcgacggactcgacgcccgggacccggccgagaacgggcgaacaacgatcggattcaggatgtctcggggggtcggagagaattagtgctggtttggtttgtggcctaaattagtcttaccaatttttgtcaatgtcaaattttgataacttttggcatagctaattttggcaaaggtaaaattgtgtttggattaaagccaaaatagtctaaattaaccgttgaaatggcctattttcttagtcatgccaaaatttggctccaaaccaaatagacaataaataatattgaaattgccaaatattggtaaggccaatataggcctcaaaccaaaccaacccttaaactccgcctctccatctgacccacataagggcaggcctactttacgtggagcaacctgcatacgcgtgggccggccttactagttactagtctaaggcttaattcggagagcgctacgtgtcggacgtatggcgcgagacgaaaaatcggacgtctcgcgcgaccgtccgatcgatgcacaagtgtgctagccatccatcatgcatgtatcaagccatccatcatgcatgtatcaaacgaattttatactattttttctcttaaaatatttatccaaatcataatccaattgcaccattaaatccgttgcaattaaatctttaaaacaagacaacacatgaatataatccgatgaaaataattagcttattattgaattatttttaaatgttgcacgctgttgcgctgagtatattgtaattgtttcactaagtagatcgaaaatgttttatcgaacgttgttttaccttatataaaaataatgtttcagcgaatagcgaaaggatgtttcaattcactacaacatttgatctatacgtagtgaaacatcatgagtacattaggtgaaacatttttaaattaaaaaaaaatcggacggtcaaatgttgcagttgaccaacaagtgaaacattatattatatatatggtgaaaaaaaaattagcaactggaacatttaaatattttatgaaacatgatgaaaatgcacgttgaaacatgtcgctgtcacacatgaaacaacaagtattaacggattgaaacacatgtttttcttttatcaaaatataatcaagcgatatcttattataaaaatttaattacaacgaatacaatggtgtgatcggatcatagattgaataggtaatttaagagaaaaatcattttgaagcttgctaaaatacatgcatgtatgcatgcatgaggtggagagagagtagtagtagatagtttcaggaattttgtgaaacacacttaagacacatattgaaacatatcactattacgtatgaaacattttgttttaacggtttgaaacgtatgtttttgttttgacataatataatcatgtgatatcttgttgtaaagatttaattgcaacgaatacaacagtgtgatcagttcgtaaattggataagtaatttaggagaaaaaatatttgaagagaggaggaaagaatgaaaagaaacaactaggtatgtgcatgtctgttacattacgacaagggttcgtctaatccaacagggtgctgatttgcagcatttttctgacgtcaacagagagaaaggagatattaacgagtaaggattgagctggccgtagacgtccgacgtttttcatctgatcggacgttcgaagagaagcattttcggcttaattcacgatggttcatgggggttcggagaattaaactccgaccccgctgcagcctgcagaaaacgtcccaaaagcctctcactgaagaggcaaaagcatccatggtacacttccattgccactaccagactatatctcaccttttttttataaaaggattttcattaaaacccagcctatacatcacattagatgtacacaaccaaaattcagaacaaagcattgaggctcactcccattacatgagaccaaacacacacgtactaaaacagcttagagagtcaataaacccctgatacaagagctaagctccccaacacatacaatcattactcaaaagaggagtctaatcacaacaccactaggcttcgatcctcattctgtagttccatccatacatggagaagaactcaaggactgttagtcccaacctcttgcaatattcgtttaccatgttgctatcatcttccttaagaagcacaaatcaaagccttgcccaatatgagcatctgaaaatcacctctcagcctcacgccgccgcaaagacgtatgcatctaccgtctactttctctatcttagaaaaaaaaatcaacttctaaatacgttggatacgatcggacgttgttgattttttttatgttaccaatgcattctagtaaaaaaaaaatggaatggccaaaaccaacatctacccaccagcgatgcagccatcgatctctggctgccatcgaggagtatactgtatactcgatactcgagagactctgccagctgccatgatgtgcgtgtgctgtgcccggacgtggctgcacataaacagcttccagtccagatcgtcctgggaggtcggagaattgaactccgaacccccgctcggcccatccatgggccttcctaacataatacgcctgggcctacaagccaaaggcacaactcgcatcccacgcccccatggcccacaaaccaccacaaagaaaagatcggccgcatcgggccatcgccgcatcgatcgccttccgcgccgccacgccgcagcggcggactgacgacgccgtccgccgcgctccggcgtcccgctcgccgccggccttctaccatgacgatccgcaggtacacggcgcccgctgaccctagcccgcactagcagccacaagcggagacagctctgccgcactcacacggtcctgaaatcctgatgagaccttgtatgatgaacttttttttttagccctagatatgcagcgtgcctggaggtgtagatcacacgcaacgcaagtcccaacggctaggctcgatgatgagatgcttctgtttctttcccgattcacaggttaaactctcttcattcctcttattgtttttttttaaaaaaattaattcaaatcatcagggcaccctgtaactacgcgttgatcaaacattgatttgactccagccatgaagatgaaatcccccttcatcagattcagaatctatcaactttacctcgcgattagccgattactactgcaatcctggtacgtggagtttcacctttatgcctactttaattgttcaatcaagcaggatagttgaggtagacacactcacactgacatcatcctgcacctgcatgcatgggttcctgatatttctgcctagaattctagcagcataactttctctactcccagttgaagctggtcttgtcccaccatatgtgtgtgtgcgtttctgcgaagcaaaaacgaatctaaacaactggtttggtatggtggtatccaattagaaatgctctgaagaaatgaaccagctgaaaccttgtctggtttgggagactttggtttcgaaactgtgggcacaaaccattcctgaactgttccttcgagatgcttccaattcgtattaagaacgaaaccaaagattcacattaacatgaattggtataattatatgcccaaagcaatactgcaacttggattatttgatgaattgacacgctgaaaagtgtactagattcattggcaccgtgtgggttggcaaattacaaagccaagattctttgcttgcttgcttgcttttctagtagtaattctttgtgcttcccctgatccaggcaatcgctttcgaggcgatggccattgaaataatgtagtgcagtaactttaggtatgcctcttgccaacttgcagctgctatgtttgcataattttagcttagataaactgatgttgtattaattagttgtaggataatttcagtggctgtcattctcatgaaagggaaagggtgaaaacaataatgtttgattccttttcacaaattactactagtagtactagcataacatatttagaagaaaaaatatacagaaaaggatgtgataaacacaaggtctgataaaaaatatcctagaggagaagaacagcagacttgtgctgaccatgttggagatgcaaaggccagccacttttaatcagaattttaactaaagttgacaagtccccatttgatccctttacaatgtatccataccacaaattaaactcttggaacacaatttggaagaactaaagaagaatcccattagcactgaatcacatggctagattctctctgcagtccacaggtcgtgcagaaaaatcagcaaatccgtgggtcttaagtcttatctaatcctgtgggcgcccattggttttgcaacaattaaacaaggatattttggtcagtacttcactactcggaacggattcaactaagccacacacaactatatataaaaaaaagatcaaaacaaa

SEQ ID NO: 9406 - DNA, 7544 bp, Oryza sativa
aagcagattattgaattgaactatgggcatctacgtacgtagcaggggctggaccagttgctgtgttgatctggatcaaaccaggccggcttggtcgccatgtttgggccacatacagtacggtacagctctgaactgatgtatgagcgtctgtatagtcttgtcgtcgtcatgggcctccgggaccacgcgtaggtacggggttgtttggttggtatactcatatcaccaaaacttaccacacttcatttagctaatatgcctaacatgtggctaacaaaattgaagccacacttcagccatagaagagcaaacttgccacacttttatgtgccaatgacatgtgggatccacatcatggtgaaggaatcttgccataagtgtggcacgaaccaaacagatgcctaacttagtcaaacctagctaacttgagttgtggcacagtgaggcaaattgtagtagtgaaccaaacagcccctacgtacgtataacagcccctacgtacgtatacatatacgtacgcggctcatctgatcaaactttcttttcgagtgtgttgaaacgcgtgggcctcataggtatcatgtatagtatgcaaacctggatggattgcaataggatccacatgtcagtgagcaatatgtatatagtactgtgaagaatctgaattggtattttatactctctccggtttcataattcttgacgttttagataaggttgaagtttaacttttgtaacaataacttcaaaatatctagtttaaagaaattagaacaacatatatagatgtcttttaaagtactataaaaaaagtaaacatgtatctatttatttatttattgtatatattttaatagaaaaataaagttaaaaatatattttggagaatggagagcgtgttattgttagaattatggaaccggatggagtactaaccaacaaccaattgatgcagtgatgatgatgacaatcatgttatcacacaccgtatggaactaactgataagtggcttgtaatggatggtaggtacaatacacagatgcaaatttggatggagtgccatcagaagctagaacagcaaacaacaaattaatagtgcacttgcttgattggaagctaaaactggaagaataatcatcatcagttcatcaccaaatcctgtacgtaaatgtgtgcttacgagtgaaattgatacccaagaatattatgtggggtgtggtttcaataggttttcagtgagagaaaatgatgttcagttattaagaaagtaccttgaggtatttaaatttcacactaaaaatactcgatccgtcctaaaatataaaaatctaggactgaacagtctgtccagatttcctagtactagcaaatgtcacatccaattttagtttcttatattttagaatggagagagtacctaatacttaaaagtatcaaattttgaattagaaaatatgatactagtagaagacaataagggttgttttggtttgaagccctaccaaaattttagtaatgccaaaacttggcacagcaccaacaaaattttggtagggttgtgttttttctaactctattgaattggtaagatttggcctcaatccaaatagctaatatgtactattcaaaactaccaaataattggtagggtaagaattggcctcaatccaaacatgccctaaaattttattcactggtctttgtagacatgtgagtatgatgtacggcttccgtgcaacttgtaaaatgattaaaaaaaagagcatatgcacatgacgataacgtccaaattaatcatccagagcacgagctgagatgtctggagtctggacagaactagccctagtgatagtgctaccactgctgtacatgaagtgtactacatcagtagtagtacgtactgaaggcgaagggcgcggtgtacgtaccatggtgcagtgagagcggatcgatgatcgatcgatcaacctggtgagagtggccgatcagcgtagatgtccccatgactccatgcatgcagcgcgaatgcgatggattcatcgatgtgtagtgcacggctgcttccaggcttgacagcaacagatcgctcgcgacgcggccaccgcgggatgctgccggcgcgccgcaaaatgctcctcgatcggggccggaaatccacgcgatcctggcgtatgtgaaactagctggcttggatagaagaacgccctcaacacccaagtacacggctagcccgatctcgatctgcccttctgagggacttctgatgtgaagttagaggatcgtggtggctgatatgtaggtcccactactcatggatccacctattagtgatcacgtcatgaggcaattcacgtcagaagaaccgattcccttctcagttgagtcttgtgaatcatgatgaccgatctagagtactcacattcacaaaagcctgtgggtgtacagtaggaacagtactgtgagatcacgcacgctggccggccgttgttggagctgtcagtcaaattggagtgacacgcaccgtacatttgggcatttggcgtcgtggaactgcggcaagaacaagatcccgtgacgcgataaccgatctaactactactagtactgtgactgcaactggcgccgtttgccgcagccaccacgcacacactacacgtaccttacgaaaatccgtagtgcgaggctccaccggcttcgtcgtaccaaattcctgccatctttcgctgcctactccattccatatgggagtatcgtcctgtacagctacgctttattctcttcccttccgatcccgttgcagggaggcagggaccaatggacctgtcattcatggtccggcagcctatacagcccagcaatcagcagaccacgcttgctattacaagcaaatactcctaaaaacaaatacgtaccagtactaaggctatgtttagttaacatcaaaattaaaagtttaattaaaattgaaacgatgtaacggaaaagttgaaagtttgtgtgtacaaaagttttgatgtgatgaaaaagttgaaagtttgaagaaaaagttgggaactaaaccaggcctaaattttcttttacaaaactcttacaaataatggtctcacccatttaacgagagtcatagaaaatttagatatgtaacacatgatattatattagtaaaatttagtacgtgtaaacttttccgataataaccacgtacatgctcactactccctctgttttataatgtaatactttctagcattgctcatattcatatagatgttaatgaatctacacacacacacacatgtacgtggtgtgtgtacaaaatatatatgaatatgaataaatgctagaaagacttacaatgaaacggaggaagtatctcataattctcatcttacttggtcccttatccaagtaatgacttagtctctttgtctcaaaaatataaacttttggtatgcaatcctcgggatgtggattttcatctctcaaggggatatcctcttgtttgcatgtcatctaaatagttataaaaaataaaaaaaaatgacaacatagattaatacgaaatatatcactccacaaacatgcaaaactaaattcaacttctataagttgcaacaaaaataacaaattaaactgaaaatagttaccgcacattcgcaacgaagttgaatttaaacttacatgcttgtggagtgatatatttcatattaatttatattactattttttcatattttttatgactatttaggtgatatgcacgaaacgagggatatctctagagggatgattttactttccccaatcctccgccctgattgctgaaagctgagtcctcgagatcacgggccgatttgtttggagcagtatgggccgtgcgcctcgggcagtgctactcgcgaaagcccaaccctcgcagccggcccatcacagactatggattccatcacctatcacctcttcagtcttcacccacgtccctcgacaccccgtccattctccttcgcgcgccgcccgcgccgtcgcccatcgcggcggcgatctccaccaccgggagcagctggcggtgccgacggcccgcgtcctctgctcttcttccgccgcaaaatcctcccctccatcgactcctcgcgacttcgtccgctgatctccatccatccatccaccgtgtactacccgtcgtcctgctgctttccgtccgcctccggtgagcacccgtgccaacgcgacgcacgtcctctttctttctcatccctctcgttctatgccccgatagatccaccccttgtgaattggagatctgaaaaagattttgtaagaaaacaattgtgcttagttctagaatgacattgtggatttttatatttgtgtatatatattttttggtaataactgttttgagtcctgtccaacaaactcattgagtgaagagtatttactcttttacttctgtataaagttgattttggagcttacaggaaagcttataaggtcatgggtcatcatcgtggacataaaacctgtatttgtgaccttttaattattactagtatatctgtgttagttttatggtgctgctttgctgttctgatccacattttgcgccttttcttgacaaaaaattatgcttcagtgctgggaagatgtggatgggtggttatgatctcagaagaaacttgaagagggatgaaaaaactgattttgtcggaatggattcaaagaagcaaagaaatgcttctcttgcaagaaaaaaggaggaagagtttgcaatgaaggagagacatctgagtccttgatttcaggtttgccggtgcttcctttttctgcatgtatcttatagctctcgccgagcattcacagttgtgttgtatcatgtttgtttaactaggtaacttgcacttcaagtctaatgaaggtgtcttcaggagtgagttcagtggagaagtcgcatctaatatgtctaaaagtgttgtttcacttgctctgcttgatggtgattatatgtgctgttatacccttcttacttttccaggcatatatatataaacaccgctatttgttaatgattaacaattacagtcctgtgtaggggacacagtgttatttgtatgctcaggcatggttgtacaacgtgatggacatgttataaagttgctgacctcagcaagcttgcttaaagcttttaatgatgaaagtcaagaccatgataacttgaaggttggtgctggtaatcattcagttgactagttgtgttcattgcttactcttcacctgattcttcattgtaggtcgaagtgcaccataaagacgctgttgtcatagggtctttgagagaatatcatttagatcataacatggctgctgtcgtcgtcgagaacttacctgatcttcgccctgtgcctttcaacaatgttcagaaatttgtaccacatagcatggtagtagctctaggccgtgatatctctggaaaattaatggccacaggtgggttgttgattggtggttcaagcggatcatacaatcctaagcttatgtcgtcgacttgtaaattctctgaggtacacctgttcttttatcacttgaagtacacacttgcatgattacaataaaaatgtttaatctgtttgttttatacatatctgaggagataagatgatgatttttcctacataactcttattccatttcactttattttgtccagttcaaccagtgtggcctgtaatcctgttctgtttggtgccaggtttatgaaggcgggccactttttgattttgatggggactttcttggcatgaacctttccctcactactgagggaaccttatttgtgccaggggatagagttcttgatcagcttgtgaattggatactccatcatgaggttaaatttgctgcacggttagcggctttgaaggcattgaggtatgttttgcatattctgaatgggacacatatcctgctcctccctgccatacgtgatttaatgcgtttagctgttttttatgccaaacagcttatgagacttgctggttttgcaataatgtggatagttgggtgttgttccttttgtagggtttttgacattgtagttcctctgcagtttcaatgtgttatgttacccttaatagcaatatgattctcttccacctatatcaagatgtttctgtgtccaattggcacatgccatcgctgccctgtactagattagtcatatgttccaatgtttatcgatatttgtctaattttattagagaaaggaacattttgtccagatttagtggtcacactgctatgatgcctcctgatactggatgtttttttataacatttgctcaattctctcgttttcttgaaatagttttatgcatactactccaggtcttcttttatctatacttttcttaacaaggatcaatatggggatctagaatccttgggctatcccgagcccccaatatcgaatggtaagtcaattcctgtaaatattgtgacttttcatgcattgtgatttttttttacttactgtatcacttacaactattttactttgtatcttcaactagatggcatgattttggctaatacttttgaagagccttttggtaacgtgtgtggtaaaggtgtctggagtgaactaagtgaagatgttgcctctaacatatgtgaaaatattgtcgcacttgcttcattcaatggtgattttacagtattgtgttgtttactgtttcatatttgtactttgatcataactaactaatgatcaaaattatgatattcaggagaaaaacgaagttttgcatgcacgggttttttttattgaatggaacgagtgtgccactattctgacttcagcgaacttacttagagatcctcgtgatgcagacaagattatcgaaaacttgagggttggtgcttctaaatattctatgatccctgttcatttgattaactgctaagagtctcaattgtgttgtttgcagattaaagtgttgcttccaaacaatcggcgcaccaaagggacagtacaacattataatttacgttacaacgttgctctagttagtgtgaaggattaccgtgttctccaaccagtaaaaattcaaccttataggcattacgctagtgaattactagctgtagggtgtatcttcaaatctggcagattaatggcctcaagagggcgacaacttcccatcggtgtcacacatgaccgcaaatttcttggttattctcaatgtacaatcactaaggtaacagcttctatttttcttgtctactatacatggtcaaagtaagtactagtttgcatcagaatatgaattagctatcatatttaattgatattaccaagtataacttctccatttcacctggctaggctggcattggaggtccgcttcttggtttcgatgggaactttgttggcatgaacttctacgatgagggagtagaaggaaccccattcctatcatggtgtgagatttgcgagatccttaaatattttaagacaaaagagtatgtctaggtctttttgtgt

SEQ ID NO: 9407 - DNA, 15992 bp, Oryza sativa
cagctgttccaacaaaccaacattttactcaacattccaggatctgcaagaacccaaggcttgaaagatagcatggatatatgtaagatctgtgcaactctgtagatctccccaagagcaataaagtaatgagcacctgtgcaaccaacagaaggcatgttagttgatcatctttctgcaagcaaatgattaccgaaaaaacaaattatacagctctgctcattattcagagtcccaccttgagaaattactgtttcgccaacatttgcatgacaagattcctgccaaatcatcgcaccatgctgcaattcttgggcacaggacagaagcatactgtaccatgcactgacataatcacattgctcctctttggatgctatttccaaggtacgaaggattgacacgctgtgcttatagagtttaacagctgaactcatgtcttccagtgcctacgttgagtatcatatcaagaaatttcaataacccaatcaagatcatgtcatgactcatggaaacaagggcagaaggtaatggcaaacagaaacattaagtgcacatacgtatactgaaatcaagcaaaatgacatgtcatctatgaatcactttgcctggtacaatctatatatcactttggaggcaagttcaatgcagcttatagaaaagcacaatatcattttcacatttaattatgtttatcatctacaaaagaaaatgtgcatgtgactactgaagactatccgccaaagaatttaagaaaacaagtgtactgatctaaagtaacttgatataaattacaagatttgacagtgtaataaaaaaaacattttttcttttttgtcaaaaagcaggatatataaatgcctaaagacaataaggtgtatagagtctatagacaatgagacaaaaattatatttcctagataaggatgcttaccattgctattatttctgttaaatggtattctttatcaaaatccttcaaatgatcctctttggcactgttaagcagctcagaaatgcaaacatcctttgaaggatgttcatctttgcaaaaacctttcgcaagtgaagaatcttgtaattccttgcaaatttcctggagattatggaaaatgattaaacaaaatattatgtttaattcatgttttgcactgaacaataatatcaagtacttgagttgatcctagaaacaaactcaatgtctcacaacattaaataaatttgtcgggatcaaaagtgcattgcatgcacatcaatataacaatacacaagcaagttgtgaaaaagtcatgctttgataaacatacaagaataaaataatttatagcaaaacattaagcggagcacacctgaatctccctttcagtttctgtcatcacttcattcttttcatcagaaagcatagaattcttctggctttcctgaatccgtatcaattacaaaattatgaacggaagataaccaaatgatttatcagaatataatcagtagtgactgaccttaagatccttcttgtactgggatattaccgtcaatgattcttctctcagcttatggtagaaatcaatcaaaatcctatcacttgctgatttaattgaatggttttcatctgttccaaatgaagagttctgatcactgatcattagtctgtatcacatggggaaaaagggggtgaatgtggagccgaaataccatgaatactcaccatttcagtattagagaacatatcagaagagctttgcacactttctgaagaacattgcataatgtggacagcatcaatcggttcactttctttgtacaggtcgagtatggctgcattattgggtggaaaataactaaaggccttcacactttgtccagcggactcacgagttccaacatgatctgtagtttgaacattgttcaaattttcgctaacactagtaaataatgaccagccctcctggtcgctgctcattgactttggtacatcctgacaaaataaaaagattcagaccaatcagtggagaaggccatagacatatcaagacctaatacagaaaaaaaaactagaaagaggtcataacaggatttctaatgctagaatttcagaaatttttttttaatcaaaagatatataaggataaaattcatcctttgtttagcagggactagggaattcttataacaatgtctgtgtgctgttaaatttactactccgtaagtcagaattttatactatgtatacagattgtaataggcaataaaaatccttctaggcagcttgactgttcaacttgaagaatacaatcacatgatttattgatttaatttcgtgaggcaggtcgtaacgacaatttcatcgaaggttagctccaaaattttctgaagtgggattatttgcaattgatgaattgtctcattttaacagtttccacctattttgccttccaccgacaattgccattggatggatccccatgagctgaaaacgagttgcattcatcaggtttgttgtgagtgcaacatcacaataaaccaaccgatatgttattttcagaccgtgatgattcatgattgtcactacatggttggtcggccatacatcccatcaaatttctgaaaggtagttaaggtcacaaggttagcatcatcaacagtaagaaaggctcacctgagtaagatccccatgggcttgtctgccgccatcctgtacagcatccgacgaagaagaaggcgccgcggccttgaattcccagccatcatcttcgaatccgtcaccatcctcctcctcctcctccgccgccgctaccgctgacccctcctgtgtacccacctccgcggcgtcggtggaggagggttgcgggtgagatccatagaggccggcgatgaggtccttgagatcagccggcttcgatccattggaggacgcgtgcgacgctccccgctgatccgcagccgtcggcggcagctcggccggtccctcctcctcctcctcgtcctcgtcggcgccgaacagggagagggggagcgggccccgcggcttctcccaggagggcggcttctccgccggggccgccgccgacgagccaccatccggattggatccgaggcggctgtcgacgaagtcaccccagtcgtcgtcgtaggcgccgaaggcgtcgaaggcggcggcggcggcgggctggggatcggcgaaggcgaagtcgccgaaatcgaggtcgtcgtcgaggaacggggcgggcggcggcgggaacgcgacggcgtccatcggggaggtggggttggggggaggtgcaatcagcaatggcgggtgcgtgcgtgcgtgcgagagatgagatggtgggcggttggaggagaagaggacggaaagcaagagggaggctcgatggtggagccgttgatcaagttgccattgccaagctgtattccatcgtcagcgccagcaaagagaatgtgtttttttttcttattttccttttttaggaaaataatttctttgatttctttcattggctttgctaggttggcctattgctggcacctgaaatgttgaaatgccaactttgagagacagatgtgctatttcaaacattggcaataaacacaccaaaattgaaagtttaatggaaattggaacgatgtgacggaaaagttagaagtttgtgtgtgtaggaaagttttgatgtgatggaaaagttaaaagtttgaagaaaaagttgggaactaaaccaggtcgaaataagaatatgcatgtttctcaaatttatatggttctatcgtttgttctttcagcttattagccgtagctaaactttgaattaaaacttggttttagaggtgatttttatttttttttattgtagtttgttttacataattagattttaagccaaaatattacttgtaagttttttttttctaataagcgttgacttataatcaattttttgcgatttacgtaaaatactttttgtatatatgagtttccttagaaaagtggttttcaatttatttttaactttataatatttaattaattcatttataccatcaaaataatcgtaacaaatcattcaactattcagcaccgcataacataccaaatcattgacaccataaaggcaatgtattgttcataggaaaaatgtctgaacttttagctcccaaagctcaagtcacaatgcagtgaaggactgaaggcacaaaaatgccgagagattgtagaatttgacaccgattgcgtgcagttcaacactcccaactacttgtagtagaattcccagcctacagtacaatgagtccatgttttggtcgtcaaatcgtcagttctgcactatccgttcctattcattcattcttgggtttgaacagttttatgagataaccaatcaaggacacgagccactgccagaagcgaacgatggaatttgacgccttcggtttgggttcgggccttggaccaaagaggcctttgtacagctccttctgtttttggtacagagctttatcctgttccgcgagagaccgaagctcacgctggatctccttgtcttctggggaatgtttcttggctttcaggaagtcctccctcgctgattctgtctgaccaagttcagctcttgcttttcctcgtctgaacaatgctttcacattgttttcatcctctgccaacacctgaagaataggattatgagttcatcatccagtcaataattattcggtttcggaaaaagggggaaaaattcttcacttgatgaattgccaggtcagttacgtcatgaaattagtgagggttgtcttacaaaaataagttgaggaaaatataggcaactgcactatattcttcactttttggtccaagcgtctagttaccataataatatcatgttgtatgtctttattgtctgaaagtcaaatcaaaatcctaattcatctgaagctatacacaaaccgactggtgtgagtgtgacagcatgagttttaatagattgaactttatgcaaacaaaaaaaacttacaatactacactgtgcgatagcttcatcgaatctcttcagtttgattaggcatgcggccatgttgagatgacatggatttttcacagccaaggccatatctctgtatttcccgaacaattgaaacatgaagtcatctcccatgtatgcaatcgcctgtaaagaggaggagctagaggattacgattagagaatcatctcacaacagttgaagaaggacaactaaccatttcatattgctgcatggcctcctcaaacttcttttctttgaaatactcattgccctcaatcttcctcctgtccgctgcttcaatcctttcctctactgtcatgtcacttcgggctttcccctgcagttgtacacaatttgtaaggttccttagaacatccaaatcaccttgaaaaccataaataaaatgaaaccaaccaacaatagtctcagattactatcagaaataataaggataagcattatgttgggtggagatggtaagaaggatgtttccctacctctttgacatcatcaaacccaataagttcaacttcatataaaagatctgccattggagggacatttgggaatgaaaagctcccttctttcccatagcctagctcccagccaacatgcaacagtgcacgctccccacttctcatgttaccaacaccaatgcctaaaccagacatttgttttttctctgtcggtaaaaagagaaaaaggcttttattccatatgtgataatcactgataaatcccaggtatactctacatgctcaagagtgtccaaaagatatttgtaggaaagttatatagttaccctgtacctgtattgtatatttagtgaaccatcagaaaacagggggggaaatatattagtaataaaaatataactatttagtctttatgtccttgcaagttgtcaatcgccctcacacacacacacacacacccaaaaaaaaaactagaatatcaatagcaagttgaaagttgctgatcgatcaactgattttcaaaacccttattagaatcatagattatttgtggcactataagatcagaatggcataagagtaagctatttgatgtgtatcatctatagaaggcatgcatgcagtgtagaagaactagggataaaatgaagtatcattattttcaccttttccaattactagttcaatgggatgctgttcttgccaagtatcctcgaatttatgcagagagccttgaacccaagctctatagtgcactgtaacagaaaaaacagaaacaaacattatgcagatgctctccttctgaataagtatatacatggtctgagaatggaagattgatctgtaatagacagacgttgacatgcttatacaaatgatggacgtgccacttggtaagaagtgctcaaagctgatgattcatagcaaagcacaagtgcatgactagttttaaatatcatttgctctaagttgttatgagtttggtgctgctatgtgccacactagttattagtaagcctgtggtgttagagaaggctgtgcgtacatcgaattgttcatcctaaaatactgttaagtatttcatgatttctggtatctgaataagaagctctttccacagaaagttccagtactggcaatttagttaaaaagaagtgtacaaaaaagaaacagagagctaggagatagtacaacagagcataaatactgagcccctagtacatgtaactttacaaatgtatgttctgagcccctgatacacagagaataagttctcttattatggaacttccatagaaacaacaacgagatgaaatgtgatgataagacaaatgctaatgaaggtggaatatattagcctcattctataaatcaccaggataaatatagggaatgatcaaaccatttatgacatacaaaagcacgtcgcgaactttgatggtttcttgccatggccttctttgatgacttgttttttaactttgtcatgaaggacctccatattagaggaaaccacaggtgggacagagccatcttgcggaggttcagtatgcacaaaagaagcttcctctacagttatctcattatcacttgaacctgaaaaaccaggatacgggttaagaacaaagggaaattgaagcatgtttaataaagtactccctattttaatacaaattctggttctatactggtcatgttgtaatgtagggtcgaagtactatatccaatgttcagtttccaatagtgcgtgtttgttgattagaaggaaagggacaacgtgagctacatttttcgctgtctagtatccactatcatgtagcacgccgaaccatttaagctcctcttaggactccagcctccaggcatgcaggggttttcttttccagatttctgttggaagtgaattgttttaaagcaggccagagaaaaaaaggacaatagacataatccatatggttactgattgttcctgtagacctatacagaaatcaactgtatcgttctatacagttgaagcaaattcagaaatcgatttatacttgaacttgtttctccggattcatcaaaacaaagggagaaagggatgccatgtcataattaatttcactattaggtctaccagtacaatttagcatttgatttgagcatcatttggggtacttgtatcaaggtggaaactgcaaaacgatttgaattctgcctgcgtgctcgggagctcaaactaatccaagcacataatctatacgccttccttttggatcccaacaaaaagaaaaagaacattctacaccgaaattcagaaacaaagcacatccacagagcaatagccacgcggggctggtacggggtagagtggggcaggcgagagaaaagggaggctcaccagaggaggcgggatcggcggcggcggcgggtgccggcggcgagccctcttcttcctccaccacagccatcgcgcgcgtgcacggtggtttggttgggtttgggggcttccgagctccgaggcggacggttcgaggagatgagactgagaagtcaaacagttgagaataccacgagagactccagcagcagcagccgccagcgagacgtcgccgtccggccgccgcttgatgcgggcttcccttttcgacgcggccgtatcaaggaatccccatgacgccaagctctacgctattggtccaacttcatgaagaaattcttattgcacttaagaatttatcactcgtaatccctccgtactcgtaaagtcgtttataacagcgacacggtctccaaaacacaactttgacttcttttttctataaaaatatttattgaaaagtgatatatgtatacttttatgaaagtatttttcaagacaaatctattcatataatttttatattttcaaactcaacaacttaagtgttattcatgatttatattcccaaggtttgacttaaacattgtcctaaacgacttcctttataagtatggagagagtaacttataactcgtggaattcttatatattcatgatatgtggattcagtgataaatacttaattgtcattttaagagtgacaaatagcaaaatttctctttcttacgagcctcattcaatttctgttgttcttttcacggttcaattaaataattatttatgtactttataatcataatatgttttgtaattaaatttctatcataatcttatatttatcccctttttctgttttcttaatattgtgcttcgaaggaaccttaagttcccaacaactgatgtaatatactaccttgatctaaaagtcttcttcgtatttctttaattactaagaccaagaagaaactacctcatccgattaatactccatatttagcaaaattctcagcatacatgcaatggtgttggactgttggaggatggctggtcggttccgaaataaacttaattcattgttgctaaacaaagatatactctcttcattcaagtcttggatacatagaaattacaaataggaaaataaaatagtaagaaaaatttaggtggagggaatatatatttcactacaactagacatctcttgttagctgaagtaacaagtataaaaacagaccagaaccagtagtacttgttttttagataatagatttatattaaacccagcctatacacaagtagtacttgttagctgaagtaaccagtagtgcccatcttacagtgcagaccaaaatccataactctacaactaaacttggtagtcggctgcagtgaattacagaattgcgtcaaccgggacaggatgccggcaagatggggcagcactacggcagcgtgccgtgacagacaaacgtgctggctccattcatcatcagacaaacgtgtaagatcgggcagaaacgatcccaactggccaactatgcgttctatccagaggcagcagctgaaataatgcacatgctctgaaacagtcacagctactcacaatgctccccttgaatcgaaacagtcacgtttctcgcggattgtagtagaattatatatttacatcattcattgctggagctcctagctagctatgctcacctcataacctctctgtatgaaataccaagatagcatatcaccttggcaatacaggctaagctactacagatcagagcagagcggtgcagcttcctgccaaccaactctaaaatgttccaaaaatgtgtccactcactaggataactactattacctactcgttgggaagtgaatggatcagctgaggagcagcatcacccaagacactggatgaagctttgttctgtcctgatgagctgctggatttacttccctcttcaaattgtcaagttgtacttatttagctttcgccagccagctttcagtgttttggtgccaacaagaggtacattttgacctatcatagattgtcttttcaacaagaggttgtagacaagctcattccaggtatcagggactccaggcaagcaccagtggctgcaatcttgcctgtagagagggacagggcctgaaggactcaggtgtactgagacgtgcccatctttccgttgagccgtcatctgagtcacgttcagtatatccaacccgagaagcttgggcctgaagctgttccctagtacatcatttacggggttaagaaaatcagcccattgctccaatgatttaactggtgtcacatccggatgagtttccaaatgacaatttcctccagtcttccagtcaccacctctgcacaaaatatggattactaaagttgagtttgacagatcatttgaagcacatgttgtttgtgcatccaaaaaaaacattatcaacatgaagctaaagcactaatttccagccaaaagtgaatggccaagagattgcagaatagttctgcttttaaagcatctttgtcaacatgacgatggtttattgttgattgtcttactatatatggtactcagtcaagcatttcaatggaaactatgcacatatgttgctattattgtgaaagcagacactaaggtacctgactacaaaatttaagcaagtatccaaatcatattcttagaacaatatcccaagactgtcaaataatgcttgagcaaggaaatagttgaacaatcacatcactgtcgagtttgtgttttacggacctgaaatgcacaggagcatatgtacggaagatgacatgggtcttgcttgagttaacctcattgtgaagccaaccaaacaatgtctgtatggatcttttgtaagcatctccgacagtcatgtccattttaactgcatccccttcttgaaaataggtgccactgatacaagacataacagtaagagtgtaaggcttatgccatgtatattacagatatgcaattatgttaacttaaaattttgctcaaaagcagaacaaattgctcagaaccatctatcagtcatcatatatgaattagagaacataactacagaactatagtttagatattaatgcttaccttctgattgttttctcgtagttccaccagtgcccagtgttaaggatcaatacatcagcatccctccactggccccggtcagacaaccaatccatggcatctaccctaattgtatatttaacaaccccaggagctccaggtggggcacgcccttgaaggactataaaaggagatctgtaatattccacggtgcaattgtagtctctaaacttgaaaattaagaaacccatgtgttttgtgatgggattcccattaacttcgaagatggagctcttatcaggaacagcaacagagagcatacaaagaagagattcccactggttccgcccaattgaatcaccaacaaatactactcttttgtttctcaacttctccagcatatttctggcatcaaatctaagaaatcaaagaaaataatggtgaaatcagaatatgatatcagtaatgcttaattggatatgtgaattattcataacaatacttcttgatctacaagcatcagtgaggcatcatttacatgctcaaaagaaaatgaaattacaaggtcacaatcatcttcttttttttcctttatggactgttttattgagaaatcaaaggtgccccaaaagtttttattttaaaaaaaagggttaaaatcagatgttccactgttttctcataaaaaatatttatatgtttaccatagtatgtaatacagtctaatgtgttacagtaagcaattatgaaggataacaaattttccaacatgtaaaagctaccgatagtgatgataacaagaatcagtattttttctttcttctgcaaaaggcagaaacccaatctgagaatagctatacttttctgaaacagaagagacaacttttcctttctgtaagaaagacagcttaaccgaacatatagaacactggactctgacaacaaacaagacgaggtcacatttccatcaaggcaaaacaaaggtgaaagatggcaacaccatgaaagctacagacagactactaattaaacaacactagtttaactaatttatctctcggaggcctaaccatgcgcataacattgttttctaacccagtggggagcataaggcatcgagtttccaatcgcggtgcacagttcctaagtgcggtggtcgtcaacctcatttcctgtgcaaataatctaatgctcacaagggttcagattataatatgcacactcaccgatccaatctcaccaggtatcctgctaaaagggcccaaagtcagaactacatctgcaaattaacaatcattctaccaacaatgctacatgtatgagtgctagactgaaccaagtttatccatcttgagttctttacttctccaagcccaacaaattaggtgtcacccaaactagccaacgattcatatctccattactcgaaaacaatgcgcatccgaaattcatactcgatccaccaacaatgcttatgcaccattctgaatgtttggattgcagcaagagatttcgcttgagatgtctagatttctccttcacgagattgctaaagtagacaatcgagtagattcatctaaacccccaaacccccaccaaatccaaccgagcggaagcgtacaagcaagaacttaatcgaacaaaccgaccaacctggggagatcgcagcgcgacggcctccaccgccacttggagtaggacgcgtcggggcggccgttctcggagcaccggaacccgacgtccaggaaggggcagtccgtggagtggtagagcgggtagctgtcgttccacacccactccccgtcgaacaggtcgcactcctcctcctcctccccctcggcgcgcgcctccaccgccgccgcctcggccgcgatggagaccccgccgctccagagcttcccgggggccgccgacagcgcgaggccgacggccgccgagcagcggagcgaggcggcgcagaggagcagcaccagcgcggcggcggcggccaccgccacggcgagccccgccatcctggccttctccagcaccggcctcttcgtgacccgccccgccagccgcttcgccgccgccgccgccaccaccaccgccatctcgatctgctcctccacccagcgcgcctcgcttcctggcagcagcgaggtagcgtacgggactacgggcgcgacgtcactgagacgggaggttgtgcgtggccgccattaaaggcgaagtggaggtctccaagaggaagaggaggatttgagagggagatgagtatttgctttctgttttagttcggcgatttttgattggaaagcgatgcgtctactaggagtaggagtagtcatttgccataacggctgtggttagtggtgcggtttggccgcgtaggagtagtagagtagcaataaattcgggcgtggtggggagaggaggagtgagtacatgtcaagtactcgtactattaaatcgagttggatctaatttgtgttgcaactgctgatgaccccttgattcgaacgaaaatcatatgaatcttggagtatttatatttttataggattttttctatatagcccttaaagttaaaggaatgaatcatatagtcctatgtaattcctatgtaatatttcattccatgcaagttttatagaaaatttaacataatgtagaacctgagaaagttttctttaagtctttatccctcttcaaattcatatgtatttctttcggtccaaccaaacggttattcatttgttttttctatgttttctaatcatctattttatgaatcatgtctttttcatattcttctatttttcctctatttttctattcatgctattcaaataggcctttgtttttgttttgataagcactatggttgtgattgttaattttattttatttttttatcgggatgaccgaaggaagttatctgaatcttattatggatgcttgtcaaattatgggcacatgatttttatgcagcaaaatgcaagtattggcatgtgcagttgaataatttatgcttaggaatatcaatcttcatttatcccgtgagcacccctactttatccgtcctaaaataaatcaaattaaaataggatatgacataaactagtagtaatgaatctagaattattatacttaggattattttctatatatatatatatatatatatatatatatatatatatatatatacatatatatacatacattatatacatacatatatatatatatatacatatatatacatacattatatatatacatatatatatatatatatatatatatgtttcaaccatagaaattcgacattgttgcatattttatattgttatgttgcaatgtttttttttaaaaaaaaatgcaaatgatgttgtttggatgtctcaataagtttttttttaatgtttcactagtatatgtgtaaatgttgcacgtggtattatttgattgtttcaataagtattgtgtgatgttacaccagttcattcacaaatgttgcacttgatgttatttggatgtttcagtaaatatttcgtgatgtctcaatagttataacttgatgtgccatgtattatacaagaatatctagttagaaatataattatatatttttattagaaatataagtatgggagatcttgttttaaagatttaattgtaacaaatatagaggtacaatcaaatatcaaaaaagataattaatttatgaagaaaaatagtttaaagttcattaaaaggttggttagagaagagtgagaatatgtttaccatgcacctaggtgtgtatgtgcagcagcttgcgacagtgcatgcaggaggggagtagtgcatgacccacaacaacatgtatggggtagttgtgacttgtgagtgatgtgaataagtagggatgcgagagtctgatgtgttgctttagttaaggattgttttcccttttcaagaacacagttaggatagtcaagtctggaaggaaaagtccactttgacgagtgagcctaataagcagctaacgccctgcgcctggctatgggtgatcgagcctatgcgagcacgagaatcgcgagtggaaagcaacgagaaagcatggctagatcgcgcgaatttgacccaccaagaattgtagcccatgttcgtggatctaggggtctgtttagattgtagccaaaataaaccatattaaatttcggcaatgccaaaattttaggaagatgataatattgtcaaaattttggcaggatttcttatgtatttaccatatttgacaacaaactaaacgtagacttttttttgataacttttaaaaaaaatggtttggttgaaaatagcatcaaagtaacatgccataagacaagcaacctaggtgcatgtgcatcccatagacttgtattaggcttgtttgagtttaagtccactcgatttaattgagcttttaaaaaaataacaaagaaaaaaagtaaaaacaatttataacatgaaacgcaagtactattatacatggaattcagcctatcaagggccataacaagaagcaaaaggaataagtttactttaggtccctctatttgtcggtcagtgagattttcgttccttaaccgcaaaaccgggtacgacccgtcccccaacttatgaaaccgagcaaacgagctccctcggcggtatagagggcggttttggccgatgtggcatctacgtggcacctacatggctcctttgactaggtcttcgtcccatgtggcaatgacgtggtgcttacgtggcaatttcatcccggaaaaataataaaaattgtgggacccatatgttagctacaaaaaaataataaaaaaggtgggcccatgtggtcccacatatcagcctccctcttctctctatccccccctctctcccctcccacactacggagagaaggcgagtggcggcgctgaggggcgacggacggagcagcgacggagcgaagcagcacggcagccggtggtagatggagcggcgggcggcggtggacggtgagcggctggcggcgggcggcgggag

SEQ ID NO: 9408 - DNA, 4933 bp, Oryza sativa
cgatctgagaggataagtgcgaggcggttgtggaggagaggatagggaagaaggattatatattaagcgttgaattttagtgccggttggtaataccaaccgggactaaaaatcttctagatcccggttgataacaccaaccgggagtaaagttaggatctttagtgagtaaagatcggggggcctgacaggtttagaaccgagactaaatatcatcttcaccaaccgggactaaagattaaatatgcccactgtagccaccaaccgggactaaagatcatttttagtcccggtttttagtggaaccggactattgtggatttcggccgaccgaccaaagatggtttctccactagtgcgatatgcacgggagctagctcgggtgctacggcccactatctcggcatatatccgtcaatctcacggaccaacgggccaccccgctcaccgtcgcgttgccaaggaggggaggagatgcaacgcaatggcggatgtgccgatgcggaggtggtatgcgtggggtggggttgggttgggctggatttttcacctttcagttctattgaaaaacttactctacaaataaacccctaaaatagcttattctagaaatttccattttcgcagcgtcaatgacgctgacgtcgtcccctccgcccactggtgaaatttaagtcacaaatgtgaaggggggcggcgccaaagacattgacgccaaggaccaatttatagaaaataatttgaaaaaagacctatttataataaaaggacgcatttctaaataggttttcaacgctagcatcattagcgccgaggacctatttataaatattttttttttaaaaaaatacaaattggtccttggtaccaatgacgctggcgtgtcctccttcacatttgtgatttagcttccaccgaaaaactagaggaatgtgcgaacgttattggcactgttatgtggatcacagcgctaatgatgttggcgtcacaagaagaaccatttctagaataagttttctagaaaaattaaaatgtgaataattcagttgggttggtttagttgggaggctggttctcgagtcacatgcatggcccggctgctgctgtgctggggaggagttgaatgaatatgaatgggatggattctgtgattcctgtcgatgcatgcatgcatatggagatggagagagtgcagcagggttgttgtcctggatgagggccagcattccgatgcgcggcctcgaccaaaactgaccgcctcatgtacggccctctagtgctcaaccgcgcaacgccaagcatatcgtaccagagtactactccggtactccccctacctataggtgcagcatttttccaatcaaatcaagcgaaaaagcgaaaagggctgacttgcaattactagttactcacggtaatttttacccggcatatatatttacatgcacatatgcatatttttaaattgagaacttagccctagaacaatctagtccaaatttactcctatgaatatttgaacttaggatcttagagtgttactgaggtcactgtaatcactataatacatgccctttcgtatgttccttaagcattactctttccgtccaaaaaaaacccaatcttgggttctctccgtccaaaaaaaacccaatcttgggtttaaggctggacacatgtccaggttcaaatctaggattgattttttttttatggatagagtacatctctggtctcgtaatctcttgtcatggatatgatgtttagagctggggtcaattgtatagctggtttttaaactttactagtatttgtgccatttaagtctttgtactcttgaaatgtagaattaagagtaaagtgaacatacggtctctaatcatatactccctccgttctaaaaaaagacaaacccaggtttccgtgtccaacgtttgaccatccttcttatttgaaaaaaatataaaaaaattaaaaagataagccacgcataaaatattaatcatattttatcatctaataacaatgaaaatatgaattataaaaaaatttcatataagacggacagtcaaagttgaacacggaaatccagggtttaccttttttgggacagagggagtacatgtgtactacctagatcactgaactcttaaaatgtattttcgggtctctcaacttttctcgggtctcatgtagattcgaacaggctccaacccactccgtgtgctgacgtggcatgccatggtggtccctacgtgtcagtagaacccatacgctagtcacatatagaaaaagtttaagaacattttttttctcctctcttctttcatttatttcttcaaaattaaaaacatccttttctcctctctctctctctcctctttttcttttaaaaaatatttttttctctatgtgactaacatgtgaaactcattgacatgtaagttatatggtgccataccatttcacagagcgggttgaaacccgtttgaacctatatatcactcttaacaagtttgaagacctaaacatatattttgagagtttagggatctaaatgacatattcgtacaagtttaagggccacccatgcacttcactctagaattaatattgtaaactttgtcttactcatcactttaaccaaacagtcgcctactcacttttgtgccccaacgtagagccacaatgggtccaacagagcttcccatgcatgccctctcaaagggagtagtatatagcatggttgaaatgagccatgcataaaaatcaaatcaatacccaaaatccctagttctcgtggtgtccctaattcatcgcctacaactcaccgttagcaaatccctaactctctttgagccccaatttactatccctaattcaaaatgccgtaagagcaagtttaatagtatagctaactactagcttcaaatcaactatagtcaacttaatagccaattcatacaatagttacttacaaacatatagtacactattaatatatggtcccatatatcatatacacattgtgtcttgaagtccgtactacatctagctataaatatgtaactcactgctcttctctcctcttttatatcctcaatataggtttatagctgacttatagtctactgttgtacctgctctaattgctttgattcgacacctcggccattggatccttcaattctattgttgtcaccaatgtttgctcaagtttggtggtgtttgaatcttctgaagataaagattaagtgtttcacacaaaaagaggtggtaataacgtgtgattaattgagtattaattattataaacttgaaaaatagattaatatgatattttagaacaactttcatatagaaatttttcgtatgaaacataccgtttaacagtttgaaaagcgtgccacgaaaatccaaaatttcatccactgcttgtagcggaaacgaacaggaccaaaggttgtcacacagtgttggcttgtgaagcagaagcgcttcagcgatggtttggattagtgatgaacacaaggcgggatgtagatcgttttgcagtagtactaatgaagtagcagtggccgacatgtggatccagatccatacatcaatttatgctactgcatcagcaatccccaccgcaccagtgaggacctatttgtttcgagatttaaaaccgctcctcaccggttcaccaaaatcagtatcctgttcaagtcaaaaaggacatccatgacagtgaatcatagcccgtgaaaatggattatttcagatcattccatcgcgtgcatttccagcctttctctgcgcctttgcgctggccaccctttgcctagctagtcgcacgttacctttatacttcctccattctaaaatgttcgacgccgttgattttttaaaaatatttggacattcgtgtttttttagataatggatattttatacccggcttcatctatcaaaagatagactcatgccaattataacaaacgttcttacagagtaacacttggaaacaaaaccgagataaaagttcagacgactaaagaccgatgtgtctagctgataaccatccattggaactaaaaaattgcaaagctgatgactcaagatgttgcgatgccgcgatcaactgtgaacgcagatcctcatgccgttgcagcttcgcccattggcgtaaccaatgcgtacccctgaatagtacctgcaaaaaagatttcggtccgtaattgtcaaacactaactcgtttgttgttaaccaaactgtccagaaaagcgctgctgctgcagttaacagtaaagtattttgttttttattaccccccttagaccactgttggaataactcaactaagtttgatggggtacttataccaaacaaaatatgaaccgctcgccacaagaacttggcaatatagcaatcaaaaaacaggtgttgaattgactcaggctgatgacagaaagcgcattttaaatcaccatgccaattcctcctagctaaattatctttagtaagaatgacacctttctttaagtaccacaaaaaaatttttatttttgaagggaccttaatttgccaaatatcctgtgaaactctaataccattactgattagtgcagcatacatcgatttgacagtaaaatttcctgaggcctgcaaagaccacacaaacgagtcacccccatcctgtaataatacttcctgtatggaagcaagcactctattccatctactaagattcgctcccaccaaattccgcctaaacgaaatattcagaggggacgaactaagtactttggccacagagtcatttttccttctaacaatattaaacaatgatggaaatctgtcctttaaaggtttattacccagccacgtatcgcaccaaaatctcgtttgcgatccatctttgattttgaacgatcccaagcccag

SEQ ID NO: 9409 - DNA, 18058 bp, Oryza sativa
  unsure (1)..(18058): unsure at all n locations
ctgccatctctctaaaggtgtaccctcaatggacaccccttgccacacctcctttacaatatcactgaaaccgtccctccgcaaccagcccaattcaaatttaaattgaggttggtaagctgcggacgcaccgcctgaattgtatagcaaaggtgtatgatctgaaatttccctagcgaggatgctaacagtagagagtgggaattttgtctcaaactccgtagaaactagaattctgtcaagcttctcaaaagtttgattttgtaagtgatttgcccaagtaaaagatctccctgatgactccaattctctaagattcaaagtgtcaattactgcattgaacagaaatggccatctatcgttaaagttatcattatttttctcctgtgggttacgaagtatattaaagtcaccacctacaactgtaggtatggtttctttagagcaaactcgtactaattcagagagaaaatgaccttttaaatcagactgtgctggaccatatacagaaatcaaattaaatttaaaatcatctgctctctgtcttaatttaaagcgaatgaaaaaatctccttcctcaatttctccaatgtcaagaaacagcaaattaacacctagaatcataccaccagagcgccccctaggggccatgcagtgccagatgaaatctctgccagcacaaatattatttaatgttgactgaggaaaagaggctctgcccgtctctgataaagcaataaagtctagattttgctccttagttagatcagacaaaaatttatatttttgttattcaaaaaatttaagtaattattaattcttgtcctatcatttgatttatggttaaatatacttttatgtatacgtatagtttttacatattttacaaaagtttttaaataagacgaacgattaaacatgtttaaaaaagtcaacggcgttaaacattgccgttaaacatttagagaaagtgggagtaatcggtagaacctggataattggacagtggagtggtgtctgtcggtgcggcttctcgatcgggtgcgcacggtgagtgaacgtgatcgatcgatcgatcgatcgcccggggcatcgtgggaggatcccgggatccacacgaccagatcgtaaagaggagaatgtgtgtgtgatgtgcgcgcgtgccggcattcggccgaatgctgtggtgaacggccggcggcggcggcacatggacggagttagtagtacattgattgcttcgatccatgatccaaaccaaccaacgacctgtgatgaatgctgagcctcgccgattggccgtcgctgtctgttccatcggtgagaaagtccaaatcacgtcgttatccgccgcacctctatgctagcgcttagctcaggacaaggcaagaatgatctactccctccgccccaaagtataagaacataaaatcagatcaaacatttaaacattttttagtcctgtgaatctgaacaaacaaccagtctagattcgtagtactagaaaatatctcatctggtactagattcttaggccatagccaacgctccatgctagaccgtggtctcacctctcccgagatgaatatttgcgccacgttagagggagtcgcaccccaggagaggttgcgaaccttagcagaggtgcgggtagtttcgtcagaccacggctctgacatgcaaggaaaaggtgaggaagcgcgttggggagaggcctcgccctgtgccgtcaccctgcgccgttgcaattaactcactcccgcgcattgctgccatgaacgaggtcgagaagggccttcccggcggcgcatcggaggatgacagtaaggtgcttcatcgcgagaagacgccgccggtgactgacgcctctatctgcaccgttgttggctatttcgtcgccccaaccattgttccaggcagctccgtcgccgaagtcatcggaccgttgcccggatccctattgcgtcggctcgatctccacctccaccgccccccgccgtggcgatcgagtcaggcaacactgaggggagagaggggagaggcagagagacggcgtcgccggagacgagaggggcgaggcatgcgtgaggaagaggagcgaccggcgaggcgtgcgggcgcgtggaggaagaagagcgatatgtgcggcgctgcgcgtggggtaaggaagggattggatgggctgagagaatatgacaatgggccatgtactaatacgcaattttttctctacacaaagggctgacatagaaaaatgtttatgggacccacttcaaagtacggagaatggttgcttaagccgggtcttggaccgcttttgctctcgtggatagtggggatgttgcctgcgttggtcttagccttatattttgggacgaaaagagtactaggactgggcaaaggttgctttgctgggcttcgcagatctctgcgagtaaatttcaacatgagaaaacatacgctgattggtactctgtttaactgtttttgaaaggcgcactgttactcctactccactcgcttcaatttcggctcgtcagcgcaagatcagacgatcttgatttactccggaatttcctctgaaatctgtcaacatattgttgttccttttttttcccatttgtttgattgtttgacatggcttctgaaacttcctccccttgttaaacccacttcacagctagaatcgcacagaatacggaaatgttaaacaccggtatcccgtttgggctcgatcgggacaggacaatttttttagcaatcaccagaaatcatcacgagcttatccgagtcccactcccaagagagacacaatgtttcttgtgcttatccgagtcccactcacaattctctcaccgtgggcatggcgcgtgagatctcgctggcgccaacggcggcggtggaggagccggcggcggcacctgctcgcgtccgccggcggcggcagctccacctcttcagtgtcgccgctgaagtgcacgaggtcagtgtgggagagcggcgtgagcgtggtggtggcgccgacgccggcgcccaccgtgttttcttcggttgacagtctccatcaacaggaggttcttcattttcttgctttaagcagtgtcaagaaaatcggtgacatgaattggtacgagcatatagatgatacatcgatcgaatctgatatgaacttattcatgtccactccctgtacatatatttgatctggaagttgacggaagcaaaaatcgtttccccatatataaacaaatgaagtgtattacatggggtaaacctttttgtggagtaaataccagccatgatactgaggaggatcatgacacctcccaagtatcacatgatcgtacttaggtataatctatgaaactcacatgaaccatgataccagtcatgatactgagaagaatcatgatacctccctcatatcacatgatccttctaaggtatcatctatgaaatatgatgataccagacatgatacctgagcagaatcatgaaacctcctacatatcacatgatccttctaaggtatcatctatgaaacctgatgataccagacatgatacctgagcagaattatgatacctccaacgtatcacatgatcttcctaagatatcatcagtgaaacatgataataccatccatgatactgaggaggatcatgatacctcccaggtatcacatgatcatccttaagtatcatatgtgaaacccacagaaaccatgatagcatacatgatatgtaagtaggatcatgtgatacttcacaggtatcacacataatgatactttgcagtatcatgtatgaaactttcaggtatcacacaagatgatatatacctagcgagggatcatgtgtgaaaccttcaggtttcatgataccgagaaggatcgtgatacctcctaggtatcacatgactctactaatgtatcatccatgaaacccgtaggcaccatgatagaagccaagatactcactgtcttgatggtgttactctcattcacagatttttcctgcatatcacctcgattcttagactgggccttctcaacatgttgtcctcccattggtgtcaagttcattgatgcaagctttggtgtcaagttcattgatgcaagctttctcagctaaaccttgtattgttttgattgcaagatcatatccttgtaaaacacgattccgaggatgtttcatggggaagcagaagagccagcggacggcgaggcttccgctggaaagaagcgaggaatcgcgcgccgcaattccgaggaggtttcactgggatgtagaggagctggcggatgatgctcgcgccggtggaaggaagcgaggaatcacgcgctttctaggaggatttgccatgatgcggagaagccggcggacggtgcgcgtgccagcgggaggaagcaaggaatcgcgcgcgaaggcgcgcgcttccgaggaggtttcgctgagatgtagggaagccggcgtttggcgagcgcttgtcgtcgttcacgttttgctgcaatgcacgcaggtggcggacgacagttgctgagagcgatgtgatattggtaccagaatcgtccccttttttaacgggattctggtatatagcatccccccacagaataataacatctccatgttttgtcaccactcaccaatggaccatgagggcagcagacaatctagaaaagattaaacaagcgactctaatgaggtaatagcacaaacaaacctatactttcttgaaaccacagacaaacatcttcttgctgcctatacaatcaacggatccatccccaacctatcaattgccctcacaatccctcacatttatccgttcctatcactgttcataagtctatttgaaaaagaggaagaaaaagaaagaactgtccgtaagactattctgctactctcatgtccttctctgtcgacaaaaccggcaacagattgttcaggttaaggcacggtaagattattactactcctaccgtgcatgagagagagatagagagagagagagagagagagcagggcctacgcttaaagccgccattattgcggcacccctcccctgccacaataaagctaccacttcaaaccagctatatggacagctatcctaacactctactactacacagggagagatgatcactttgaagcaaacaagaatagcaacctcagcctctgcaatgattcagtgcagttgcaccccccaaaacatggcccggaactcgcagcttatttttttgacctatacggctaataacttttctcatgtgtgttccatgcgtaacaaataagcatcgaatctaaatcagacactttaaatactcatatagctaactctttaattgatttggatagttaaactaggtccttgctctaacgctctttattttaccatctccaaaataacaaaggacccacatgtcagtctctactagcattcgttcttccttttctttctccccctcttcctcttcacccgctggggcaatggacgagccgacaacgcgaggccacggcagggtcgctgggcagcatagcagtgggtcgcggcgataggggcggtgacggagggcggcggcagaggcgaggcatacaacggcggcagtaaattggcacgggtgagacaaatggctgcgacaagggcgaggtgatgggtggcagtgacatggggcgaggcagcggacggtagcgagacaggcgagccgggtacaggaagcgacggacgacaacgggatagacgagttgcagagggaaagcaacaatattatatcggcgtgggttaggcgagccagacgatggcagacatagggcaatgacggtaggggcaaggcagatggcggcggaggcagcaacggcgaggcagcgagcgacagcaggggtgaggttgccggagagaagaaggggcttgtgggagagaaatttggtgtggggtccaccatttggcaagtgggtatggatggccagatttggctagttaggagagggatttggccatccaaatagcttggtaaatcgaatagagagtctgttggagtatgttgttttgctagatttgccaaaattcggcttggagagcaatttggaaaggctattggagacttggagttgctctaacgaatggaacaatggattaacatacatgcttcctaagctctcaaactatgtgatttttaaagccttttatgtacttctgtaataaatttatttttagtttcttctatttatcccaagttcatttttagagaaattattacatcggagtttgtgaaagtagtgaataattatatttaaagtagatatagtcagaaatagttgcattaggatttgataaagtaggggtattctattttttggttttgtattggtatatgtgggatatgtgaaaaatgatcttattttggtacagaggtactccgtccgctaatataaacatttttatagttgaacacaaatattaagaaaataggtataatcaaatgggcgaaggttgtgattggtttagtggtgaaggtaggtgaggaaattgaatgttagagtgttgtgattgattggaaagataatgttggtgaagaaattgttatattttagggcaaatatttaatgctagaagttgctaaatcttgggacgaagggaatattaagtttataataacgaatactccctctgtcaaaaagaattcaatcatggggatgaatctgaacatagggcttgtttggttcaataccctaccaaaatatagtttttgcactaccaatttattggtagggtagagttgtatatggttcgaggccaatttagaaccaagctttgagtagaatatagaaaatatcaaattggatattggcaatgcccatgatttggtttcaaaccaaaactgtcatatacactgttcaaactaccaaaatattggtagggcacgttttggcactaatccaaaacggcccatagtgcatgttaggtttatttgcaagattaattttttccttctgaaaaaggagggaatacgctatttgtgccgttgaatagggattataaattatttaatcatttagcgcaaaagaacaaacctcccaactgccatttagtgaaagagaagggattgtactatatatttcacacaaaacaatccctaatactttgaaacccgtgtaaatcccaacaaacataactccttctccttcactttttctctcactacgccacacaatacacaacctcctacaccatcgctgccccatgatgacgttgcttggcttcgccgattggacggaaaatgtcaatgaatccaacaagccccctacaatctctactcctccgcaagccaatggcgacgaggtgcctctatctgttttgccctcgccaccaacaccaacccactattcgttgtcgaccgtgcggcttcgttgccaccgccgtcgtctcggcgtctactgcctcccacgatctcctccctcccctcctcccactgccctctcacccgtattttaacgtgggaccctagtttgtaggtcattgatgggagttttgtgtgtccccagtgttaaagaagaagggaggtcgttagagctaggggagaaaggtttgaaacacgaatcgtgaagcacatttgatgatccaaaatctataatatttaggtatagattttctgtcgatagaaggtaaagctatcctgaaaaagaatgccctagcattccattccacatcatcacttgcccacttgagagttgagatccttcctcctactccaccggatcgctttggagaaagctgttgcctacttggacaaactcaacgcaaactgaagtttacattagggcatcatcaatgtttgtggtgtagtgtaatcttaaggtgggccctataaatagtgagccattgttatagccatacccataatgctatggttagaatttagccacaagatggccacatagaattgaaaaataattgtttcatctcttgttcatgaagtgaatgagagagaaaaaatattttctttttgcttgtggtagaacttaagcataaggtgcaccctaagctaatgctactttccacaatgtatatagctcactttacaagtgcaatcattatcttaaagttatctttttcatacattgtggttgcccttagtagaaaagaaaggggaattaaacggctgcttgttcgaagctggtacaatcatcgtggcgaggggcctctagtagtttaatggaggcgtgattaatgatggtaatctacggcacggcatgtttttggttccaattggggacagcggattaatctaatccgagggagggatgattgctgctgctgatgctgctggtcccaacagtggagcacccctgatacggagcagagcgtgaggttcctgcgcgaaatccagtggggatggatccaccattcacgacaactaacatcgaatctcaagcatcgagtgtgcggcaaataccatgccaattaaacaaaaaaaaacttgtactgctatctctgtagccctctaaataatgacggtactaagatccgtttaggtgaagaaaaatgtggtcaggacagtggtatgatactgtatttactattccaaggcttaattagcagcagtacactagcagtactgcatactgtagaaaagttcagacaattgtttctctgatcgagtctgaatgctactgcatacgatattttttttctcactttttaccgcggtagtagttgggggtggaatcaatcgttgtgagggagagggaccaggcagtgctatgaacaggcaggcagaagcagtggtgcttactgtggtcataggattgaaatgtgcaattctggtgtaagccaacctgaatgcagctgctgctgataggggacagcgctatcttaccccatcaataatgtaagtgcagggtgcaggaaaaaggttgcaaccatggccaaaactgcagcagtatgactctctcttcctccccctcctcacacatggaccaccaccaccacaaccatcatcatgatcaatccatcccctctcctccatctccattgcattgctcccacaattatcattgttatcaccttcctcaccttgggatggagtattatagtctttcttctctcataaccaaggaagaaagaatagcatggcattgagtagacaacattccactactagtggcatgtaaaaagagctctgtagctaggcaaccctccactgtcacagtcacaaaggcacaaacaaacatttggcaacacattttgctttgcacattgttcatctaccatgcatcaccacaacaccttatggagcaagaaggaaaccaccaccaccaccttccttctcgaattataaagcaccatcatcatcatcatctcttatgaaaaactatagataattactatacctaccttcgccttcaaggaagttgagttctcctttaaaagaaaggtgaaaacgagctaagtaaaaaagaaaaaagaaaaagaagaaaaaaagaagagcgatctagatgggactcatttcccatggtgtatactggttgactgatcctgagagcatctctcaaccatcatgatggcgatcacctgtgacctgatgagcttcttcctcagactcctggttggttcactttcttgaacaacaaaatgagcagcagcaacaggaggaggaagaaagcaatccggacactggagacctcacatcaccgagcagctgttcgggttctcgtcgctgaagtagttgtagggatcggcatgcgggtgcggctgcattgggtagtgcatcgggtacggcatcggcggccggccgtacccgtaccccatcgccgggtaccccgccggagcagcgccgccgccgtggccatggtgaccgtggtgaccatggtggccgtggccgttcatcatcatctgctgctgctgctgctgctgctgctgcatcatggccatgtactgctgctgggccatggggttcccggccgccgccgcggcctgcagcatctcgggcccggacggcatgccgccgccgccctggtagaacgctgccggtggcatgccctgcacggcgccggcgcccatgtgggggtggtggcccatgggcatggtcatgggcccgccgcccatctggcccattccggggaaaccggcactgccgcccatcatgttcggcctcatcatcatggcctgctgctgcgccggcatgccgcccatcggcccaccgacaccgccgccctggccgccgccgcccttcttcccctgagcagggtggttgccgccgccgttcggggcgcctcctccccccttggcgttgttcggctgcccgccgccgttcttgccgccgccaccttggttctgcttggcaccggagtctttcttgccgccgccagcggcgttgttggcgttccccttgatctgcacggggatctcgttgccaccgccgcccttcttgccgccattgccggcgccgccgccgttgttgccacccttcttgtcgccgccaccaccggcgtttggtggcggcatggccatctgcttcatcatcttgggatcgtcgaagtagtcgtcgtcgaggccgtcgtcgtcgaaatcgtcctcgtcatcgaactcgtcgaactcgtcatcaaactcgctgccatcgtcgccgaagtcatcctcgggaggaggaaggttgaacttgacggacttggggtccttgatcggcgcggccgccgcgaacggcgccatcttggcggcgtccatgaactgcggcaacttcagccccttcatctgcagctgctgctgcagctgctgaatctgctgcggcgtcggctgcggcatctgcggcggcatcatcatcttcacgtctttgctgccgcctccaccgttgccaccaccgccgccgccgccgccccccttctggcccttgccgccggcgtccttgggctggcccttgccgccgccatccttgggctggcccttgccgccgccgccgtcaaggtggagcttctgaaactggttgttcaccgccgccaccccgaccttggaaccccatagctccgccggcttgccggccttgttgagcttcttgataatggtggccggatccaccaggccggacaccgtcaccttcccctgctcagcgtcaatgctagtctggtacacacctgcagagataaatccaacgagcgtttcactcagaaacagggagtaaaaaatcacccagaaaattaaacaaccatatagctgatgaaaacaatttggttttaaaaaatttctctgtttttcataccttcaatcttgtggaggatcttcttgaccttcttctggcacccatcacagtggatgttcactttcagcacacaagtctgggaatttgggaggaacagagaaacacaggtttaccaaaacggcaaaaacagagatgttttcgaagaaaacatagcaggagacatgggaggagcacaaagtgaaaaacaaaagctagctgcccctgcctgatgaaaatggcagcaaaaacaaggagaaaaaacagaatgtctgtatcaccactagttctggttttgagttgaaaagaagcaaaaaagaagaagaaaaaactgacctgaatcttcaggacttcctccttactcatccctgaccacctcaagtgcggctccccccaccaacacaagcacaagagaggcctcctcacagatctggcacataagagtcctcaaatcagggacataacaacaacatgaagaagacagcagcaaccagcaaacattgccttctctcaagaaaaaaaaaactctatgatgagcaaaaacagagaagaaaaatgccttcttgctgaagataagttaatggcctccaatataatatctctccttcacacactcacacaaagagtaagtgctatggagagagagaaacatagacaggattattagagttttgcgtgtttgcagaaaaccaagagggatgggggggctcctattaacccggtggtccagagcagaagaaggaagagaaggaggagcaagaagagagcctcttctctctactccacactactcctgcaaagcttaatataaacacacaggcaacaccatctcctcctccttacccttttattttgctttcgccttcggcagtgcagcctgcctggaagaaggcctttctcttttgcaccctccacacagattgtgaaggaagggaagcctggggctcttgcaaaagacttgaagagaagagagattaaataccactttgtcacatgtcagtaagtacagggagatgttcaacatgtgaggtactcagatgttacacccaagcttgcgatgtcggtttttttttttttgcttttttgtaaaagtgtccaggaaatgttgctctcctgataatttcatattagcccctctagcctctgtagtattatgtagcattttggtcctgggtttcttgtgttcacctgttcatcaggtcaaaaagatttttctgaatagttctagagggacttgtgaaaatttagcaaattgtacgtaggagaacaacgacgtacacaaatatgatccatgcagatattaatattttacgtgaaaaatccatgcaaccattcaaaccattggttgatgcacgagcgcttgtcctattcggtcgtaactcgtaacatatttcgtaccactgacgaataaggtagctttaaatgatccaattgtgaaacgtgtagtcgttatgattcgccaacgtcattgcaatgcccgtacaaaaagatatattacattttagttttgtcgcacgccacattatttgtcggcatagacgttacataattaaagaaaccattttcggttatatacgacaacaactggccgacttcataaactcgacaaatccgtgttgccagaaaccgatgaaataggcacaccccgtttgctcccgtttatcatcctactacttcaactcaaataaggaattaacatggaaatgcagagcaaaaataggagaactccattacatgacttttttttttactctgggcaaaaggactcaaccataattaccctcttacgaagggactaatgcgcaaaagaagacgaggagggggttccctgtgctgatcacgcccggtcaatcatgtaacacgcggctttggggcatcgtcacgctgtgcaggcaaggcaaggcaaatgtggtccgtagacgcgccgcggccacgccctctcatctctatctctctactctatctcccctggctgcgccgcgccgcgctgccgtggcgagcgagccgtgcgcggcgtgggctgcgcgcgcggtacgtcgtccactactgcaaaccgccgcgagcgagacgatgatgcggtcacaccatcctcgcgtcgcgccgtggcgtggcgtacgtagcgcgaggcggagcggcagcctgcatccatccccaagcctgtggtgtcagaggagggtggtgagcacaataactactcaggctttctttttattgatgacgccccttgtttggcctttgctcctctgcagtctgcatgcgtttccaccctgattttcttggtccactcttccgttactgcctttttcactactcctactctccaaaaggaagagggagaaaaaacggctttggtcacgctgtgacggatggacggttcagggctcatgcggagtagcagggtattgcagtgcagctgttgttgtggccgatcgtttggatccatcgattcgaggatcggtcgtggctttgttttgacgttgctgacggacgcgaatggcagcagcagagggatcgatcgatcgatcgatccatggatgggtgacagtttgcgcgtcgctgtcgccgcgcttcttctgctcgtgcgtgacatgcacactgttcgtctgtgcgagggtgcgcttgactgttccctccacacggcatcggcgctaaaatatcatatgatcagttccagcattcgagccatgtatatggactacatgatcgatcgatcgatcaagcagggaacagttgggttcaggttcagagaggattggcacgactctgtgtttcgtaaatccgttgaatctttggagatactactagtattacaatatcaagcaaagaaaactactgtatctgtcacaagccaagatactggtactgtactgggtgtagttgagctagagatatgattgcatcatcacgagcaaatcgaggttactatggatttgttcgtatagtctcatctttgacgaagaggcgccgcaccggtcatgcatgctgctggagctagactgatgtcagggtatttgaggtggtgctagagctacactgatgtcagggtatttgacggtttgcactagccactgatttttcaacctgcggaaatttgctgtcatccatccattccatgggttacagatacatctactggtagctgtacatgcatgcatatacgcatgcgctcctaactgatcgactaatctctgtatgcatttgctagtatcgtgtttggcagtccaaggcaagatcatcagtatcgggatacatatgtatcgtagattcgtagtttctatgatattatctgggtgaaacgatacatgttggttttaggatcgttttcagtgtatcacattagtatcggaatatggagtgtaagattgttagaatcgctctagtatcgagatactaaccgtttaaaattagacattatttgaattcaaaaaatcaaaactatctaaatgcatttgtgttcatgtatctttaaaatcaatgtaaataaaactattagcattagtggatgattttctctttgacatatctctctttattatggtatatattattattactttttttagagtggctatatataattaatataaattaatattaaattattttttaagaaaaatatcatagtatcatggagctaagttggatccagatactaacaacctttgtccagaggctagttggacacacatgcatatatatccatgagtcccatcatttcacctccagttgattatatgatgtactacccccgtccaaaaatatagcaatgagacatgtccagatacattatcctggacccatcctaggttgctatattttgggacggagagagtatggtttattagtaataaaaaacaatgtatagtttaaaatttttatatatgtatttttagcgacttaaaaattaatattaaaaaaaacaacgatgaaaaatgatcaaaattgactttaaaatttatattttaaatttcaattttagcagcagccgataaacgttcatgcctgtacacatacttttttttttaagagaaaggcagcaatgtacaaatacttgattactactacaagaggacatatggcagtagtcgacatatatacacgtacagcgtacttgaattttgtacacatgtagtaattgcttgctcgcattcaggcttactactgtacaaccacaccctgaatgcagtactgcatatccgtgtgactctccagtctccactagtgaagtatttgttctctctcccatatgagaacaagaggctttatgatcatctagtcattgacactagcaataaattggctcgacgtattcttttgcagctgtgcttgcgttaacccatctccataaaactccaagagccaaacagaaaaaaagaaagagataagagtgatcagagttagccaggcccagctaagctagctaggttcgttgtggcgtgccttgtgagtgaagaactgaatatgatttcgggaagatgtaagatgtaacttggaagtagttgtggtgaaagagatggctgcttgtgctggggtttggccggcgccaactcgtgggacaccttgtagagatcagatgttactagtgatcgacttttgcaggaggaagctttcatggagagatgcatgcatatggtccggatggatcggattagttggtgtagaaaaaaggaattcagaaggggccagaatatgaccgattttaatttgttgagatatcgacgaacgttgcatatgcattttggtggtgttcgcctagcttagctgcagcctacagggtcagccaccgccatgcaggaatcagtcggtgacatgttttttgactgatcatgctttgtcagaatgtgaatgccatatgcaggagtagatgtagatcactgcatgcatttttttttgcaatcctgcgtactccctccgtataaaaataaacaaacatagtacgaagtgtgataatataaatatcgatagattatatatcgtggaagaggattttgatccctcgaagagatatctcctcgttgtttgcatatcacttaaatggttataaaaaaatttaagaagatgtattaatatgtgatatatcactccacaaacatgcaaataaaaattcaacttctagatctcgcaacgaaaaaaacaaatttgactctgaatatacgttaactagctgtggttcaatttgttttttcgttacgagatgtagaagttgaatttgaacttgtatgtttgtggagtgttatatcacatattaatacaccttcccaatttttttcaattttttttattaccatttaagtgacatacaaagaacgaggggatatcctctcgagggattaaaacagtttccctatatatcgtactagatttgtttcttgttttagaatgaagggagtacgtgcttatgttctgaattctgtgattgaactaccgaaccgaatatatgatcatatcggtcgatcatggcttggcttcggacatgtatggaaagcaaggaatggtttttggccggctttgcacttgtgaatccaagtgacagcaactgaactcacaagacaatactccaggtcgatcgtcgacatcagctacgactctgacgtacgcctacggaatcgatgcaaagagatcagttgtcctatactataactttagctaattgcaaatggttatatacacttcattggataccgacgtgttcctacaagacgcgacatacattcatgtcggcacgtcaggttcatgagcccatgtttgatcatgaaacgtcagaaagctttgctatgattcatcatttgcaacgatcggtggcgtgtttgagaacactaattctccctagccatcgtttgttttggctactgatgtaaacctgagatgttagttgtctggattcaggatgcatggggagcagacttgacatcccaggacatcgattgatcggcatcaaaagtactgaggaagacatgattacctacacagctcaatgattaatcacatgacgcctttctatacaaaagaggatgataaattcttcgtttgcgaaatttgaaacttgcttcgatcgacatggaaatcaaacaaagaccgatctactagcatacaaatacataatacattgccaacacatatagacaagaagtatactactcgtattagccaagtagagaggcagaccttaattgattaactaatgaatgacccccatcatcagaattaaggaggaccggtagtagtaccttgtaagcattgctaaagcaaaaatcaaacaagacgacgacgtttatccacaaacctacaaatgatttgatttcagatgtgatccatttaccgggcttctttaatttatcgtaacgccaacgaaagatttaattcctcatgcggtcttggaatgatttgattcgatgtggaatggaacaataatggaagcagattattgaattgaactatgggcatctacgtacgtagcaggggctggaccaggttgctgtgttgatctggatcaaaccaggccggcttggtcgccatgtttgggccacatacagtacggtacagctctgaactgatgtatgagcgtctgtatagtcttgtcgtcgtcatgggcctccgggaccacgcgtaggtacggggttgtttggttggtatactcatatcaccaaaacttaccacacttcatttagctaatatgcctaacatgtggctaacaaaattgaagccacacttcagccatagaagagcaaacttgccacacttttatgtgccaatgacatgtgggatccacatcatggtgaaggaatcttgccataagtgtggcacgaaccanacagatgcctaacttag

SEQ ID NO: 9410 - DNA, 18381 bp, Oryza sativa
  unsure (1)..(18381): unsure at all n locations
acttgtgctgaccatgttggagatgcaaaggccagccacttttaatcagaattttaactaaagttgacaagtccccatttgatccctttacaatgtatccataccacaaattaaactcttggaacacaatttggaagaactaaagaagaatcccattagcactgaatcacatggctagattctctctgcagtccacaggtcgtgcagaaaaatcagcaaatccgtgggtcttaagtcttatctaatcctgtgggcgcccattggttttgcaacaattaaacaaggatattttggtcagtacttcactactcggaacggattcaactaagccacacacaactatatataaaaaaaagatcaaaacaaaaggtaagggtttgcaacaagaccgaagagataaatagaatgcaaaagaatgacttattttttcatattttacagatgaaccttatccgggaccatgataattaagccgttccattcaattcaaagatgaggttgaagttgcagccacccagcttgctactgcagaagctgactgcacaactaatgtgcatttacatagactaatactgactcactgagaccctgtttagatgggactaaaacttttaagtccttatcacatcggatatttgtcactaattataaatattaaacgtagactattaataaaacccataaataatcttggactaattcacgagacgaatctattgagcctaattaatccatgattagcctttataatgctacagtaaacattctctaattatatattaattaggcttaaaaattttgtctcgcaaattagctttcatttatgtaattagttttgtaagtagtctatatttaatactctaaattagtgtctaaatacagagactaaagttaaatccctggatccaaacaccacctcagtcttatttccataatatcgatttgacaataaattgcgtacaactttttatctttcttcctccttttcttttttgtttttgttttcctttaagacgacattgttaattggcataattgcacaacaaggttttgccctgctgagcaatcaatgtcagagttttagctgtgccacagccccacaaggctcatttttgtatatgagggttttttatgtctctaaaaagttttttttaaaaaatcagcctatatgaaaggactgatttagtataaatgtgagtttcattttattttcttgtatttgtgtaaaacaaactgaaacgtcaaatggttttagcaaaacaatttgtcaaatgcttcatcgttctcctcctattgtgtcaccatgtcaagctcttcgcaaaaatgttagccacttgtgttcgttttgttttcctttccattttgtattgcaaggagagtgacttgccaatgattccttactccttggactctaggatattcttcttttttagcaatgagcatatggtgtattgtgtactacgtagggtgtcacacgatatagcaaactgggttttcttttattcttttacttgtttatacatgggactatcaacatatgtcatggcttgcgtaagttcgatattttaatgcacataattcgaattagactattaacttgagtccaaaataatggagtgttgcttttgtgcatacagacaaataaactgaataaaatacaaacgtagcatgtccggtggaaagttctaaaacttctattatctttatgttctttttatatttggattggatattcaaaatggtttaatgaaaggtgtaacatagtatgtaggttaatcaataatgtacctaaaatgaaaattagttcaacttagctactctttccattcccaaatataaacatttttgatatttaaattttgtacacgctcgaggaatggtaatttttggtaacgaagaacaagcactatacaatgcagatcagtttggcaacaagaagactgcatacattattttccggaagaattatgtatggttaaaagacatgaatattaaggaatgacctaatatcaaataattagatgaagttatgcttcgaacccagattatctagctcactatcttgtgtagctagccagaaaacccctaggcgtttctcgaattatgtttggttaagaaattcattgggctaagactgaaaaaaaagcttacattaattaataagacctctaaatctatctacacctatattaattagacactctgaaagagcttatgtgttaaccagaaagaattaattgttgattaggtggatcgtgctatcacaacctagataatctgtgtaatgcatgggctggtgactttatgaaattaagtcctaaattcaacaaaattggctcggctcagagcagatactcgacttttctcgtccgctcagaggaaaatattattctctgaagacgtaattaacgatgagtcgatgactcatccctttgtcatccaattaatcatctaactgagttaattgattatccacttgttttcttctctaacgtaccaaagcgacatgtatggtgctggattcttgattccctgagtgaccaaaaaaatatcatttcgtttcttgcaaattctttttgtgcataattgagcgtacccgacgggaatggggaattagatgttttagtgcaagtcaattttaagacagatcattacgaactaaagggatgtttaatggtgtggacgaatttggggtgctacgtcagtcgttttctctacaacactacaacagtgtcgtagttcatgctgtccacttatcagcttgtggaggtggattctcctccgcttattttgcgattgctcaatcagcagatctggtcatgagatgctgcatagattattggggaatttgcaaattttttgatctttttttttattttacaagaatgccattcgaatgacaattccggtcataatttcctaatgacgattcaaatcgtggtaaatttgctgttgcccctagattatttgaatcatttttgcggtttgagtgaggaataattttcggtttgtggaaggtagaggtatactttggcattaatagggaggaatttaactatttaccatttttaggtttgttatttatccaaatgcccctcttaggtttgcgcttaattatttgctcccggagagagatgatttcttaactatttgccatttttgcctacgtgatatgcccgcgtggaaagcatcgtagaccccacccgtcatcccctcccctatcattcttctccacctccggtcgtcgaggtctccgtgctggcgagccccacccatggccaccacctggagcacccggattggggaggcgcactaggagagaccgtcgaggtcgaggaagaaggagagggcgcgggggtcgatggtagtcgtcggcaggatcagatgcggcggatggagggcgagcggtggcgatggtgacgacggctcatcctgatcctcccatcgcgaggacggggatcggatgcagtgggtggagggcgagcggcggcggcgacaacggctcgtcccgctccccccattgcggggatggggatcggatgcggcgggtggagggcgagcggcagcggcggccacgagcggcgagcgacggtggagaagaaggataggggagggctgacgagtggggtccacgatactttccacgcgggcacgccacgtaggcaacagtggcaaatagttaagaaatcatctcttcagtggtaaattattaagcgcaagcctaagaggagcatttagataagtggcaaacctaaaagtggcaaatagttaaattccccttaacaggaggaattatactctttgaactaaaagatatacctatataaatattatgtagtgacacatatttgatgactgatattgcattaacagatagttggggagggaaatgttctatcagaagatttggaagtaaagataatattctttatcataatacacacaatttttactaataggcaggtacgtgcaaaatttcctggtcttgaaataagtactgcatcatcaagcgtgccacgcaatatctgctccggtaggccaaaatgccggtggccgtttctgtggccgcattagattcccacatggaaacaaagcacacatcacaacaagtgtcactcacaagaaatcgtgcaagatgcatccaatatattccatcaccatcctcacctcatctccttcgtccttgtttgcttccctcgcttcacctatcaacttcttcaccatgcttcacctaatcaaattagcagctactggcttcagagttctttttttctttgaacgaattagtcaatgtgatatgattctctagaaatatctcggttccgtttcttccattctcgcatccattttttcctgacggcccaattgttgattgtccagattagtaacagagtttaaaactttgtttcagaaaaaaaaatcatttatatatttttcttgctaggaagaaaaggtatcaaagttgtaacatctcgtgtccaacatttgcactcaatgactcttcatggactctttatggctgtgttaacctttggagcagagggttagggagtattttacccagaaacgttgatgatttagtctgggttcggcagctgtggattagaagaaaaactctttcgttgtgtgcgtgcatgcttcccaagcagttaaatggtacgtttttcataaaatatttatatagaaaagttattttaaataatcatattaatttattttttttaaatttaaaatagttaatactcaataatcatgtagtaatatttacattgttttgcgtattcttctcgatcttctcctctcatcttaaacacaacatatagtctattgttaacattctttgtaccttctttgattataaaatttatttgtaagtatgccgtatgttttgacgttatgcatctaactatggagacgtccaaagtgttctcagcgtagttctacgattttgatataattgactaattaaaacttacactccattaaaagtacagacataagctggtgtttttgacacgcccatgtgcacgagacgttttgttttagtcaggagaaaaacaattaaagaagattaatcggaggttaacacacaagaaaacgtcagtgcggcccccacgtaaacagagctccattgcttgggtttgtggctatataaagcagcttctcctcctccatttctccatccatccagtgtgagctccgtttcttgctccatccatctatccatccaaggagtgtggaacgccacacgtattttttttttatctatgctaatctgatcattagcagaggagagttttagcagtaggattggattaaattggagtagtttcatagtttgtgtgtagtgatcttaattagctttgattagacagacagtacagtagagtagaggatgttggctgtgttcagcggcgcggtggtggaggtgccggcggagctggtggccgccggcagccggacgccgtcgcccaagacgcgggcgtcggagctggtcggccgcttcctcgccgccgccgagccggccgtgtccctgcagctcggcgaccttggccacctcgcctactcccacgccaaccaatccctcctccgcccaaggtatactagctgctgcttctactctgcttcagctgaaattgctgaaaaaacatctgccgttttctttaccctgaactccccaagtcctggatttcacgagatctagctaagaacagagccaagaattgattgctctctgtggctagatcagttaactgttcatcctgagaggctgagacagagtcatttactctgaatttgttcttcagttagtgtctcggtgaagtctcatggtgatgagatttaatagttagtctctgcaagaagacaatctaagttggtggttgagataagcttttgcaagttgcaacaggctcactgttcttggcaacactagtcactgcgtggtgggcgacagcttttcatccaaggggaaaaaaaaatctgaggacatgttgctgaaatgattttttgtgcccacctgaaatggtttgagtgatgaggtgggctctcctagtaccataggtcatgtggacatgtctcacaactcacaagatctgacaaaaaaaaattctcaggtttggtaaaaacatatgcttaaaatgaattatcgatctgaaaaacaagtttatgtacagtaacttaaactgttattttacataataaactggtttcttcaataacttaagcctggttttttggttgtggcttgagtcaataattggagaggtacaaaggctttttgctttcggaagacagagtaatagatacaactctctaatccatttctgtaggtgaggaggcaaggctaccaaacctcctccttcatctatagttttttgttttatctatagaccacacgactgagatcatcgggattttactgataattaggtgattaactatggcatacgtttatttatttcagaaggtagaaagctaatcgaacaagaaaatggacgaaaaggaactgtcaaagaggtgtagtttgccatgctgctatggtacctagatctctttacggtcaaatgattggtgcttccataggaaaaacaagaggagaacaagacaggaaagaaagttaaatcaatgtttacatgaacattgccacatatatttcgatgaaagaaggccaccgcatcaccttttgttattttgcatgtccacatcaagccaccttccacagatacaaaggtttcaattgacttcacaacaaacgggcctcatattcttcatcaggcggctaatgattggactaattatagttttaagaaaatggacaaacctgttttgtcaagcctatttcttaattataaaaacttaaaaaggataaacatgacagtatttggcaagctactaggttgcttttaaaaacctctttgtttatgcctttcctttagttgttgtgccattcacatggcttagttcatagtaggagtgtaggacacttagcacttggtggctactgcttaccagaagactctatccggttttgatacccacagatctgaaagaaaggaaagctgaacaagggggccatgctgtcaattcagcactatgatttgtggggcctgattacccttttttcatatcttatctagtactactaggcagattcactgaagaagtatcatccaaggaattccactcctttactccattcattataccagtacaaaatatatgcttccttttcagcaagtttaggtatctaattcttgatgttaggtgcatcttgcattaagtcatagatgttccacctaattttgcattctgcactgaagtaccatgtccttcaggcattcaagaatggctgaactgataacaccaaacatactaattttcttaaattttgttgtggatgccagtttttttttatcatagggttggaaagcatctataattttacagctgctcactgagaacatacaactgcatttgtgcagatcctttgcatcaaaagatgacattttctgcctgtttgagggagtcctggacaatctgggcaggctgagccagcagtatggcctgtccaagggcgccaatgaggtgctcctggttatcgaggcgtacaagacgctgagagacagagcaccttaccctgctagcttcatgctctcgcagctcaccggcagctacgcctttgtgctcttcgacaagtccacctcttctctccttgtggcctctgtgagttcttcatctcgaggcaaccgacagttacatgctgttgctcaaacacttgcattgacagtgcttggtgatttggttggtttagcttactgattatgacgtgatcttgtgctggcaattgttgtctcaggatccagagggcaaggtgcctctgttctgggggataactgctgatggatctgttgccttctctaacgacattgacctgcttaaaggatcatgtggcaagtcacttgcacctttcccacaaggtaatgtttgaatcatagtccttttatgttgccaatcattgcaaatgacatttaaaatggggcatttagtataaaattgtgggtcagttgaatcttcactgctcaaatatgtgcaaagagccatttttggttatgctcactaattacatgcattctgactgcaggttgcttctattccaatgctcttggaggcttgaagtgctatgagaacccaaagaacaaggtgactgctgttcctgcaaatgaagaagagatctgtggtgcaaccttcaaggtaaaaaggaaattgatttcttgccaagaatataatgttgagggaaactattttgatccctcgaggggatcctaattaacttgactcaataaaacagaactccttttttcatcatttgcatttgatctgaactcattcgacctttctggatgcattgctaggttgagagcgccactgcaatcctcacagctctgcactaggatgatgtttcggtgtccggtcgttgtacatggtggtggtgtaacatagttgcaactgatctgtatcatcttttcataaaagagaagtactgcctgcatggcaagtgcttcagtgttctgggtgtgtagtatgatctctgtacctttgttgttcaagcaggaatgaactccaggccggctgtgatcagttgaatgtagttctgttgcaaataacctgtccttgtcagttgttactatggatgtctgtttgatgtagtgatgttgtagatcactgcatttcatgaactttggtcaactagtagcaagaacagagtgcagaaataagcaatgttcagagtagaggtggccaaacgggccgggccaaacgggcggcccggggcacggccgaacctgtagcaggcacggcccggcacggcctgctacagtaacgggccgtgccggcacggcacgagtagccgtgccgtgcttgggccgctggccgagcccgcgggccggcacggcacggcacggctactgtagcggcacggcacggcccgcggcacggcacggcccgtttcgccggcggcccgtcaggccgaaagcgggccagcggcgcacgcgccaggccgaaagcagggacagggcgggcggcggtcgaatgggaaggcgccacgtggcactaacggctatttgaccgttcaaatttgaaaataaccgttgggaggctaaaaaattcataaaaatttcgaaaaaattccaaaaaaatctcaaatttcgccctataaatagggcatgaaccccagccatttctcctcatcccacactcctcatcttgtgctctcaagtgttttaagtgctctctttgttctcaagtgtgcatttttttttattttgacaaaatttgctcaaattttgtcaaaaatcaaaattagtttcgtagttcaacagtttgatcgcagaggtttgaagagctcgcggttggaaagatgtaagtaatattcaaatttgtgtattatttgtattgtgtttgtgaattcaataaatattcgaaaatttgtttatgtcggtttaaattttcataatggatccgaactttccataccagtcgccgtcgttcaccttgggtgatttcgaccccaactacatgtcgaggtttgacgatacctccggatcggctccaactccaccatctgtggaggaggtaccggttcatacggctgtcgttgaggaggtaccggttcaggcggcgacagcttcggaaggattttccggaaccgcgagcggaagtgtttcgacacacaccggctcgaagagatcgagaacctccggtgtgtggcaaaacttcgacgagataaaggaaacatgccccgacggaagggaggtatcgaaagcccgttgtagaatatgtaggcaaattttatctgctcgttcttctggtggtacaggtcacctcaagcgccatgcggagtcgtgtgccaagaagcaaggaatacaactccggcagcagcaacttatggtaaacccagacggtacggtacgcagttgggagtacgatcccatggttgctcgggaatctcttgtccggttaatcgccaggcaagatttacccctgaactttggggagtcccctgcttttgaacattacattcagcaatctcataaccctaggtttaaagctgtgagtaggcaaacatcaactagagatttagagaatgtttatcacaaggaagcaactgcacttaaggaactgtttagtacatgtactttctctgttagtgttacttcagatatatggagtagtagagctagagaggattatcttagcgtagttgttcattttgttgatgatgattggcaattacaaaagagagttttagggcttaggttaatagatgtctcacatatagaagaaaacatagctgaaagaattagggaagtaattaatgaatttaatcttgctgataaaatatttgctgtcaccctagataatgcatctgctaattctagggctattgaaatattgcaacctttattttgtgtgtatgctcaatcttttctactccatcagcgttgtgcatgtcatataattaatttgattgttaagactggcatgaagagggtaggtgaccacatcgatgctgttcgtcaagcaatcgcgtggttaactgcttctaacccgcggattgctgcatggaagaggttttgcaatgcggccggtgtgaaagctcgtaagtttgccaccgatgcagagcatcggtggaatgcaacgtatttaatgttaaaagttgttttaccttatagtagtttactttctgattttgttcagtcacgtggtggcccaagaaacagtgacgggtcttcagtactgaacgagcatgtttgggcaattgtccaaaaatttcaccaatttctagaaactttttatgattgtactctaactttgtcacaagtttattatccaactgctaatataattttgcacaaccttcttgaaattgctactttatttaaagaatacgaaaatgatgacgttctaactgaacctgtctttcacatgaaacaaaaatatttgaaatattggaaaaatatacctatgttgtatgcttttgcttttgttttagatcctaggtgtaaattaaggggattatctgctattttatcacttgttggagatactataggtgtagattatagttctttttatactgaggttagacgtaaattatatgaggtttttggaagatatgaagtaaagtttcaggaagttcgccagcagagaccccctcctatccccactacaggtaagaagaagatacagtggggtaggatttggggtggatcgtcttcaatccaaggtggtggcagttcgtcggctacaagtggagacgcctcttcgcatgttgtggccgaagagttgtccggttatttggacagcgacgccatccaccacgaagcacaagatttcaacgtcctcgggtggtggaatgaccacaagataacatatcctgtgctttcaaaactagcacgggatgtgttgacggtgcccgtgtcgacggtgtcctccgaatcggccttcagtctatgcggccgaatcatcgaagaccggaggacgactctgcgcagcgaccacgtcgaaatgctactaagcgttaaagactgggagcttgctcgacaacatgcccaatacactgcggacaaccaagaattggccgcccagttcgagcaactctacctggatccagaccaaccccagtagaattttgttagaagtagttctgacctttgagctgtactcttttctttgtcatggttttctcattttcccctatgagtttttacatgacaaagtttttaacgaggcagcatgtatcattgtatcctgtaatgatataaacatcaataaaggtcattactatttttaacaaattcttttgcaatattttcgcaagtgtggatttatctttaaattatttcaaaataataaatcacaatctatatttttaaatttttcaacacaacaaaaaaataccattttttcttttttttaacattagcaaatcattacttttttaaaaaacttttatttccattttttaaataccattttttaacattagtaaatcattacttttttttaaacattttatttccatttttaattttttttccttatacatttcctttgctttttttttaaaaaaaaacactgtgcactggcggcctggcggctggcggcctggcggcctggcggccagtgcagctcagctgccggcctgccttcacgggccgccgtgccccgaacggcccgtgggccgcaggcgtgccgtgccggcacgggcacggcccggccatccacgggccgtgcttgggccggcggctcggcacgtgggccggcacggcacggcccgtttcatcagccgtgcctaacgggccgtgccgaaacgggccgtgccggacccgtgcccgtgccgggccgggccgtgccgcccgtttggacacctatagttcagagtagagttctaaattctgattgtgaagtctgaaccttctgttccttccttgctcctctatttgcttccttttgtatataacctctccttatcagttgttactttgattgtgtgtttgatgtcttgatgttgtagatcaccgcatttcatcaactttgctcagctagtagcaagaacaaaagtgcagaaacaagcaatgttcagagagagttattctgattgtggaatctgaaccacctgttctttccttctgcttatatttggttcagtaaatcggtaaacaaggtctgattcagtttgagacactggatgactggaatcgggagctagcaagctggagctggatgcacgtcttgggacatgatatccgtatgaagaaattgccttggatgtgatcgatcgatagaccacctgctctttctcaaaaatcaaaatttctgcttcatatattcgtcgctggcatccgcagcttgcaccatatactgtgctcgcctctgtccgcttgattgttcaaccgcacgttctcgatcggacggttcccgtgttggggggggggggatccaacgtaagtgcaagggggactcgagtcccccctacacccacaaaacccatggataccctccggagcacccccttcaattttttcatcataaataataaactaaaggtctctagatgactggaggttgaaaaaactgtgtaattgagtccccccaatttttttgttcctagatccgccccggggggggggggctaatgcgcgacacgcgactacctgctactatgtactgtactagtctattactagtagtactactactacactcctattactaatactactactataatactactactacattatggttatgatactactaatattactactataatatatttttgatgtataaaaaatatacacatatacaaactttatatacgtacgtatacaaagttcgtatatgtgacgtatataaagtttgcatgcacgtacacaaggtttgtatgcacgtctataaagtttgcatgcacgtatacaaactttttatagatatacgtaaatgctaaaaaatcgaaaagaaaaaaaacggaaagaaaaaaactggaaagaaaaccgtaaaaaactgaaaagaaaaaagtaaaaacagaaaaaaaaaacaacgggaaaaaccgtgcgccccacccctacgcatgcccgcgcgcgccacatgcctcgccgcgggggagggggggtggtggcggcggctgatcgctcattagcgattttggttcccgtgagcccaagagaataattccccgaaccccatgaacagcaatttttttaagccttgcttttgttacagacgacatttggcctttgttcgaacactgagtcattcatagttcagataaaaattgtactaggagattagccatagtggttgataccagttttggggtgtttgctgaattcgtgccacttgggggtccgttagaatcagctgaaagaactgagctgattatggctcgtgaaatgaaacaaaccagtatgagtaattaaatattactaactattaccaatataaaaatcgagttatttgatttttttaaagaattttttacatataaaatatttgcatggaatgcgccgtttaatattttaagaaacatgctaacagaaaacggggtagccccaccatatcagcacttccgaactatcacactcaagaaatcaaaatttctgtttcatatttgtcgctggcatccgcagcttgcacgatatactgtgctcgagtgctcgactctgtccgctttgttctcaaaaagaaaaaaaaaagatgctccaatctgttcagattgatggtggatgcgatgaagtgatctggccttacactaaacataagtcctttactgccaagtcaatgtacaatctgctaacctttgggggattaaggattcagacatgtaggctgtttggaagagtagaattcctctcaaaatcaagcattttctatatttatctgggagaggaaaacttccttgtgctaatcaattagttaaaaggaaatggaagggtgggaatgagctttgtaaactctaggaaaactgaaacttctgaccatattctgtttcactgccctttagctttgtttgcttggtgtgtgattgaagaggccttgcatttgagaaggagacatatttcattctgggattgcactgggtttgtttgggataggggggagaagatggtttggatggtcttattggccagtgtatgctgggcttcgtggctaataaatgattgggcttttaaggactttccggtttcttctcctttacagggttatttacaggtcactctcgcttgcacagaagtggaaggtgttcctaaggggagaagagcaaaaggtgctggatggctggcatgaagccattctggacaaattgtatcaagtgaagccgtctgttcttcccgcagccatttagctctttcttttttgggctgttgtttttgtgtagcgaggtgttttgtgggttaaaatggtggtcgtttccagggtgtaggagcaaagctctttccgaagctagctgttgcatcatacctatgcggtctagatgagttaaaaataaaaccgctcccatgctatatcaccattcgtgcgactataacctatctcttctctttgtggttgataatacttaatgaaatttatgccatttgtgcgactataacctctctcttctctttgttgttgataatacttaatgaaatttgtgataacaatataaatggcaaattactgttaatgaaagtcaaaaggtcaatggtaaagtgaaatagtaagtctagtgagaatacaaatagatttttttcccgaatacaaatagatctttctttttcccgattagtcagatatttgtacttttttaagaactcacacataattacgcatgcacactatacttacacacctcacacgcggtatttgtgccgtgttacaatatttgttgtaccattttgtaatttagtgttaatatttttttttcggaatgatgtaaatttagggttaggcctagttagcctatcaatctacttaacatgcgggatgacacccctccagcagaatgaaatggtgaccggagggagttagggataggattttctgttctaatcggtataccatggtcctctctcatctgcccatgtaaaagtgccgtagctgaaagataaaactaataatatgctaagctaaatttgcatgatgtgtgtctaatacttaaaataataaattgtattagtcatttgatgaattatggggtttgtgaaattctgttttaagtaattttagtgtagtcccgtacgactttaggtaaattaaaaggtaggtatataaattttggtaggttttagttttcagacttccaccacatatgtggtttttgccctacatattttcgcagaaatcgaagacccttatggtccaggccagtttacaacttcatctttctacaaggacccagccaagaattgagcccaaacttcggtctaaaattataagcttctggacaggccgaatacggggaggcctaggcccatgctttctctgtccattatgtgggccgtaagattgccaacataggattgggctttaaattagttactgtccatcgtgctcatgcacagaatctccgacagtgctaaaatgcttccactccggttgctgttcaggagatctctctttcatcccggaactgtagacgtgtactagttctcttgataactgaacaaaaaacatcgaacattgatcgaattgattactgaaaatactggaaaaatctgggataaaactttcgccgaatgaaagggagtctgttttttatcgcctccattctatgcacttgcactgggggtgccaactgccaattccattttctgctgacacagtgaagaggaaaaggaaaaatctgccggctccacggcatccaaaatatccgcaccctgcaccccctttttgcattctgatatctgaatttgaaacatcacctcatcagctttagctctttctgacctctattatactaaaccattgtcataaaatgttcttctgttttttattttatttggaaagatcctgatcagaaaattatcttttcagttaattaatcctatgcctgccgaaccaaagaatatgtttcgggactcggacatgggagcattcagcatcgccttcctcgtaatcccgacactttctttcgttccggctgcgagaaggattttgttttgtttcatgtgttgacgagttgcagcaacattggagcaagtttaacggtatagccaactgccggctctaaatcatctatagtcaatttaatagctaatttataccatagttagctataaacatatactccctccgtttcgaaatgttagacaccattgactttttagtacatgtttgaccgtttatcttattcaaaaacttttgtgagatatgtaaaattatatgcctacataaaaatatatttaacaatgaatcaagtgataggaaaagaattaataattacttaaattttttgaataagacgaacggtcaaacatgtgataaaaagttaacagcgacaaacatttcgaaacggagggagtactcaaaatatttgacaccgttgactttttaagtacgtatttgaccattcgtcttatttaaaaaatttaagtaattatttattcttttcatatcatttgattcattattaaatatactttcatgtacacatatagttttacatatttcacaaaatttttttaataacgaacggtcaaacatatgctaaaaagtcaacggtgtccagcattttaaaacggagggagtaattaatatctggtcttgtattttagagtccgtgctatagctgattataaaactatagcgcccgctgcacctctctcctcttttatctcgtcaaaatgggttacctagtagcagcaccgtaaaatttgacttgtaaacgggggaagagagagaaggagagagagcacagcatggggcagcagcaaaatggcatgtgcgggggccacccgaggcagcagacgccatgtgacccctgtctctactcttctcaggcccaaactcctagctactcgctctcaannnaaaaaaaaaaaaaaaaaaaaaaaaaaaaaaaaactcctagctactctatgggctatggcgtactagccacttcagcagccaaaaattccatgctttcccacgagcatactgcaagccattgcaccaccgccgcctctcgaatggtaacaaacgggtttctaccgcaactttacaatctcaccgcgtgtgtttgttgccattcagccccaatcagaaaggttttcttgtcgtagtctatgggtgtgtttgtaaattagggactaaactttagtccctctcacaaaaatataagtctctatcttagaaacttatatttttgagcccctctctcccaaacaccctcatatatatatcttgcttctaaactgttaatactccaccatccgttataaaatataaacaatttttagtatagtgtcaagtcaaatatttatatatttaactattaattgcaaaagaataaaaaaatcaatcatatcaaattgatgttactagatttatcattaaacaaactatcacaatatgcgactctttttatttaaaacatcttacttttataaatgtcattggttaaagtagtatctcgaataccgtgtcgaagatcaaaagtgtttatattttaggacggaggaagtaataaagatgtaagaattttatctataaataaattatttgtaatagctcaaccaactagacatgcactattttgggccttctggatcaatattttcccaaccactccttttgcacatcgatatttgcatgttcaagcttgaaagacatatgatggtagggatgaaa

SEQ ID NO: 9411 - DNA, 17305 bp, Oryza sativa
ggccccggcggcgccgccacgcccatcgcctcctgcagccgcttcaccgccgccgtcgcccccgacccgcagaacagcagcgcgacgtcgccgcccgcggcgccgccggcccccacgcaccgcttgatgtagctcgccgccttcctcgccatcctcgtcgtcctgctccccacgtagctgtcctccgtgtgcgtgttccctacaagcatcgcatcgatcacctcgccatcgccatgaacgtcgtgatcgagctcgcatatcgcatgagatgagaagcgacatggtagatggtactgaccgtagaaggggaggacatggtggaggacgtagtcctcgacgtagcggaggccgcggccggaggcggtgtggtcggcgtagacgagggggcggcggccgaacggcgtgtcgaactcggcgccggcgccgacgagctgggacctgacccactccaccttctcctccgcctccgcgctccgctccgacttggctcggagcaggctcagcagcgtcgccgtcgacgtggccttggcggcggcggtggtcacgccggcctcgccgccgccgccgccgtccctggctgctccaagcgatggcatgcttagctttcttgcttgcttcaaatgcttacaaaatgctgtcaattgcgtctctctagtctctatatataggagatgtattctaatagctcgagtggacgtccacccgtttattgcatgtcaactaaatggctacgaaaaattttcaaaaaaattggcaagatagatcaatatgtaacactccacaaacatgcaagttaaaattcaacttctacaagttgtaacaaaaataacaaatttaactataaatatacatatagtaatttgagttttgtttgttatttttgttacaatttgtaccagttgaattttaacttgcatgtttgtggattgatacattacatattgatctatcttattcatattttttttttaatttttttcataactatttagttgacatgcaataaacgggtggacatccactcgagctgttaaaatagtttccctctatatataggagtatatgcacacaatgttatctactaatttagtaatttatgaatatcttttttggagactttgtgagcttgtatatcaagttactccaacatatatctcctgtttcatgtattgattcgaaatgaagatatgctcaaaattcaaagataatttattgagggatgttaatagaataatctatcatggtttcatgagatgacttatgggccggggattgcatggtaatgtgatttgcatgccatgtgtgttgccaaattgcagtcgtctatcgattgttagttctgccgatttgttgaattaactatagaccttgttgcatcagcttggcgaattttgtaaagtttttaagcgaaccaagtcgtaggtagttgtttgcatacttccatttggttggttttcagtgtagccgcatcgccatgaaatttcgtcaagtgattaattaccgacagtgccgccggctgtcaattcatccgtggataaatgtcgtcaaacaaatctaatttgtgttggaaagcaacaaaattggtgaatttctgggggctttatgcggcgaccgggatatgaattttaatctgagtagattggtcagatttgaggagacctaagcacaacacggcttgtaattttgtaagttatacccgctttgaaatttgctcatgcatttcagaaaatatatgaaaccagaaaagaaaagaaaagggcaatgcacaacaatctttattagcgggctctttccgttgtcacataagtaaatttggtgacgtaaacgagagagagatgagaaaaacaaaacatcgttgctatgcatgacatatggttagagtcgactcttagcatttattaaaagaatatttgttatatgggttggagaaaagggaaaaaaattagtaacaaatttttttggtgtattaatagttaaagatagtgttgtctcaattgttttagctaagagcctatcttcaccttaatttgtaactgccctaaggcaataggaggattatataagaacccaatgctaataacttgccgcaaccaattgagattgggccaatctattttgtccatagccagcgttgtttaggatcatggacgtcgtagaggcaggggagaaaatggtaaggaaatttccggttgtcatttttgatttgcaccgactgtttctgtttcagttggtattagtaattgttagtgtcggaaatggaaacgttaatgtcttccgaaaatggtagcggaaatgagatgatggtttttccgaccgttttatcagtaaccgtaattatccaataatttccatcaaaattccgaaatttccccaacagaccagccagcccaacccatcggaagcctatgaatgaaggaaacctggtaaatttgtagcccattaagaggaggaagtggccaagggaaacactgtaaccttaggacgtaccatatagtctttgctgaactttgattttctcaacttattgatgctgaagttagttgaattttgtttatattgttcaccaaacttattatcatatcattaataatcatataacggtgttatgtggagtataatgatgtaagaataaagttataaaatcatcttcatgcatagttaaatgtctgactatgccacgctccgatgtttccgacatgaatatttgacttccgagttccaaccaatatcagtagattccgttccaatgatcccgtttcctatataccaatattaccgatatcgttcagttctaccatttcgattcctttttgagaaaaaaatgaaaataaaaaatggtagaggatttctccgactgttttcatccctacgtagatgtccaaatcagggttttaaattttgaaattgctatgtctgccgggggcaccgaaattaccgaaatttcagaaatataggaaattttgaatttttttggctgaaattgtttgaaattttgactgatactgaatgaatttgaataaaatatggccaaattcacaaaaaaaaatgcaaaaaaccgaaaaattcgggcgagatatgagcttgccggtggtggggaggggggaaaaatttcgaaaaatttgaaacgaaatttcaaaccctggtccaaataaaacatccatcaatttttttaacatgtcaaaagagtcaaatcgtttcaggtatattcattccgctaacaaggagcaaccaggcaagagtgacaaagaaacattcaaagttgagattcaagataacttcactcagagggcggatctacctattaggcagggtgagtcgatcgaacaagctacgagcctacgacccttgtcgcccccacatcctcaagaccctctacccccttatagtagttattggttatcaaaataaggtataataaggtgtaaacatccaacagattattccgactcttcacaaagcacgcacatcgcaaacaatgattgagacagttatgcgattgaactataaatatgatatgtgttgtgttcaattctttttatcatgtgagcatatccgttctctgccccatctatatttgtctgcattgtataaaaaacataaaggattaacgtccaattaaccagatcatcaagcatgcatcgtcatgaatatatataggcattgatattggaaaccaattaacactcacgatacgcaacggataaaaaggctttggcgctctcaccaacctggtacacgtcgaaaaaaaaggcgctgatcgatcagcttgatgcaccaatcgcaccaacagattggcgtcaaacagaaattaccgagggcccttcattatattaacattcaacactcccagttcataacaaataagcatacttggtggagccagaagatatatgcaaagttagaatgcaactgtcatacatcagactttctgcataagatatctaggaaagttaagtaaacaatttatttcttacttagcaactgccaaagttccagtgaaatgtttagtgagggcagaacatgcaaataacaaacttcaggggaaaaaaaaattataattgtaagttcatattgcgagtttagtttactgctgttacagatacaaaaccggttacagctagcaggagcaggaaaggcttctatgatctacaaacattcttaagaatttctgagtttgaaacaggaaaccagggttgccggatcaaggaatcgaatcacttccatctccaacaccacccctgaatcaacatcttgaatcccttgatgttaagcaaactgcaattcgatgcaagtagagactctgccggcaatagggttggtggtgcttgctattctgccaacctgtttatgaatctcatgtcaattctccactttctttcatatctgggcattcatgcaacacagcatcgcaacatcctctgagagaaattgcaacctactggaatctgtagctctctttagtgttgcatgtggttcctctaatgaatggctactctgaagaatgctctcatgaaacatctgaagtgtgtcatctgatgaaacttcttgcgcagagttcttcaggtcttggagttgtccaatttttctttcaagctgtctaggagaggcgttgggacttgagatcagaattgtgtaaggaaaaaaaaatattcttgcacatgagtaagaaaaatgactcaatagtaccatgcccaaggaatatatgtatttggcaggtgagtatcaattgcaccatcactaacatgaaaaaaaaaagtaatgtcctgaatggctttgttagcgtcaaattctgcagttccaatttgtgtttctcccagatttctgcaaagcaaagaaataagatttaaaaagtacacaaaaatgtctacttcgattggttaaacattccatctaactgtacaagtatcataaaaggcaacctaacaaaattaacatggctaaagtaaaagacatttgaagtacttcaaagaggtcaattaaattgcagatgcattaattagacaggactcagtacctagctaggaaaataaacaaaatcaaacatttactaatttggttccatatcaacttgagccaatcttgttgcttataagataacatgattgggactttttacttatctttatctttttttttcaaaataatgccagttcagtttcagaatttctcatagaaaccattgcataaaaaatgtacatgaaactacgattaatcatggtaataattcaaccgtacttcaatttagacggcactataatgtatgaggaagatctccataggtcatttattagtttacaaaacagtgcatggatttccagcttcaattttccacctgtgtgctgacaaaatgcaggaaaaatctctatataaaatgtggagtaataggatcatgctgatgacttaacaattttagtaccaatttctgctttgtaagcactgagctcagctcatccgtgttgttactgattacattagtatttgtttatatgctatcgatggctgtttgcacgtgtgccacttatacttttttagtcttagaagttgttcgcatatattagtcttgtctaaaaaatatatcagattgactcaggaggttcaaggttttatttcaaaaattggttgagtaattttatatctctgcctaagatgtgacatagtttttggtataagatttacccttttatgcagatcagttgaaggcagcaagacagtgagttcatggacataaattggaattcgaatttgtgcgcataaattctgaattctaatgaaccaaagtaatgagactacttatcttcattttatccctccacatgactataagaactgaggaaatatctttttttcaataacttgctcttcttattctttaaagatagcgttctaagtgaggaagcccgcctatggagtttggtgggagctaagggactctccctgtttgtggaccccagctagggccttttcttttgttctttttggtgtgttaccgcccatgcagtgacttgttttgtggtggcgtgaattcttgtacttcttgctgttttttggcgtgtttgtacgcttttcttctattaatgcaatgatacgcagctctcttgcatattcgagaaaacaaacataacgttcgaaatgcataacattaaaagttcagtttacacaaggaaggagactaaggaattgattattcctttataaatttggtatagcgtttacctcaaggcaggagcagaagatgctggtgcctctttatcctttttctactacttgattctgtcctggataaatgattgcaaagaggcatggtcttacgtattgcacattgcaacttgtatatgcagccggactgtcaagtgtcaactgtgtgagagctcaaccaaatctcttgtgttctgtcttgtagaaaaaaaatgaatgtgctgtgctactgtcactgttctgcaagctgttgtacttcaatccaacgttagatagacatcggcctgagttgtgtagcaatggtagctgaatcaagtgaagtctgaactgctgtgcaattctggtgctctctagtttacagatccacatgtgtccaccaatagtaagagctataattttttgaaagggaaactattgagatcctccaaatggccgtttttatctccaaggtttcggatgaacaaaaaaagcagccaggaatttctacctacaccctggcaatggcaaaagcacaatgaatcagctccatcaaccgaaatcgctgattttgagctagtcaagaccaaaatacagattcctacatgcaattagcagaaacatatttgcacatcatctgcatttgaaaactcgaggaatatggagtttatgaagtactggtgagtagaggctttaaaaactttaaaagtataatcagtctatacttgattccttgccctcctattccaggtatcccttgaatcttcagccaaagctagtagcaagtataaaagaaccagcataaatctgatgcagtgatgctatccaattcacctcttctatgctctccttctattcagtagtatgtaaaacatacaagcatacacttgactgttttgaacttaaaacaaatcaatatagatgcctcaatttgtgggggaaaaaacataataacctgggaggtaaaacaaaatgaatgaaatgagagcagacagccatgctattaaattcaatgtagatggctgaatttgtggactgtatttccttcattttggttcatgacggcaaatatttcatatttcaattaatatggtttcaagtagaacgcaaactgcaccaatgtgttaattattgcctagttttagacttaccattggcagaatcagtgtggggcatcaaaatgtagacttaaccgtggaattacagcctgaaaattgaattgaacatgctggcaatgaactaaccttgataatgtatcacaaactgaattatttgaataaattccacagttctccgccaaccagtttaggcaaatgcgtatgtatacatagacttcaaccttatacaacaaaatacgaaacaagaatttttgctacgaatcacaataattcataccattagttagttcgtagatggaattgagcttatatggtgaagaagtaagatttgggagggtgtagagacctgaagcgcatggagtcgtgggggcgagcgcctgccttggatcttggccacggcggcgcccttgagctcacaggggctgcgaccctcgatcccagggcggaggcggacgcggacggggggaagcgccgtcggggcgggcgcgccctgaccttatcgatggtgacctccacgacggcgttggttttgctcctcccctaaccccccgcgcgcgcgccgcaaccggggtactcgcccggggaaggcggcggagagggcggccgccgctggaagagccccattgccgtgacgaggaggaggggatggcggcggacagggcggtgtgccggcgggtggccgcccgtgtgggcattcggtttcgtttattcgtttttgttttttttttaagaaattcgggtgtgtcgtttattcgtttattagaactcactcaagacggagggaataactgaagactgaggccttctttagtttccaaaaaaaaaaaaaatcacccaccacatcaaatgtttcggcacatgtacagagtattaaatgtggaaaaaaaaccagttatatagtttgcgtgtaaatgcaagacgaatcttttaagcctaattgcaccataatttgacaatatggtgttataataaacattttctactgagtcttaataaattcgttttacaattttcaggtggaatttataatttgttttgttattaaacaacatttaatacttcaaatatgtgtccatatatccgatgtgacacccagaacaaaaaattttgctaactaaaccgggcctgaaccgataagtacaatagttggctatactacgggtttcgataagtactctatacagtttttaaatctaatagaaaaaatacccgtgcgttgcaacttgtaaaaatatttttggatcgctatacattttactctttggttttggactaaaatctcattccttacttactttccagtcccatcctagcccgctaccttcttttgcttggcatgtctctctttgacgcaaccattaagtggagctgtatgtccagctcgcaaaccggcggcatgctggctagaggcagagcctaaaggagcacacgctactgaaaagggtgaggtgcagtaatcggaataggacagcactagcgagatgcgacgacgcggtcgtcaggactgaagaatgcgcgtgcatcgcaaatagggattagcgcgcaagcggcgggactggaggcggcggctgcatcggtcggcaggtttgctcttgttaattgttggacattgatggctataagggctgttgggctttccgtcatatttggctaaccgatgggtataaccgaataaaatttggttagttgagtatgaagaggtctcggttccaattagttcagtatcggtctttttttttgacccctgcatgtgggaggtgagagagaagacaggataaattttactctaaccttgagtggctgatatatgcctcctcttactcaaagataagaggagcttgttctcggtggtggcggatagggattgagcactttgaaaaaaaacccctcaaaatttgtactttctccattacatataagtcgttttgacttttttttatagtcaaacgtatttaagtttgatttgactaagatataggaaaatatatttgcatttttaacataaaataaatacactatgaaaatatattcaatgttagatttaataaaactaatttggcattataaatatcgctaattttttctataaacttggtcatactttaaaagtttgactagaaaaaaaaaatcaaagctatttataataggaaacggagggagtatattacactgaggtccaccgcagctatctctcgccataaatacatgatccaatgactgcgagcgagggggcgaaccctaaaatcggcggcaccacgtggtagggtttttcgccctagaacgagccttggattcgtggattatgagatggcacaagaaaaaagtcgacaacagtggcagagctggcgatgttatcgagcctgtgcagctaatagtgtttttcgatgatcaactaattttagaacgtaggtggttattcttattggaggtggggcccaagcgatggctcgacctaccttggagatgcctccaccgccattgatcaaggggaaacaagatgcctaaataggatgtcatgcatgtttagatagtgaggtggaggatagaaaggaggatatacgagatttctaccaagcaaagcaataagattatttttatttttcctggtagaattgctaccgacatgtggatccactaagttttaataccacataagcaccatgtagctgccacaacttatgatgaagaccatgttagcgtgtcgtatacgcacaacatctagcgaaatcaccaataataccgttctgaaagtcgttttacaccagttttaaatagttgaagaaatcaatataccgattttttgattgaggaatatagatcagatttgacatatatgaaacaaattgggccttttccgagtctgtttgtactcaaatccattttgcaggcccaaacggtataatctcagcatgcttaactgggcctcgttgactccaataatgggcctaatggttgttttggtccagtttttaaagtctgttcacttttgcgaaattaatttagttttgtaactggagatgaactattttaattaagtttaaagttggccaaatattggattttaaagttaaagccggttattctgaaaggataattctttagatacctcaaatgtacttttgcgagattttttaatattactagctaaaggcccgtacgtttcaacgaatattataagagataaaagtaaaatcaaaagcaaacattataagtttatagcatagttagttgattaggcatataatgatatattaaaagcaaaagcattcatgtttgtgaccttataaccccacatatcagcttgtaacatcggaggcagaactggaatatcatcattagtattatttaaagtagtataaatttgtggttggagttggagggtagtcgaaattgataatttctcctagagttgtaagcggttatttgtattatgtttttgtttttttaataaagatgattgttgttgttttcacttaaaatctgaattcatgcaagttccctctcgtgacaacaacaacatcacggtcgcttttacgagctgagctatcatctgttccaatcacagtgatactgatacacactgtactgacactgacagtatgaaatcgagctagagctttagctccctttcgatgacagcgccctggcaacagattaccatcagtgtatactcgcaaagtcacaatcacaatcagttgctgtttgtcttagctagctagcttctcacttaattaattaactaacagccgccttctcggctggagttcttctagatatacttacatgcatttatacgtcgtctagttagtatatacaccctaaccaaggacctaattaaaccatcattcattagttgtacaaatcagatcacatatcacaatcgcataccgtgttgtgacagaaagctatacatatactccctcgtttctaaatatttgacgccgttgacttttttaaatatatttggtcattcgtcttattaaaaaattaagtaattattaatttttttcttatcatttgattcattgttaaatatactttcatgtatacatatagttttacatattacacaaatttttttgaataagacgaacggtcaaatatgtgttaaaaagtcaacggtattaaacatagaaatagaaacagagggagcaagatgtaacgacatgatccatttttggtgatggctttcggcatggtgatcaatttagtcctccgtttatttgagcctattttcttgctagggcttttagtagggagtatattcattaatggtgcacacaagtttccactggtggagaaagcgtttgtagtcccggttcgtaatccccctttagtcccggttttcaaaccgggactaccaatccgggactaaagatcgctatctttagtcccgggtgaaataaccgggactaaagatcgagctgaccttttttttgcatggccctgttgctgcatggtttatatatatatatatatgtatatatatatatatgtatatatatatatatatgtatatatatatatgtatatatatatatgtatgtatatatatatatatgtatgtatgtatatatatatatatgaccaaaatatatatttacattaaagaaaatgtgtacatacatatagaaaaatagacatatattaattacaatccattatgatgtcctagctagctacgatttcgacgtagtagtagtcgttatctcagaagctaaggacctatgaattgtatttccgtcgtagtagaattcacccttgggatcaaggatttgttcgttgatgaatcccatgagttgttcttgaaccgccacgataaattccttgtgtgtgatcaggttatccctcatacgaataaactatatgaatgtatgaaattaattagtaattaaacaacaaatcgatacgtacgcaatgaaattttgaatttatttgtacgtacatcgagctctcttgtggtgatgatttggtctgcaaggcagtggcaatactcgcacacgtagtagccgcacaagttagttccctgcttttgctttgtgcactataaataaatgacaaacgatgagagatctaattaatatacacttgtatgtatttgaattggagattgaatataaatgtagagcatgtgtactcacaggaaaattgaacttctgcctaagtctttctctccatttgtcgcggaccaaatgacggaaccgataccaagccctacatggagtttaaagctatgattcgtagtagcaattaattataacaagattcttaattaacataggaacttatgacagtacctatctataagttcgaaaaccttgtcaaacgtagactcttttttatccattgagtcatatacgttgacggtgcaggcctccaggtcaaagagtaaaaggacccagtggaatctgcaatgtgcgtgggatgcattacatatgaaacacttagcatgttcgtacgggaatgaaatttgttataggaagacactaaaaactctgtgttgtacggcaatagtatgaacgtcttgtaatgctgtgccttcagcagatggacgagattgtcctctgtggcttgcggatactggtcgagcattgcgacgtttactttccgagggtcgatgaatccagtatcaaaaaccccccgccgtcgggccctttgaatctccattctacaacgataaaaggaagtatatattatatatagtctacttatatataaggacctaattaattaaaggaaacgtaataagaaatctaactgaacgatacttacaaaatccagcaactcataatagagacgtcgagggcgtccagctggtatagttcgtagatacccttgaaattgatccagagaatgtcatctccttgcaagaagtccgtgtccctgatcctcgctccgatcatctctctactggtggcgctcatctccatgtatagttgatggaacttgtacatttgtgtgggtagggactacagctgctcaggcttgacaagcggtttaccgagttcgtacatgtatttcacttccgccttttcgattggtgcgcctcgtagcaattgacccgtagttagcccggtgtcattaataaattcttgtattccaaaatcttcaccggtcactaacggctcgatctcttggtttggttgctctccaagctgagggactggtttggactttccagaagatgctttcttaagtgttcgctcatagtccgatagctttatggcctccttggcaggtgcagacatacccctgaagaatttcctggcactcgggtctataggaatcttcttttctggacttcgaggcttcaattgtctcctgacttctgatgccacataagcgtcaagctcctcttgcgtgcaatcgtaccccaggtccttgttttttgcggcgtcaacttttgccttcttcgttgcccttgtgggggcaggcggtggagcttggggggcccttgacttggaaggtgccggacgaggagcttgcggaggagtctgtgtaggagcctgaggaggagtcggtgaaggagcctgaggaggagtcggtgaaggagcctgaggtggagacggtgctggagcatgaggaggagacggtgcaggagcctgaggaggagatggcggagccggaggagatggtgcatgagacgccgcttgtcgcccagggaggatgatgtaccgcttgcgccatagtataatggcgtggcttgtgtctcgtagatgcgtctcaccgtctcctccaaggtaatccaactcgaggtcctcgtatgtgccttccaccaactcaatttcgaccttggagtatcctgctagaatcggcctgcagtggtaagtacctgaagggtccgttggtatggccatgcccgacgccaccttcacgtggtgagaggttatttattagtaatcaacatttataagcagcaacttgcggaatggacaaatctaaaatctataaactacgagcttacctttattgataagttcttgaagggaatatgcagctcacatggtgtccgctgagtgatgtcatcaacggggcaggtggtttcgtcctgggtttgcatagcgtccatgctctgtgatcctacctgccccgttgaggcgcagctgctacgattgcctgaagggctcaccattgcaggtggaatggtcggctggggatcatgggaccgatgtgcggccatgcgttcatcaacctttcttgccacctctcttgcatgctgagctcgtagctcgataccctgtactcaagatctgcaatcttcgcctcggtatctctcttgctcctcattcgactcctatacgtgtggatgtcctccttgaatccaatcttccaaggaatcacccctttccctcgtgttcgtcctggatgctctagagtctgcagggcgagtgacagctcgtccttctctctgtcgggtcggaacgtgccctgagaagaggcttccactgtgtccattagtcgacgcgcagcctcgcgtatctgatcgctgaagaccagggagccatcaactgggttgagcgttccaccgtgagcatagtaccagaacttcgatcgatccggccatttagcggtggccggttcgatacccctctcaagcaagcttgtttccatctcctcccactttggcatcgcgacgctatagccgcctgaccccaagtggtgatgatacttcttcttggtggcattttttttgtttctttccatcatcgcctgcccttgttgacctgtcttatatgcaacgaactcgtcccagtgatcccttagctttgggaatgtgtcgaagttcggtgtctgcccctttaggatatatttctggtatagatctcccttgaagctctgaaactgttctaccattttctttagagtccaccttttcactgtgtcctctatacccgcgggaagggtgaatgtctcgagcattgtggtccacaacatctctttctctgaatctaggacaaagctctcatgatctctgcgtgcccttgttctgcgctagtacaccgtactgacaggcacgttatcccgcacaacccaaccgctgtgtcgtacgtagttcttggctgcttccgccggggcactaggtcggccgtcttcgtccacttccgttatgatgtgctgaccctctagcttctttgcggcacctcgttgcccgcgtgccctcttctgtccagcaaagggttgacttccactagcctcctcctcctggttcccctccacatccctctccacgttcccctcctggttcccctctgcatccctctccacgttcccttcctcgttcaagtactggtttggatcctcgttcccctcttcttcgttccagtactggctgcttccctccgcgattgtatcgtacaatatctgttcctcatcacgatcagccatctgttcatacaagacatagttggtaagtctataggtcatttttgctttaacaatcttatatgctaacaatcatatatgctaagtctaacttgcgtatattagaaccctacacaatcttatatgctaagtcttattacaaatctaataatcttatattaaaactctaataatcttatattaaaactcaaataatattgtattagaactctaatagtcaactatgctaagtctaagtgtcgtatattaggaccctagacaataattatatactaagtcttattacacaaatctaataatcttatattaaaactataataatcttatattaaaactcaaataatattgtattaaaactctaatagtcaactatgctaagtctaagtgtcgtatattaggaccctagacaataattatatactaagtctaattacaaatctaataatcttatattaaaactctaataatattgtattaaaactctaatagtcaactatgctaagtctaagtatcgtatattaggaccctagacaataattatatactaagtctaattacaaatctaataatcttatattaaaactctaataatcttgtattagaactatgctaactcaaacaatcttatatgctaagtcttattacaaatctaataatcttatactatgctaagtctaagtgtcgtatattaggaccctatgtaatcatatatgctaagtcgtctaagtgtcgtacattacaaacctagataatcatatatgctaagtctaagtgtcatatattaaatctaatagtcttaattgcattaaaaatctaacaatcatatatttacatcacttgcctgcgcgaattccttcgagggttagctaccactccggcttgagggccgacgacgacaacgtcttttccgcaacatacaaaaagatgtattaggataaacgcaaagtaacatatattgtatttcacgtttgcgttctcgttaagttcacgtttcgttcacctacgttcgttcgttcacgtgcgttcacgttaatgtacgttaagttcatgttcgtgttcttgttaacttcacttttcgttcacgcacgttcgttcgtttacgtacgttcacatacaacgttaagttcatgttcgttcacgttcacgttaggttcacgttcgttcacgttcacgtacgttcgttcgttcacgtacgtttcgttcgttcacgttctttcacgttctcgttcacgttcgttcgttcgttcacgttcacgtacgtttcgtccgttcacgatcgttcttcgttcgttcacgtggcggcagcggagcggcggcgtggcgccgcggctgtggcttggcgcggcggcggcgtggcgccggcggcggcgtggcggcgcggcatcggcgtggcgcggcggcggaccccgaacacgactccgccgcgccgacgatgccgaacccgaccttgatgcggccgccaccggcgacgacattggcggcggcgtctctcaccccagagatgcggcggcggaggaggcggcggaggcggcgacgacgacgcgcgcgagacaacggctagatacgacggcggcgtcggcgcggggatgtcctaggcagtggcggcgaaggagaagccgagagagattgatcgg

SEQ ID NO: 9412 - DNA, 40098 bp, Oryza sativa
aggagcgcagagcacgtttgggggaagatggcgcggtcatgggaggcggtgtcggtggacgcggcgccatgccgcgtcgtgctcctcctcaccgtaccatggccgccgagagagaggggggttagcaagcctcctccacactaccactgttgccaccaccgccacctcgcccatcctccgcgccgccgacgggatctccgtgcctagcctcggcgccgctaccggatatccgccgtgctgctgtcgcggctgccaccgccacagctctactgtcgcggctgccactgccgccactaccgaacgccgccgccgtgggatggcaatgccgccgccgccggatgccgacgccgctcgctctctttgtccctgcgcgccaccggccgaaggggaagaaggggagagaaagagagagaagggagagagggaggaggaaggtctaacatgtggaccccacatgtcagtaggcctacatttctttttgtgtgaatgactaatgggtcccacgcatattttttatttctaccgtcacgtaggtgccacatcaactccacatgtaacgaagactcggtcaatactgccacgtaggcaccacgtggcaccacgttagcaaaaccgcctcccaaaaccgtctagggagtcaaattgcaccggttttaggagtttgggggtcgagatatccggtattgtaatttagggtcatggattagatttcgatcacatttgagagtcatgaagtgaacttattcctaattttgatccatgagctatgacgtatgggtgccaccgtctcttttttttttaactgtaatatgtaatgctccactctagtcagcacgccgtgcgaaagtgttgtacgataaaatcatcgtccaaacgataggcttgttcattttgttgtcaattttaaccttatcaaactttggaaataccaaattttgatatgttttgatattgtcaaattttgttagcgttggatgtatttagtttgatatactttttaaaattttgatagtgtttttataagaggaaagtttcaaaactatcaaatcatggtaggatggcattggtagaatacttttagcttgttatcttaccaaaatttagtaataatatcaaatgatggtagggttgaaacttgaaagtggcaataaaagtgaacaggccttatgacttgatttacaccaatttactcatttttaatagttgaggacactctattcccgattcggttttgtgattaagggatgtttcagtggactttttccagcatgatttggtccatccaaactaaggcgaaccgaccatgttccgggatgaatttggcctcacaaatggatcatctaatattatcaatataataatgatctttcctctaaaaaaaatggatcatcttatagcattagattatggtctggcccgtatgcacataacattttgcagcatcacagggaagtaggcttgtccaaaatgaacacggcctgagctgagccaggccacaaacacgtaaataaaattcaaaaagtttgtagaaattcaatgtttcatggtttaatcagcagaaaactccaggtacgttctcatccacagatcaacaaacatgcccaaaatacattacaagatgtgcataccattaaacatttgaggcggagcaatatttacagaccttggatatgctattgctaaaggttagcagattcatcatccctgagttaatgaatctgagttaaccaaagagtccaaaagacatagcatagcatagttggtatgttaggtccaaccagattacctgcacttctaaatccctttttagggccctgcaattacaaattctgactaggccattttgtcagttctaaaccgtccctatgacgaaaactgacgtgatacctgtagtcagaatagggcaccattgtcacagtaacagcaacttaagcaccaacactctgaatagtaatgagtagtacatccatggacagcccaattcttaaaccctactcgaaactgaaacctgccaaagaaaatgaagggtaagttcgcagtctgagcagcaactaaattgttcagttacttgacaagaaacttaaagtaccggaacatactacaaatccacaaaaaaaaaaatcccatgttcaacaatttgtttcatataacactatgctttaaggcaaaatgtttcatagaacatcatatttctgcaaagtatccatgccattatagtagtatatggtagccccgaattacacattcctaggctacaatgtgagatggcaaagatgataatgtgaatcccagtagcagtcataaaacacatgtctgccggtaaatacatttctcgacttctctttccccggccgcaggctgtggcagagagtcagtaaaggtctttcccagcagacagttagccagcaaaggcaacttttcctggcagaacgagcgtcctaaacctatgttatggcgcagcaaccaacgcttgaaaataagttcaatacagtgcattactgctcacagtcattaattatcaaatgcagaaagaaagaaaaattttgctgctgtttagaattaaacagcgagccaataaattatcagcacaagtaagatattcaaaactattcgacctatgagcttaccgcttatacaatgtacgtacttcacaataaatagatactatacagctttatgcatactatctgccaacataacataaatcattagattgagtttcacgcttccaccaaatgcagggcatgatttttcattttctttacaattcggtactctagtcttatctcttgatcttctgacaaagtaggagtttttacactatttgctttctttcacatatatgaagttgaaggaaaaatccagaaatatagaaagaatgaatagtgtcaatagttatcttacggatattaaatgtagataggaacttcaaaactttgataactctctcttcaatcgctccacattttactaccactaacttaagatgttctgatattgcagatgacttcttcgtttggatataacttcctttcatttccaccttatttttagtcccctgaaataataacagtaacaaaataacaataaaacatttggccaagataaatccgcgttatgtaataattgtaaccaggaagcaattttccatttagaatatataccatgccacgaaacttgagagtgagcttctctagaataggtgagtgctgaaggatgcagctaagtgcctcaaagtcgatatccgcagattgacaaagtcttcaacctgctaaatatagggcattgctgccagtacctattggaattaaactgcacaagatgcaaacagaaaatatcaactaatactcactgtaaacagatggttaaagatattacatgtggtggcagtgcattggaagtgataaatgcataacatacatcctgtgcttgtaatgctcgtgaccgtgacagaacaatcaacaccaacgtcttcgcatgtgataaagcttgcggaagcgtgcagttgttactatcatcatatcttggaggagtattccaatctccaaattcaccagtgactccaacaaaagcctcggttaataacggcataccctcaaacacaggattccggttcatactaaaacggttttgctatatttgtgtcgccacaaaatctcatcgattatagtcgatttttcagctctctgatttgctttagattagcactggatattatgatttgcgtatgcgttgtttgagatctgcgcccgactacctgcaatctatcatcaatgtattactgatccagagcaaacacaaagtaacgtgctcaactgatcgatgtattactgcccaaggtcctatcattaacgtgttcaactgagcaaacaggcaactttattgctgtaattatatatttatacaaatttacacagtagttacaccccacttacatatgtaattttgaacttacatatgtaattttaggacttacattgtaaatacactaaaattacatatgtaatttagggacttacaatgtaaatacatgctgactatattttggtgaaaaatatggcgccataaatatagttactccctattaaaaaacatacgaagtgagaggagattcggtgcacaaatatgagtgtggaaagtacggctgaaaatgcaacggaagatgttgaggtgtttcaaggatcgggaagagatcttcttggcatcaaccaggttacagaaggatatatcaagatgctccagcaccggacagctcgagaaatcaaggaaactgtgcatcagcttcacaccagtaagctgtagcttctccaaatgccgggagacgatggccaggttatccagcgctagttggacgccactgggagcgagtcgcagctgcagcacacgggcctggcacatcaccgcggcatggcggaaccagcggtccacgcggcgggcgtcggcggcgaagtcggacagcccgcccaaactgaacctgcactcgtcgatcggcgcgccgcgcccgcggtggagcagaaggcggtgcacgaagtacccgaactcctgcatcgtcacctccttgtcccagttggtgatgtgcagtctcgccaccgacttccagaggtggcgccagcgccgcgcgagcacgcacgtgagcacggcctccggcgccgggaggaaaccgaggatgtgttggacgacaccatccggcagatccctatcctatcgacgccgccgccgccgccgccgctggcgctcggacgtggggctttccccggaggcattccgtcgaacaggcggcgtgcgtcggggccacaccgcaagaaacagctggaactcacaatggaggatgcgagagagagagagagagagatggaggcctcgccgtcggcagcctcgggcgccgcatcggagcaggagtcgaggcgaagtggtccaaccctagtgctgtgaggattggggagtgaagcatcggccctcgcggctggctgggtagaggagccgagcatgaaagtcagaacacgggctgggccgtcacggcccattggactgtgggctctgagcccattatgaggcccatatccacagatatttccggcctaatttctgtggaataagttcatctgagatcccttaacttgtcaacgaattcaattttcatccttcaaccggaaaaccagacacaacgtgtccctcaactgtcaaaaccggtgcaatataggtctcatggcggtttagacgatggttcctagtggctaatttgactcggtcttcatctgacgtggcagtgacgtggtgcttacgtaggtacgtggcaatttgattttggaaaataataaaatttgtgggtccatatatcagttacactaaaaattaatttaaaaatggtgaaacccacgtaagccacacatgtcatcctcaccacctcctcttcttcctcctccctccccaactcccctttcttcatctctctctcccctctcctccctacaggcgcgagtgaggactgaggaggggtggcactgcgcggcccatgtgggccatgatggacaactcggtgcgcttggaccagcgagtgccaccggagccgtgcgtgacattctgccttgctgagcccccacgtgtctcccacctctccgtcccccggccttaagtcccacacggaagtcgcctgcgtcgtcttcaactctcttgccggctagccgctccacctcccgaaggacccggacaccgtcggcgaggaggccggcgaggcgtgcggggagcgaggaggcagagcctggcgatggcggtgcgccatgggtgggtcgccgactcgccgtgacgctcgcctgcccaccactccacttcgcccgcccctccgctccattccgccccgccgcgacacatgcccgcccctccatctgctctgcccacggcccgcggccgctcggtcctccctccatttgctcttcccatggcccgcggccgctttgccccgccgcgacgctcaatttgattgtagcagccctgaaacttgcttatttctttctgaatgttaccctaacggtgctcaagagagtttgcattcctatcagactcaaaatcacggttagcatggtagtggtctgtgatcctttgccaatatgacatccctggttgctcattgccaataataggatctaagctaatgctctgccatgaaatgcacaattaaaagtcctccttacgagtatagttgctttatcttttggctgatccttttgcaccatttcttgaagtatgaagatcttcatttggcattagcacttcgacatcagtgtcctcggacatcatgcgcacaaaggaatcacctccacttgccatttcaatctagtcactgcaataaatatataaattgatggcctttctaatcgatctcagaaacatcaacaaatgattgtaatgtacgtcagattatactgtttataacatgtatttatttaggatatatattggttctgcagtattaacgactcagtacaattgtacaaacagttggtcattctgaagaaatttaggacacttgtacaagattagtgtctgatatatcctagtttactgaatgtgaactgcttatatatcatgattacgtatgtatggttgtacgtagaattcagataacacttacaaatctgaattttgttagttctgcaccccctccattgagtcagtgttatctgaataacagaagctttcacgttttagatcggtattaaacaatacatagatcacataaaatttttggagcaagagatgcaatataattaaaatagactaatactccctctgttttacaatgtaagtcattctagcatttcccacattcatattgatgttaatgaatctagacatatatatctatctagattcattaacatcaatataaatatgagaaatgctagaatgacttacattgtgaaatggaggaagtagcaaataacaaatgctcatatactgtacactgctgccgctttttttttatgcatcagttcagtaaaaaaaaccttgtttttcagtttctagaatattgacccaacctgacactaactgatgcaattatcgatgagtaatgcacatcggcaaaagaaggttgatttcagcatattaaaggccggtctgaccgtcttgtggccgatcagaccgctactatgtggccggtcggaccgcccctgatcaggccgagacagtgaatacataagtgattgtgtgtgtgtgatgaaaatgtgagcaccagtgaaaatacaatgacctaatgtggcaatttaatcatctctttgctaggtcattacccccttgatagtacgacgaaactaacaaataaactagcaaatttgatcgcccttcacctcgatcaattttaaaactaaaacactagttttaccgttttcttttcttcgcttcgtgccatcaaattttaatccatcgatagtcatccatgtgcatacatgacgtggacctaacttaaaatatatctcaatagcaacggttagtccacaattagcacttgtcattaattaccaaaattaacaacggaggcctagatgcttcactgtcgaggaggacgaggctggcgaggagcagatccatcgtcactatcaccatcttcgtctgccgaagagactaaagaggggcttggagaaaaaggggagaaatatgaggaagaagaaagggttacagaggctgacatatgggtcccactatcataaactcagaatagtgagggtgaatggagaggctattggagtaaacaataagtttaacttgcaaaattagatagagagttagccaaataaatatttagagtcaaatttggagagactgttggagagtagtattggctcacatggcacattaaccatgatagggtgaatgaagaggctattggagtaaacaacgaatttgacttgccaaattagatagagagttggccaaataggcattttgagagtggtattacttgacgtagcacattgaccatggtcaaaagcactaagtcagccaaaaagttaggaatatttcgtggaaccgacatatgtcatcctcactctccctcacttgttcatccttctctctcctgtctctctcctccctttttccctttggcagtgacgagggagcttgggctatcgaccacgacggtagcaaccagctaacctcgacaacagtggcaacgaccgagatggcagcttgcggaagccgcgggtgaacatgaggagctggtgcagggtagatcatggtccagccacgccacctcctccatggccgcaatctgggagtcccatttctccgccttcctcttcatgctcatcgtcccctcaactccatccagttcggcttctcccccaagacgccatcctctctatctcaccctctttcagcggggaagaaacggggcagagaaaggcgacaacggctatggggttaccggctggcgacgcatccaaagctcaggtagacgaggtggcacccaatccaccgcgatccagatctaggaggcaaagaggcagagtggtgtagcgaggtggcacccaatccaccacgatccagatctaggatgcaaataggttgcatggtgtggagagaaggacgccctccatgagctcgattgccgaatctattagggagggggtcgccggtcccgcggccatggctgacgggcgggagagaagggaccgacgcggggagaagagacgggcggcacggcccatgattatgtgcatccaaactaagcgaactgacttatgacttatggcctggcccgtatgcacatacgagattcctaattggcgcgtacgcaccccgggcgcgcacttccggcccacagcccacgcggccgtcgatgctggtacgatcataatttttttttctcgtgacgctttttctttaagtaacataactaactatattagttaaggataatgatataattaaagaaagatttttttctttttgagagattttttttactaataggttgagaatttgtaagttacatttgaaaatttttgacttaaaatttaaactttgaagttaaattttaaaaactttcaactcagatttgaaaactttcaattcgagatttaaaaattttcaactttcatctaaaattttaaaaaaactttcgacttagatttgaaaactttcaactcaagatttgaaaactttcaactttaatctcaaatttgaaaaactttcaacttaaattcgaaaactttcaacccagatttaaaaactttcaactcaagatttaaaaactttcaactttcatctcaaatttgaaaaactttcaaacaagatttgaaaactttcaactcgagatttgaatacttgcaaatcagatttggaaatttttaagttaagatttggaaatttttaagtcaagatgtaaaaactttcaactcaaaacattcgaaaaaatattcgtgctaaaaagatttaaaaaataatcagaaaaaaccgaaaaaaccgaaaaaaaatcatcaaaaaaaggaaaaaaaatagcgtggggagccagcgcgcatgccagcaacattgctggcgcgcacgcgcggactagcaacacccatgcacataaattattttggagcatcacagcaagtagacttgccgaaatgaagacggcctgagctgagccaggccaaaaacatacaaaaaaaaatccgaaagttgatagaaattaaatgtttcatggtttaatctgcagaaaattccaggtcacgttctcatccataactaaagaaacatctcgcacagcgacatgggctccacagattgacgagcatgccaaaatacattacatcatttgtcccaaaatataagaaccaagacaagacaacttcgaatatggacaagaatatcacatatagtactataggtttttatattttgggatagagggtatcaaatgtgcatactactcccctcattaaacatttcaggcggagcaatattgacagagccagctatgctcaaggtagcagattcatatcttcccagagagaatgaatccgagttaaactagagtccaaaagacatagcatagaatagttgggtggtatataaggcctaactagattacctacacttccacatcccttttagggccctgcaattacaaattctgactaggtcatttcgtcagttctaaaccgtccctacgggctatggctggaactgacatgatacctacagacagaacacggcaccctcgtcagtcactgcaaattaagaaccaaccctctgaatggtgatagagtagtagatccatggacagctaaacttttaaacgctactcgaaactgaaacctgtcaatgaaaatgcagggtaagttaaaagtttgagcatcatctgcagcaattacaatgttcagttacttgaaaaaaaattaaatactagagcataccacacaatgagttaatttcagaaatcccatgctcagcaatttgtttcatataacccaatggtttaaaggcttttttttttaaaaaaaaaacagcatatctatgaatgtgcatgtgtattactcctacatataaacaagataactcaaggaggtgaccaaatgcaaaatcaactaacatactactatgaaggtaagcacttcactggccattcatgtgaatgcagttagcctgagtatatgaggtaagccaccaaaaaagattggacaaaaaaaaatattaaaagcagaaagacagacaatccttctattgttcaaactaataatcaacgagccaattatcagaacaagtcaaatattttaaactatttgacagatcaatatgtaaatgcacttcatgataagtaaacctcatatagctttaggcgtaccatctgccaacataatggaatagaatgatttccccactcccaccaaatacagtgcaggattttcaatagcttttcaatagaactcctatatcttgattttctatcaaatcaggaatgcaactagctttctttcatgcatacgaaagctgaaggcaattttcagaaatatagaaagaatgaatagtgttgctagttagcttacgaatactgaatgcagagaggaacttcaaaactttgataactaaatcatcaatctcatcaaatctgactacaactatcttaagatattctgatattgcagatgacctatccattcgactatagcttcctttcatttccaccctatccggtccatgtccctgcaataataacagcaacaaaaataaaaataaaacaattgaccaagataaatcagtgttatgtaaaaattgtaacgaggaagtgattttccatttagaacacacaccatgcgatgaaactgaagagtgagattctctagaactggtgagtgtcgaaggatgcaactaacagcttcaaagtcaagaacagcagatgcgcatgcactgattaacaaagtcttcaacttgctaaatgtagggcaccgttgccagtacatttcgaaattaaactggacaaaaagcaaacagaaaaagattaaccaatactcacagtaaacatgtggtctaagaatgcacatgtggaggcagtgcatgagaaggcataagtgcataacatacatcttgttcctgaactaacaacaccaacttcttggcctgtgataaagcttccggacggtataccctcaaacacaggagactggttcatataattaactagaccaagtgagaggagattcggcgcataaatgtgtgtgtggaaagtatcgctgaaattgcaaccggagatgtttaggtgttttatggatagggaagagatcttcctggcattggaatcagacaagtcgcaaccagcaatctctagatgttgcagcaccggacagctcgagaaatcaaggaaattgtgcatcaatttgacaccataaagatctagcttttgcaagtgccgggagacgacaggcaggttttctagctcgagctcggatcccctgctcacacggatatccagccgtagcacccgggcctggcacatcactgcatgccggaaccagcggttcacgcggagggtgtcccggtcggacagctcggcgagatcgagctcgaattcgtcgataggagcgcgcccgcggcggagcaggaggtggtgcacgaaataccggaactcctccatgggcaccaccttcctccagtcccagttggtgatgcgcaaggccgcgacggacttccagaggtggcgccagcgccgcgcgagcacgcaggtccgcacggcctcatgcggcgggaggaagccgaggatgtgttggaggacaccatccggcagaccccctatcctatcgccgccggtcggaggtggggcttcccccggaggcattccgtcgaacaggcggcgtgcgtcgaggctgcagcgcgagcagcaaatagcttggaactcacaatggaggatgcgagcaagaagagatggaggcctcgcagactcgcagtcggcagcctcggccgccgcaccggaggaggagagtcgatcgacgccaagttctccaaaccctactgctgtggggattggggagtgaagcaccatcgacccccgcagctggctggagctgtggagcatggaagaataaactcgagtgagacgtaaagtacggggaataagttcactttaggtccctcatcccgtcaagttttaaaatccgcactaaaccgaaataccagaaaatcttagacctccaagttgcaaagccagattaaatttgctcctccagcagcagtgtagatgtctggattcactgatgtggcaagttgacccggtccgctcgtatcgagtaggtcgactaggtgcttacatggcaaaaacaaaaatgggtcctacatgtcatgtcatccttacttttctcccatcttctctctccttcctctcagtctctctctttccttttctcttcatccatcacgcaagagatgggagtgtcaccgagcggcagggaggagcggcggccggcgggagaggagaaaggtggttgcagcgtcaccgaggagtgggaaggggatgcgggccggtgggagaggggcaaggcggctgcagccctctcatattgggattgagatcctctgcagtcaaatgtacggtgtctttatcactgacatgtgggcttcgactgtagagtattttgatcccttgtgttgtggggagtcgcctatgatcgcagcgctcagcacgacactgatgcatgtaatcttgtagctggtataatctaatttccatttttcataaaaaaataaggcttgacttgtgttgtgttcacgaggagttcggatcgtagaaggagtatctaactgtattttcagttcttgcatcaattaagtcatagctgcaagatcgctcaggtcaatcgtgggatgacgcaattcagtaggatctgggcgggttttgtggatctttttcaattgtaacaaaatcctggagtatggagtattataatagaaggaaccgagaaaatgctgcaagttttacgcagcgccaaatactctatctctgttattcttcagttctccagtttactgttgtgaaacctataagtgtcagaaaacaaagtgaggctgcgcatgagaattttgagtgttaggttagccaaaccaaatcaaattacaacaagtggtatccgagcggttcatcattgattctgaggctatgtcgaccgacgatcatagtcgaaacaccccactgcggcggcgtggaagattggaggcggaagtggcaatgagggtgaagggtagatcgttatgcagccggtgccacgggaggctggcgtgccactatgctaccctaccctcacgagaacaaactatgcagattgggcgctactgatgcgggtgaattttgcaggcacaaggcctgtgagctgccatcgacccggggtatgccaagttcaggaaggaccggcaaacaatggcggcccttctccaagccgttcccaaggaaatgttgtgccccctatcaaagaaggacaatgccaaggaagtatgggacgcgatcaagacgatgagcgtcggtgtggatcatgtttgagaagtgcgcgagcaggcattgcagtctcagtacgaggccatccagttcaaggacggcgagacgcggaggatttcgcccttagtctgcacgcacacgtcatcgacatccgtgacatgggtggcgcccttaccgacgatcacatgttgaagaagctgttgcgagtggtgccattccactatcatcagcttgccttgtcgattgaaccgatgcttgatctcaagaccatgccgctggaggagctggttggtgccatgctgccatcgaatcctataaatctgttggtgcgtctggcgaggcgctgggcgacctagttctactcacagaagaggagtggtccactcgaatgaagaagaaggagcagtaggacacatgaaagggactggctcctcgtccagcctgaagaaagcatgcgcgggaagcatggtggctaggggcgctcaggtgaggatgcatcagccaaagaaggtggcgcgctgacggcaccgcgtgacaagtcgatggtatgttgtttcaattgtgacaattatgatcactacaccacggagtgccacaaaccgcggcgggagcgacgctaggaggcacacgtcgctgaggctcaggaggagcctgtactgctgctagcgaccgtgagtgtgctggtcaccgtggccgcacgaggacaattgtgctggacgagcccgccatgctagctcaacttcattttgggcgccgagaagaactatctccggatctctggtaccttgacaccggcacaagcaaccacatgtctgtccgcgaagagtttttcactgaccacgacgacacggtgcgcggcgttgtgcgcttcggcaacggctccatcatcgacgtctgcggttttggcgacgtaacgctggaatgcaacaacggggcacaccgtaccgtgtccatggtgtattacatcccagactcaagagcaacttgatcagtcttagctagcttgatgagaacggctgtgcaatccacattgaagatggggtgatgatgatcagggacagggcgagtgctctggtggcgagggtgtcgaggaacaaagggcgctcgtacctgctggatttgaaggtggtgcggcccatgtgtttggtggcgagctgcgccgaggtgccgtggttgtcgcatgcgcgctgcgggcatttgaattttggctccctatgtcggctggctcagggcgccatggtgtgcggtctgcctgacatcgaacaggtggatcacatctgcgattgttgtcaaagagcgaagcagctgcatgcaccattcctgtcggaggcgaaataccgagcaatggagttgctagagcttgtccatggtgatctctgtggaccgattagcccagccacgtcgggaggtaaatgccattttctattgctagtcgatgatatgtctcgatacatgtgggtggtactgctagcaaccaaagattaggcaccgacgacaatcagggagttctaagggaaagttgagctcgaggctaggaggaagatgaagattctccgtacagacctagggagggggggtgtgaattcacctcgatagaatttggtgaatactgtgcaggacgtggcgtgaggcggcacctcaccatgccctgcacaccgcagcataatggcatcattgaacggtgaaatcagatgatcgtatcaatgccgtgaagcctgttgaaggcaatggaaatgcccgggaggtttcagggtgaggccgttgtcactgcgatgcatatcctgaactgggcaatgacgagggcgctcgacggccagacgccctatgaagcttggtacggccagcgcctgaatgtgcattactttcgcacctttggctgtgtggcgtatgtgaagaatgtgataccacacttgtcgaagctggacagaagcgaggcgatggtgttccttggttatgaggacggaagcaaggcgtatagggtgttcgacccggaggcgaaccatgttcatgtgagcagagacgtggtgttcaacgaagaggcgaagtgggactgggcggcagccgtgactggagacgatgaagctaatcctgggacgaagaggcgaagtgggactgggcggcaaccgtgactggagacgatgaagctaatcctggtgaaatcttctctgtcttgtacacttttcactctgtttcagatgatgtacagtgctctgggcacgccccgccgcatacgagccacaggatgctgttaccctagtgtgggactcattgccgggtgtgcactcaccagcatccctcttgatgccaatcaacaccacgcagacaaaagctgaggtggagtttgcaattccgccgacggacgcattgcaaccatctgacgaggcaccgtgacgcaattacacgcttgcaaacatcagcaacactactagcccagtacgggagtttcagtactctgggttgtgccttttggcggctgatgagccagcaagcttcacggaggctgaagtacaggcctgctggcacaaggctatgattgatgaggtgaagagcattgaggaaaacaagacttggagtctagttccaccgcctactggacatcgaccaataggtctgaaatgggtgtacaagatcaagcgtgatcatgatggctatggtgaagtacaaggccagattggtagctaagggttacatgcaacaacatggcattgattttgaggaagtatttgctccggtggcaaggattgaaaccgtaaggttgttactggcactggcggcttaggagggatcgcaggtgcacgcaagtgcgcatgcaatccggcgccgggaggaaaccaaggatgcggtggaggacactgtcgggcagatcccctatcctatcgacgccgcggcggtcgatcagatgtgaggcttcccctagaggcatttcgtcgaacaggcggcaggcaagaggcgacaggaactcaccaatggtggatgcaacggggcgagtgtggaacggtggaaccctagtgtggacggggagtgaactgtgaagaatttgcattgcaggggtaaaggcctgaactctgggccgttaacccggcccattcagtcgtgggcctgaacagtatcatacactgggcccgtagggaccaattgttactgattaactgagatgggccgcaatccaggcctaccttacactgacatgggttatggttgaggcccatgcaaggtttatctgtcaaagctgacgtgccaaaatgaacctggcatgtttactgtagcagatagtagtagtactttgtttagaacagaaacatcatgttcaagagttaatctgcagaaaacgggaacgttctcgtgcatctgcgtaagatgcactgaccacaacgaaaaggaaacacccatcactggcttacaatctccacagattcagaaatatgtccagatacattaccagatggaagcactctcaaatatttccagttttcaagcggtgtaatgttgacaaagctgggagaaaattcccaaacatatgctatcacctgtaaagcaaattttgacaccaccaacatgaaaggagtactacaaaacaaaatcggaagggccaaatgcagcagggcaacaagctcctatagtatgggcactgtacagtaatggtaatgtacaaacatcatcttctacttttgatgctaatttgggatatcacaggattaccaagacaacaatcgcgcaaacccagcctttttgctgtcccaggtgactccccaactcacatagacagatacatctataatttacacttactttgcggcttgtatggctccatcctctcctagatcctgtccaagctacgtcaatcaattgtctgtacagcaatgcagctcgggggtcccgaattccagtaaaatgggctgaaaagcttcaccagtagcaaacctcctagtatgacctcaactagataactgccgacgactatacaattctcaacctcatcaaatgggagaaatgctatgcaagttgcattgcaggcgccaatagcctgtgtgtttcacaggggactccaggtatgcgaaatgcaaaacacaaaggcgtgtttcgctcgtagaaatcatggtggctgtacctggctagtcagccccagactgacctgcgctatcccggagattttcacgatgatataagcaaattgatttttggaaggagccagaagctcctgaagggtatatcataaaatcccattcaatactctctggtagtaatcatactgccgagtacgccatgcatccatgctgctactgataagtgaaagcaccagagacacgcattgctgcaaccataccaagatagcattagaactgtaaaaccccctctgcaaatgatgagttacaagacagttgactaacctcttcagtaagactcaagtgaaacctcttcctcaagttctgaatagtgcgaggaccacctttaaagcaagggaagccggaatcctgatacatggaaagttcggcattatacacatgaaagatgattactgtattgatggacttacattgccatgccaatcacagaaaggagaaaaataagattaggtacatagacgtaacccccacccccccaaaaaaaaaagaaagaaaaggacatattaaaatgatgtgtgtgagcaacatgaaactcggagtatgcaaatgaaacgttttatacattgatataccatatggcaaatgagttttgacctaactgaaactcgttagaatggctcttccgcacattcaagatagtctgacacacatggatgataaatatgaattctgagttatgctatgcaatgttctatacccttgatatatttatgttgagtttttttttaactcagatcaaacccattagaataactattctgcacccaaatccattagttgcaacacgtcatgcaataacccacatgccaacatcatgcaaaaccaaccgcctttgcattaacaggttatatcaagtatgcggtaaaatattctgcagacatgcagtagcaagtttccatttcaagtattgcatgtatttctggtaccactggtgtacaatagctatgctaaatttgtatagttcgattcagggtgtgcgtccgaaaatatttttcagaaatagggtgttcgcttcaagagaacaccttatattaggatgggttagtctattttgggaaaaagcacatgattttggtggaatggcccgaccaacatttttttcagctttgttctagtaagttattttataagagatgaggtggtgatggaacaaccagtttcattcaaaccatacagtggggtacattcggatttaggataagatggtgcattacttcaatcgctacttgtgtgaagcatgcaagcatagacaagtgttatataagacgaacactatctgataggctcatctaatacatctagacaaacatctaaaattttagatagaaagttacctgcaacatttctactagtagtataatacgctctgcatgcttccggcaagtaaggaacccttgaatgcatagaacctgaagcgtacaaatttacatggctaaataagaccattgaacttggagatgtcacaataaccaagagagtaattcactactagtccaaataccttgaagtagtcaaagaactcactgggtgttccctctgcatcagaatccatcacctaccatggtccccacaacaaaatttattataattcaacattttaatctaccataaagtttaagttacaagctaccatcttacttcaagaagctcccttgtcagtttaaatggtgcactttcaaaattaacccctccaggagagttggaaagcataaagccaaaatcaatatgaattatatgcccttcctcatctatcaagagatttccattgtgacgatccttgacctgcaatattttaacaaaataaaattcagcgattatttaggcccaatcatgatgacaaaaaagagtatagcactcacaatcgcaaagttaatttatttctatataataaatgaaatatttgatgaaaaataagaacagcatcaaacagcctttttaaattttggaagtgctacaagtatagttgtgtattgcaagttacagaagttcaattgaaactttaaagtaatcttatgaaaatgttgcagcacaataattgcactgcaaattccattcgaaatggtctcgaacttccagcaaattaaatatccagtcacacaggtcactactcactagtttccccctttacactttaacataaaggctagaaaactttctttatcagtaaactttggctggccctcaaaccttttgtacttttaataacattccacaaagaatctgtataaactggaaccattggatgctctgctggcccaataaaacctcagaaaaatgatgggagatttacaggacaaagcagaagatcaatagatctgtaatctgttctagtagtgcacagttcattagtagctaaattcaaaatacaaggggtccagaaggtaagccactgtcatttgttgagatggccccacagaacaataacaaaatgatctccagaatttgagaaatattatagaataataattgcaaacctagatgtatcacgcatataaactatgatatttggttttaatacctggagcaggtagcacaggattgagtatccagccatgctttccacaaagtttctctgttagtaacacaaaataaatcaataagtggttcaaatacattgttactagtgtgaactgtttttatgattcgtttagtggacactattggctagtgccttaaagtggtttaaactgaaacatgacattaaaaccagccaatcagctgttgtgaaccatatctctgagccacagaacagtcaaactctacctgggcaagtttgaagttcggagaattttcttcatacttggctacatagtagtcacggagacttgtgatatcggggaaccgactcttgatggaatgaattgacgcctgcagtagcatgacaaaaaaaggccaagctaataactttcagtatgcacagaaattcagaaagctaacttaatcataatggagagatgactaccgtatcaggaatagtctcaattagcgctgtatatgcagatgtgacgataacttcatagggtcgcaaccaaagtggtaaaccagcttcttgatatatatctgagagtacaacaaattttcaaaacaaagcaaagttacctgttaagagacattccaaatggagagatcacaaggtaaaggcaaatcatcaatgaggttctttcagaatcttgaccaaaagcaaatgattccagcaagcgttgctggtagactacagtacactcacattgcaacaaattcaactatggtaatccccactgaagtgggttcgtttgctggacataatgagggtattttatgtgcaaacaagtgttcacatcatgagtaacctgtaaataggacttaacatgataaattgttttcctatgtcctatatacttcagcaaacagcacaatgacatgctcacgtctgaggcatatagttgctaatctaccaagtggaatttaaacatatccgctaaatataaatttggtatgtaattcttcagacatttggtcagcttagatcaaaactaaaaagtatagtggtaagattgatttttttaccatataagtgtgcaacaagctgtacagctaggtgttcttgtcggcaatcatctccactcttgacaataacctgcaattggttgaaacatttcataagcctggcattaactgatggcatttcatttctataagaagtctcaacgaggtacaggatacaggatgctcaatctgaagcatgcaacaaagatcaatagattgtttacagcttaaatttaggtgcaaaaatttagtgaaaccaattccataaaataaatctgattgtctacttagttctccacaaagtttagagatgcacttgatagtgcagtggcaaggggtgtggtttcaaccccaaggtcccgtgttcaattctcaacactcacaatttcttctaattatttgataaccaagttcctccttggttctcctcttttttttcctccacaaagtttagatagattatttcgactgtaatggcagataacatcaatccaaaagattggaagaactacatttgctgatgcaaaatatacaatgagcatcggataagttgatgatgtagctgtcaatataagggagtagggagcattggattgaagaacagaagaatgggattgggattgggatagaagggtgaagtagatcctaaccctcaaatagtttccccaccaaatatcctaactaattctccatctttccccaacttctataccacaatccctatcacacactcctattcttaaataacacagaaatattcatttgggatagagtactgcaaaaaacaggatgttatgtaacttacagaacgcagatcccagccaggtaattttccatgaacagaagaccgtcgtattctctctctcttgacagcccagatttcaccagccaaagcatcagttggtttaggatctccaccatcagttgcctacatgaaacagagttaataatttaatgaagatcaacagaagaaaccagattgttagtgattcgaggattcacattcaccttagattctatattttgagcattctggccaactcctttcagtggaagaccaggtggagcttctccttttaatgctgcagcctagtcaaggaaaacaattcagcaaatagttgtacaagaggtatcgaactgtaaattggatgataatgcaataaaccaccttgtcttatttgatgactactaattcctggtgttggttagctaaacatctaggatattcgatagtttaaaaaagaatactctttagcaagattgaaaattgcaaaaagaaaagccttggagaaggaatctaaaaattttcagctcctaattaacttcacttaaaaatcaactcataaatcagctgcaccttgacttcctctatggcaattgtacttggaacgcggcgatggtccttcttccgcgttggttcattgtcatcaacatcatccatgttaactcctggaaccgcagataaagtaacctttacccactcaataggctgatcagcaattggttgggaatctcctgaaggctcatttgaatctgctgtagattgtcgtgacctatgtcccgaatcagaaattgcaacactccttgaacgaccaagtttctcaaccgagaaactaacgtttacaaattttactttggcctcccacaattgagccatagcttggtcaataacctgagaggtagacttcagcattctgtctgtttcataattttgtgtttcatgccgactccacaaaggatatgcccatggaggtggctttggcaactgcacatctccattagccaagggtatcccaccttttgacaatttgttaacatctgatgaccctttggagtgactacaaaaaggaaagaactgagtttacagaatgaattctgacttaagatccaataataaataaaggtaatgaagatcatcagttctgccatttagcaggcatatggtacttttagacaagtatataagaaaacaccacaaacaaaaacaacaggagttttaccataaatttcatcaagattgtagtattgtacaaagaactgcataccttggtgcttctgctttcaaaacttcaacacatataagataaggagctttttccctggagttaagaagaacagcttcatcttcaggtatatgaaccactcgatatatgccctttcccatcggaaagcatactcctgtgcaaaaagaaggcagacgaaaagaatttcaggggacatttagctactgcgttcatcttcagtgattgatgcttaatccaaaaggtagcatatgttttattttcttaagattaactggtactttctttgttactagagataaaacaaagaaaagacagaacaagacagtctttttagatgcatgacaatgcatagtgtacagttttgctacctagatttcaatatagtcaaaaccagataacagtttaccagcttcagcaaatggagtgaaagataggcagcggcactacataaagaacataaagtggagaaagcagcccatgcaacaaaactacaaaagaacaagtcagctcattaaactacacaggtgattttgctcaattatttggtcatcattgggccatttttcgttgcacaacaaccaaaatgaacaagggtggccatagaacattcaaatctaattccaaaagggatattttaacttgtgagcaagaaatatttatcagtaaaggaaggtggccagagctcaaactgcagccagaaaaaaataatggaacagtaaagcataggccatctgggatatgtctaactgtcaactcaagtagcttccatctaatgattataatgtgatgttagagttgcagcaccaagatttgatgctgaaaggctatgtgtaagaacataggaagacaatgaaatacagtgatatccacaggatagcagaaactacctccatttttctcagtagaagcaatctgtgaattgatctctgtaagagactgacacgggaaaagagaacccaatgggataaattagaatagtgtaactattataaaacaaaaaatataaaatatgaccgaaaggggtgaagcaatttagcatacctctcgaagggcaatcttacgatcttccataggaaatatgtctacaaggccataagatgtatcacacaaagattgcacaagctccaatgaagcatagtaacatcctttccgaagctctgctattgcgttgtttggtaaaggtggtttgccactttgcttatcaccgtttccagtgggaacagagtttttctgaaaaacatacagcttcagttaaggtcttagcagtcataaaaagaaggcacaagacaaaaggtatacaagcagtgtaatcagagcagcagatgctattgttatcagacctagaacccgtcaaactaaatgtgctttcaggacatctacaccataaaactgagcaattggctagataatatgtattaatacataggaaatacatacatgcaattgcaatggaaggaaatttgaattaaagggtgaaccaacaacgatctatacaagacagcccatatatgatgttagcttctttaccaaaatgatagactagtagtggtgttgtagaatcctcttttttcttttacaggtgaagggaaaacaaaataggaacatacttgtcataactgtttaagaaattcacacctaagctccaccacgtaaaacactacatgttgtacattgcactaataagtaataagtcatgaataaatagtgttgataactatccataaaatgccacacctaagtaataagtatatgattctgctgaaaccagaaacggtgagtactcaatatggcgatgcatggtagtactaatatgcacaagcctaaagttcggaagaaaaaaagaacaacttcagggaactgatgtcttgcctctttcaataactttgaaccaaaaagctcagagtcttcaagtgagcgatctctgtctcggaatagtcgcttgaaaaagctctctgatcctgggctaccctcagaaataccgttaggctgacaactttcaatatgcccactcttagcatcttcagggtgcactctaaacaacctgcggaacgacaaaaactctgaattttcctcgtcatcaataccactagtccccttaccatcatcatcatgtttatccagcccatcgcttctcctctcctcatgcttgtctttaaacaatttgcggaagaaattttccttatcaccttcctcacacttatcatcatcattcctgtcatgagcagctccctttttctcttcattcttatccttgaaaagcctacgaaagaaattttcatcatccatggtcctgtgtcctttgtcgtcctcctctttcttgtttggtgtggtgccttcctttttctcttcgtttttctccttgaaaagttgccggaaaaaaccatccctcttgtcatcttcgatgttcccagcagtcttttccttatcatcttgttgcttactatgccctccgtctttcctctcctcatttttatctttgaaaattttgcggaagaacccttctttatcatcatcctctaagctcttgcccactctttcctcatccccatgccttccatgcaggctctctctcctctcctcattcttatccttaaatatcctgcggaaaaagccttccttttcttcatcatcaccctgcctatcttccttatcacggaacagtcgcttcaataaaccctctgagcttggtgtcaattccatgtcctcgtccttgctgtccctaagcaacctgcggaggaaaccatctctatctccttcttcctcctcgttctctttctccttactaagcagcctcttgaaaaatccttccttatcaccatcctcttcctccttgtccttgctgtctctaagcagccttttaaagaacccttccttgtcctgctcatcatccttctccacggatcgcctaaagaacgatgctgcatcacgcaccttaggtccaatgcttagtctcttgagtagcttgttatcctctgacgagggtgtcgctggctgcttcactccactgcccccaacatcctctgcagcagctgcattgctcgcacctgcggggggactcaagccgagtgagggtgatgatgcaagggacagaaggcgctgcttcgatgagcgtatcctgctaagcatggggttcccgcgtgggctggcaattggcgacggcggcgcaggccggacgaggggtggccactctccctgaacggtcgccgcagcctggcactgctcctgcaccctgtcgatcccatccaaatcgtcggtgtcctcgagctcgagctcggcggctagcagccagtgcaccttgagggcgatgcgcagcgacttggagcaggtgtcgatcacgaagcggtcgagcgacgggctgggcttgtgcaccatcatgtagcagacctggaagaggtaggcctcgagccccggcagcggcagcgtgtacatgcggttgcagaggtagtcgcgcaccccctggtggtcatgcttgtagaggtagctgacggcgatccactcgcagaagaaggcggagtcgaagaagcgaacgagccagccgctgctccccacggggtgcgccgccgcgtcgccgccgccgccccccgccaccgtgatctcccgcggcgactcctccggcccgaagctcaggctccgcagcccgagaagccgcaccatggccggcgacccctcaacacgccaatcaaaccgtcactcacctcctcctcctcccctcaccaccatcacaacgaacaagctcgatccagcgcagcaaaccctaggatccagagaaacggaacagcacgcgctccaccgccgccgccgccgcccaaaccctagcctcgccggcgagggggggggagaactcaccggggcagctcgatccggggccgccgcgcgagccctagcctgggaatcgaggcagcgatattcgcagatcgaattgggaagaaaggggggtagaacacggaagcaagcgggtggggggaagggggggagagattcgaacgaattgggggaggatttggttgagatttgaaatgtcgcggcgtcgtcggaggagactttggtttgaaattcgtgtgaaaatgggaaagattcgtacggttttttcgcttgggttctcttcgccggcgtggggggtggtggtgtggtggtggtggtggtgggggccgtggaatcggcgagagcccggagcaggtgggggcggtgatggccgtggcctggatcctctgtgcccctctctctgctgtgcccaccatgtgtcgtgtacttcgtgtgttcatcgtgttactccgtcatatcgtttggataattggttattgtttcgcttttgcttatatttataagtcaaattttaaagtttaaaattaaattttaaagttgatttttatgtttcctcattgtagtatattttaccgtattctcttttgaattgttaaaacactaatttaaaagctttactcatatttttttaaaagaaattgctaataataagtgttttgcataaacatgagcgaaacaatgataccgttgtgctgctgaatagttttggctgataaatcataaaaaacaaacgagactaggatatgtgtggttaatagctgaaaaaaaagaaaatggtgaaaagtgcctaaataaattaaaattaactttgagaatttaatttttttatggcttatatgagctagcaagcaaataacgaggattttattttgcaatacttaagctcgatcgtgtatatgcaactattgtaatgatacaaaaggagataactgagagagtttttttaatattactagctattttatcaacaatgtcttttgttaaatagatttataatgttgtcataagtttattgtatgggatgcatgacttgaactaggtaagttgcaaggtttgatggtacataaacctattagattctacaaaacagcatatggcagcctacatgattccacatttacctaacccaatcatcaggagtgaaaaaagaatatgttatattcggtcctagattcatttttatgggacggagggagtagatatttgtgattacggcctatttttaaaatataagattcatcgagaattttttttataacaaatgcttcaaaacaagctaaactatggaaccattgaggatttttgtctcctttgtcacatgatttgtccatatgcataattttacaacaaattcgaatatcgataaaatgtcacaaacttgacatcatttagtaacgaaaccaccaagctctacaaaatatcatggagagtatgtggcagcctacacggtacccattaatccaaccggttgaataaaaaaattgaggacaagatacacgtagcgtaattatatgcatgtgtatcgtcgaatatcacattcatggctaaagtctatatttagaaacaaagaagattcatcaagaatttacttgtaacaaatgcttcgaaatgagctaaactgtgaaaccacttgaaaatccatccttctgccacacaatttgttgtatgcataattttaccacaaagtcggaaatagtatggataaaatgccaagaacttattgtaaacgagggagaatttatagtcaatttgcagcccaaccttttggtgatagctaatttgatcatcatctcataagtacttgtatccctttccacgaagaaaagctgaaactttggtacttcctccgtattttaatgtatgacaccattaacttttttataaacgtttgaccattcgttttattcaaaatttttgtgcaaatatgagaatatttatgtcatgcttaaagaatatttgatgatgaatcaagtcacaataaaataaatgatagttacataaattttttgaataaggcaaatgatcaaacgttagataaaaagttaacggcgttgtacatgtacaaaatcaacgggaatatgcatatggactgttgaggcgtgcggtccaatcaagtaatcaactggaatggaccgggcctattgctggcccattgggccgatcgcggtggccatgagccctccgtatctgatttccatcctactgccattctgttgccttttcatttgttttgtcttcattttatttttcttcttcttttcttttttttaaaaaaaacttgttttgaaccagcgtgccggttaatcaattgacggctgaaacacgacgccgacgtacgaagcagtaaaactacgtcatctacgtgtacaacagccaggaaaggaacaaagtctacatgaaaaaaaaatactgcatattccagttgatcagtttacttcgtccacagtctacacctacccctactatttattactccctccgtttcatacataagtcattttgatttgccttttagttaaatttatttaaatttgaccaagtttagagaaaaataaagtaaaatattcaatacaaatcaaacatatcaaaatatattcaatgctataaatttaataaaactaatttgatgttttaggtacgttgctaaacttttctataaatttaattaaactttaaaatatttgattagaaaaaaaaattcaaaacgatatgaaacggatcggagtgagtcctaccaacgctgtgttgaccttgccaccacttgacggccaacgaccacaccactgccagcgaaaggagcgaagtcaacacgtgaagcattcagtttgattcagtttacttcggtcttgtttagttccccacttttgtttttaaatttttaactttttcatcacatcagaactttcttacccacaaacttctaacttttccatcacagcattctaatttcaattaaactttcaatttccccacttttgtttttaaatttttaactttttcatcacatcagaactttcttacccacaaacttctaacttttccatcacaacattctaatttcaattaaactttcaattttaacgtgaactaaacacaccattaaaaagccacaattcgtccactagtactatttctgtttgttctcgccaaaggttgttgattttcgatcgctggctaactgcaagatgcacaccagctagctctgcgatgatcattgactgcatatcgccgtatatgtatgtatatttatatcaacttgatgaatcaatttgacagtaatgtgatcgacggacagaccatttttcgtgcgtattctttgtggtccattatttttttctaaaaaaaaaagtactactccctctcgcattggataataattctcgacgttataagatattagaatttgattatcaatttattttattatcaataactttataagattcaataactttataagatatttagtttgaataccctaagagattagtcttaaatatactacaataaaactaaatatatgtttatttattaatagagaaatgcccaggggtcttctgggtagcttcacaaggtagggctagaagatttggttccgaatcctcacactttctaattatttgatactaggcacttccctaatattcgtgtctttttttatttaataatatattataataataaagcatagtcaaatgtatgtttcgaagactatatagttgttcaaaacgttaagaattatggaattggagtttgatattaggccctctctaatatttgcgtcttttttatttattaatatattataataataaattatagtcaaatgtatgtttcaaacactgtatagttgttcaaaacgttaagaattatggaattggagagaaataattcacatgatttatgagggcacgtttaattatttgatattaggtcattccctaatattcacgtcttttttttatttattaatatataataataataaatcatagttaaatgtatgtttcgaagactatatagttgttcaaaacattaagaattatggaattggagagaagtaattcacataattagggggtgtttagatcaggggtgtaaagttttagcatgtcacatcgggtattatatagggtgtcgcatgggttgttcgggcactaataaaaaaactaattacaaaatacgtcagtaaaccgcgagacgaatttattaagcctaattaatccgtcattagcaaatgtttactgtagcaccatattgtcagatcgtggagtaattaggcttaaaagattcgtctcgcaaattagtcgcaatctgtgcaattagttatttttttagcctatatttaatatttcatgcatgtgttcaaacgttcgatgtgacagtgtaaaaaattttggagtgtgatctaaatagggccttatgaggacacgtaccgtatggattgatgcatgcatcctctaaggaattaatagggaggctataaatagttctaattcggatttatccacatgcacaaatacaccagcaattggaaagttgggagagtagaagtgaaccagggtttaatatttcagaccgaaatttcctggtttataagaagattaagaacaggcatatatttggtcaatggtcatggaaaactctggcttagctaggctaagccattcgatattcttccagctttgacaaggtctagtggcaaatactagcactccaattaattactggctatctaattaatttacctctttcttccctgcaaaggacgtactgcctgcttggaatggatcctcagttccagcttgttcttcaagaagtaattacttctcaccacttgtgccattttagtcaagtttctcgggctctcagaacgaaatggccactctctgatatacacatgctctgacttggggtgactacaacaactctgaatttgtcatacgaaaatgtgatgtcttgcaagcaagatttatcgatttagccagtacccaatggacaattaaaatgacaaagtggaatggatgaaatcctagcggcgataccatttctaaggccttgtttctttcaacttgggattattataatccagattattgggagtaagctgaaaaaaacagacaacttattaaagtagcttattataatctggaacccagcttattataatatgttaagcttatttaggtgagcttttttcagattattgggtgaaaaattacccaccatgccaccccatttcctgtttagacttgcaaacccaataatttaggctctaataagctagaaaagaaacaactaatcgcttattctactacagattataacaatttagcttatagtaatctgactcaataatctagattataataattctaagctaaaaaaacatggcctaagataagttggttcgtattatgatattttctaaaatttgcaaatgaatgatatttgttggattttctcagtaaacaagctagcatggcatacgcttgatctctgaatatctttttgcattaatcaggcatagaattcgatcgtacgcgtggctacctctgcgtatgcttgcttgccagccaatgcctacctgcttgcttgtttgacatggtctctctctgaagtctgaactttctgaagatcgatctgaagttattaaagttcgaagcttctgagatcactgcaggaaatggagtcatatgcatcgtgtcgcctctttgatccatttacacatggagaaattgatggccttggatagctactagctgtcgcgtgttgatggttgccggcaattgacttggcacgcagcgctggatggctctgctctttcggtccagatctagggaacaagtataatatggaaaattgacagtttcttttcaacaaaagcaaggtcctatttagcttagtaatcttagctaaaatttaaatttcagaaatttattttaaaattgtttttgaggtttttttatcatagcttatttttttacattagcttttaaattactaaggacacatatataatttttttactcataaattatttttttagctgttaataaaccattttacgatttgtcatctgtaggccaaacaattacacttcggatgacatatcatttttttagtgcaatgaatatctatgtttttcctttgcaattatgatatgtattttttaagaaagaaatatatattacacatgcctatatgactcctactaggaaaatcaatatcctaggatgggcacaatcagtcatgctaaatttgaccgacgaaatctaaaaacacgtcggtgggggcatatgaaaacatgttttcccctgaaatagatggcacaagtatgccccttttcattaagaggaagtatcaaatcgtacatgcatgtgagcccatcacaaatatttttattacagggtgtgaagccaaatggcatgggaagcaagctattaccaccccggcagcccggagctttcactgtagctcgtctgacaaattcgagtgtcttggcctatagccatgctctgctgctccacatcaagtaggtaattgttgttgctgcagagctctcttgaatgagacatgcaattagcctttaatagtcttaaaaaaaatattgagatgtgtaatcttgtctgaggcatttaactcaattttgaaggattcttcgcttgcgatccttccaaatgtaccatcaattgtaaaattatcactccttacattgaactcttctatcttttcatggcacctgtactaatcttggactgagatgtagtatgttggatgtagtgtattacttagtcccctcccctccaagagaaaattgataaggaccaaacggtccaagcatcgatacaatcttccatcaaattggagtgattccaattgtcaaaatcgcacatacatagcatgtgtcagggagtgcactcaagtgagtgggtgcgagtgtgtaactgtgtatgtgtcttccgtgtaaattactcatagatacccctccgtttcaaaaaaatttaaacctatgtccagattcaaaactaggtttgattttttttttgacagagtagtagttcatataacatggtagcatatggcttatttttaggattttatccttgcaaaagagtatacgatccatgcgaaagaacttgcatttatgtcccgtcttcgcttgacaaagatggttggcaacaacagtgtgttaggacatgtggatgatttcgtacaaaaactatacatacatttagataggatccattattctaaaaaatgtcctaaaatagcttctggtttttatctctaatcagatttttttttgttgtgaatagattcatctctccaacaaataactaagactaccaccgataataaaaagtagctccacctcatcaggtaactattgtcgccgatttttcaagaaaaatccaaaattttgggattctgttggccatggtctcgaagtatttttattttcaaaagaaacttagcgacacagctacaaatcgggtgcaaaaaatcgggcgcctcctacagcactactctttaccctgtatgcatgttagacaacatttatctcttttcctatgtacataactaacttttcacaaacttcaaaaaatttcttatgcctaaattacttatctaatccatgaaccaattacactattatatttgtcgcaattaaatctctataataagatcccactcaaatatattttgatgaaaaaaaatgtctgttgtttcatcccttagaaaaaaaatgtttcatgatttgatcaaatgttttattttactgtataaaatatttcagagagatgccacatttaaagtatactgactgtaacaccggcaatgattgtacgaaacattgagtctcaacaggtaaaacataaaaaaataatacgaaagatacaatatatttgcaaaaacttgatatcgttgaataatttttttgtcacgtacaaacattaaattgtaattgttgaaatattattaaatatctactaaaaacatcatatgcaatatttgcaaattaactagtgaaacatcatatagatattagttgaaacatttaaataaagcagcaggtgcaacatttaaagaaatccattaaaaatctaaatatttttttattagaatataaccatgtgtggtcttattctgaacatttaattgcaactaatttaatggtgcaatcagatcatgaatcgaatgaatagtttaaaagaaaaaaatcatttaatgtttaatagtaagtttgttatggatatgttagaagagagagaatagtaggaaaagtatgtttccgaaagtcaagacgactacaaatcaggtgtccgattttttctaaaaatttggcgttgtttcacccgttgcatgaaaatgttttattactaaaaaaggtgaaacacattcaaatcacaaaatgaaatatttttctacaatgtatgaaacaacggtttcaaatatattgaaccatgaaacacatttgagtacgtcaaaaaaaaattaaacaccatagaaaaccccacaacaacatttcaatctaattaataaaacatcaaggtacatgagttgaaacatcaaaaatattcgaaagaaaaacctagatctacctcttcctccgctacagtggttagccaccacatcgaccgatgttgaacttggtgcaatgagctcggccacaaccacgtggccaccttcatcgacaccgcgcggagctcggcctcatccacatggccaccatcgtcgacactgcgccgagcttggccacatcgacatggctaccgccgcgctgagctcctcgtgggctttgacgcagagtagttgatcgccatgtggagatgatgcaaatagagaggagaaaaagtgtggagagagaagaaaggggagagagagagagagtaagggatgagggaacggataagaaactagtgaggagaaaggctagatacttaatctccctatcggtcgtccggataggatcgtttccaaaagtacatgcatggaaatagcaaaaaaaaaatgtatacaactaagcaggcaacgttgaggaaaaaagcgcctcataatatagacttatgccatgtttgattcagcttaggattatgataatctggattattaggagtaaactgaaacaaacagatagcttattatgataaattattataatctataagccggattactataatctggtaatccactctaaaggtgctttttctagattattgggtgactaacagctaataatccaaaactcaaacagctaacagcttattttatgtcggcttattataatccaatttatagtaatctggctcaataatccagattataataatcttatgctgaaacaaacagggccttagaccaaatgcctaaagggcgccccaagcatcctcggaaactttgtcagcctcatatacacatcactttcttgcatgcgtctcctaattagtttcagtacaacgttatatttgtcagtatatatgcttttttttatgaaaaatatagcggtataaatatagacagtcccctcacttatcctccaacactatactcgatctatacatgctattcctctaattttaacctgagcacaattaatcaacgacacaagattgattaattactaattagtcacactcgaaaaagaacaatgtcagggtcaattccctctggcacagtgacagtcgcctgccacgtgtccggcagcgaccgcgcgatcctcctcgcgctctccaagtagccctcgaacttgtcggcgctgacgtcaccgccaaccttgcccgccgccgttgtcttcctcgccgtctggaactcgccgccgtcggagtcgctgctggtggcggagctgctgccaaggtggcagtggagcagctcgcgcgccatgagctggcgcttgagcgcggcgcggcggaaggaccagtcgccggtggcccagtcgaaggcgtagagcgggaggaagcggtggccgtgcgccgcgacgaagtcgatggcggcgaggacgtagcggagctcgtcgccggagaggtagtaggcgaagctcaccctcgtccaccccggcttcacgccgtggtaccccctgacgatggcggcgcggatgcggagcgagagctcgtcgccgacgccgagcagcgcgtgcccgtacggccccgcgcacgcgcacccgcccctcgcctgcacgccgaacaggtcgttcagtagcttcgccacgaaccgcccgtgcagcggcagccgccggtcgtcgccgtcgccggggaagacgaggaaggagaagatggggaggcgcggggcggcgacgttgccgagcacctccacgttggggttgcccagcagccacgccatggcggcgtcggcgtgggcgcgctcccggagcgcgacggcgccgccgcggccgacgcgcgccttgacccagaacgcgagcgcggcgcggaccttgccgacgatgggcggcgtgccggcgtcctcccgctcctcgacgccggcgaggtacaccgtgtcgcgctcgctggcgccgttcacgtaggcgacagtgccgccgccgcacgtcgtcggcggctgcgacgacagccggtacagcgagcggctcatcaggaggatccccggcgtgcccggcccgccgacgaacttgtgcgggctcaggaacacggcgtcgtagccgtccacctctccgggcctcatgtcgatctccacgtagggcccactgctcagtgagacacacacgtcagcttcagacacacacatgtacaccccatgcatgcatggttagttagctagctaggacatgcatatgcatttactcatgaatgataaactaattaatcaaccatacgtatcttttttcatatataaacagattaatactcaatccgtttcgtattataagttgctttgatttttttctattataaactttgctaagtttgatctagtatatagaaaagttcagcagcattttaaacaccaaaaaaacttcattaaatttaacattgaatatattttgataatatgtttgttttgtgtcgaaatggctactatgttttcctataaaattggttaaacttaaagaaatttgaatagtaaaagtcaaaataacttatgatatgaaacggtgagtattcatcaattattaacatcctttattttttcagaaaaaaagttcaattatatgtttgcattaaaatttctggttatgcaatgatatcagtatgaacaggagtacagagcagagagataataataaagcaatcacattgtttctgaatggcacatgaaaagaaaataatttcagtgtcttcacaagctagctagcttgtgattcagaagttcagatgggttaagacttggaacttggaaggtcaatggctttcactatcaagatgagctactaacaagactcttcgttctaattaattaatgtaaaactagaaaaaaaatggatcaaggaattggttcgagattgcttctgtcatcatcagagaagaaaacatctacaaggactgaataaatctccacatatagtttaattaatgtgtgtactaacacacacattctttatcattcttgcatgttatgtattgctttggtataccatttgctaatcttaattatcaggtcaaaatgacgatgtcatccaatgcaacatgcatgcagcagctggcaggtggattgaaatgcaaaaaatagccagattggaagtcaatacagtggaacaaatcaggaaaaattacctgtttctgaagaggaaatctaagtaatcaagaaacgcgctatctaactcccctctctagttaggttaagtttttgaataaatatgctgctaaaattaaccatcaatttgaccaagaaaaaacaccacatgtatattgatttcatcagcagattggattgtatgtacagtccgtactaattaagaaatgcgtcaactgtcaaactggtggatagcataggatcattatcgaagaaaatgagagttccttgcaccacttggaaaccctagcttccaattcatggacttccgatacttgtagatcattgtattcatacttcatcaaaaacccattataaaatcatgaaaaaaatgaaaatgtgatccatacacatttcatcaaatggcaataatcaacaattaatccaattaatccattagttaaatactccatccattttatattataaatcatttgacttttttcctagtcaagtttgactaagtttatataaaagtttagcaacatctaaaataccaaactaatttcataaaatctaacatatgtttttttaaaatactaatatgtttttataaaaatttagtcaaacttgactaggaaaaaaaaacaaacgacttataatatgaaacatatggagtatttatttaattaagtaatgcatcgggcagtgtgattattagctgtgtctgtgtgcatgtgccacgtgtacctggcggcgaagtcgaagcaggcgaaggcgccgtgctggtggaggaggcgggcgacggcgcgggtgtcggtgagcacgccggtgacgttgctgcaggcggagaaggaccccagcatggggcggtcggcgtgctcgggggcgcgcagcgcgcggcggagcgcggcgaggtcgaggagcccgtcgtcgccggcgccgacct

SEQ ID NO: 9413 - DNA, 5138 bp, Oryza sativa
caaaatgcaactcagtgtaagctaaaatgaagggttgattacctaatggattttggattttcatttgcacatttcccaagttcctaaatgatgtgtttcagaaaaagaattatgtatatattgtttcctaaagcactttttccagaacaggggtgaaactagaacgaaaattaccaagtgtgccacacttgtataatattatgtaattaatgttctagttacatgtgttaatgaagaacatgctttgggcaaatcattttagagtctacgaccatgcatgagaaaggagcaatgtggtgttgccctttaggtaaactaaacaaatagacaaatattgtctatatgattatcacaagatgattggtgagtggaagacactactgagcaatgagtggacatagagtactgataaatagcatatagccatatatcaactatggcatgacgtgttacttttttctttgattccgagtagacaaaggcaccagtaaataaggagaaaaaaaaaagcgaaccatagttttttaagtagtcatattttttaaataagtttcattaattatgatgatataaattatattgaacttattgattataatttacatgataaaactatattctttgatataattggactacatgacaaaagcaaactttactgtagaacacttcaaaatttataagtacactacacacactaatcaaatttatacactattgatcttatttcaaacaaatgttgtttcaaagaaaacaatcaagcatgaaaaaacaaagtaattagcttgaaacaattgctaatattttgcattaccagccaagcaattgtgtgggtgttatgtgttctaacatacctttaaagttcttcaaaactgtgtaaaaaattgaactagttgaacttctacgtagaaaaaaaatccaacatataatctatccttaatttggttgtcactgtatcatgtgccttcatgaaatgattcaacacaaagaactttgatttccttagtctcacaagttttgcttatagccatattacactctatgtgtacagatggtagaagtgataatgtaacaccctgaaaattcgaccgacaaaatcaaaactctaaaaatacggattttcaaaaactttttaaattaattgcatcatgccgatcttattcgtctattttatctggatttgatctcgaagattattaatcgtgagtaaagaatagttaattaggaataaaccttacaaacaaattggtaaaataaatacaaattaaaataaagattaggtgtggacagaaataaataaaatattatcgcgaccatatttggatcaattaaatttaaatacaatggaataagaattaaccctaattaaaactcaaataaattatataaaaataaaatatgagtaatattaatctagggtgaattcattagttaagataacacaaatattgagtaaaatgcacatatgcaaaattaggaattgtggaatcaaatttatatggaaaatacactaaaatcgggataaatagaaaaagtcactattcatcggccgccaggtgttcgacgtggtcccctaacccagctcctcctctttccccctctctctgccgccaccttcaccacgcgccgccgcctcgcgccccgagccaccgcgggccgtcgccatcgtcgcctgccgccgcgccgccgtcgccatcgccgcctgtcgccgtcgccatcccatcgccgctgccgcgccgtcgccgtcgcgtcccgcctcgcgccgcgcgtgcgtcccatcaccgcctcgcgcccagagccaccgcgcgccgtcgccatcgtcgcctgccgccgcgccaccgtcgccatcgccgcctgtcgccgtcgccatctcattgccgttgccgcgccgtcgccgtcgcgtaccgcctcgcgccgcgcgtgcgtaccatcgccgcctcgcgccgcgcgccaccactgccgcgcagtcgccgtcgccatcccgtcgccgcgcgcgcgttccatcgccgcctcgagccgtgccgctgctgcgccgcgtgccgtcccgtcgcctcgcacccgctgcctcgcgccccgcgccgctgccacgtgctgcgtcgccttgcgccccgagccgcgccgcgccgtcgtcatctccgcccgcgcgccgcgcgccgtcacatcgccgccgtcacctcaccccccctccaccgcccttcccttctcttccctctcccccttatcctctctttcccctataaaggcccaccattctcccctctccccactccatcccctcctcctctcccttttccctccccatctccacgcgtcgccgttgttgtcccgccgctccgccgccttcgagccaccgcgccgccgccacgaagccgccgcgctgtgccgcgccgtgcgccgtcgtcgccgccgccgtcgtcgccgccgccgccgtcggtgagtcgctgccttccccccctgtttgtcgccgtgccgccgggtagagagagagccgagggagagggaggaagggagaagccgagggagagaaagaagaaggaacgaggagagaaaccgggagggagagagagaaggaaaaagaaaagaaaagggatagtgagaaggaaaaaagaaaagaaaggagagagagaaagaaaaaaaaagaaaagaaaaagaaaggaaggaaaaagaaaaagaagggaagaaaaagaaaagggaaataaataggaaattagagggagattagggaagttttaaaaatttaaaataattagaatttagttatagattagttatagtcgtagaattgcgaaatttaatataaattatggattattcttggtaatttctacaagaaatcaattcgcggtagtagtttaaatgtaattaagaactaaacgattagatgaattcttatagactattatagattattttgggtaatctctataagtaattgattcacggtagaaattcggacttaatcactaggaattttagacgtatattatatttagtcgtttagtcctagactaaaattaaatcgtataatattataagataatttttggattccgttcgatatttagcttgcgatagaaatttccaacctattatatggatataacgctcgggtagattaaattaaaaacttatgataacaaaatatttatacccacaaaatagttaggatatacaaaaagaaattgggtttgccctagtacgcgaatagtaaagttaatataaaagaatcgactttcgcgttcgacttccatttggatttatttggatttttatttgaattctaatcgaatccaaatcaattttcgcaggtaactatagagcccgagggagttgcggatccaagtgaaggccaagacccccaagaccttgagcaaggcaagtcatcactattccttgaacatgttgatcctaattgcgaaattattttgtttataaataaaattgcatgcaatgatgcacatcctacttgtgattatgccatgccttgattattgtttatccatgtttacgtatgagtccctagtcaattatgacaattgcttagaaatgctattctaggatcatgcatactcatatttatcaaatgctaaatgcttgggcaattacctttgggaaggtaattgagatgcggcatgtggagacatgagcaccacattgccatgaaattgataacatgatttgtgaaaggaaaataaagcgaaaacaactgttttcaactggggcggacggatgatttgggtggtatctgggaaaggctagtaccgtccccggtcaattaaggaccgagccataaagttaagcatgaaacgacccccgtacaaccgtacttctcgaatgggtatagacctagcggattagatagccgagcggaggcagtatccctgcatagatggttcacccctgagtgaggcaggtgcgctacgatgggacaaccgttgaggtagagccgagaggcgtgccctacatcggtgtcgccgttggtagaactgccatgagtgtgtgagagagagaacttaacttgaaccataatttaatatgtgtgagacttctctttcccgggaccgccagaactcctcacactgctagaaacatggacgcctagagtgcatgaggatttaagttcatagagcggatactgccaatgcgaggttatcgaaaagctttgccgtgacgcgcctcatgtgttgagacgaggctcatgtgttgggcagtcgcggagtgcgagtaaagtgtacatccactgcagtgtgagtgaacgaaatctattcgaatagccgtgctcgcggttattgagcaccgggacatgtattacacttggctagtctctaaattcttaacttatgtgggatgggttgttgcatgacgaatttttatgctgttggagccacttcctgagaagggggaaggtgggcgtcctcagaaaaccataacgactcaatggcgggaagctatccttgggatcacaatggatggtggacagaaccgtcgttgtttaaatacaaacactggtactaaaatttgatcagtcaatgctaggtcttaggtttgtgaaaagaattacaaaactggcttagcgcaaaagagccatagccatcctttgaaatacccctttcatatgcattgttgctgtggtaacttgttgagtacggttggtactcacccttacaaatataaaattaatcagaagcggtagatgaagcttcggaggatccctatgcctactaccaggagggagatgaagacgatggcgctcagtaggtcttagtacggtcgttgcctgtggcaatggcatgccgctgcctgaattccgctgccttatctatttctgcttttggatgtattccggaccgctcggtccgatgatttaagacaatgcctgcgggcttatgatgtaataattagcactagactctcatgtatgtgcttttggtatttcagctatgaactcgtgtgtaccagactacttgatccagggaaatggtactgtttacacgaatgattcctgttataaaaacgggggtccacagagctggtatcagagccatacgactgtaggaaaagaccaaaaggcgccccaccccttttctaagttggccaagggagaaattcccatttagtaatactttcaaaaataaaaa

SEQ ID NO: 9414 - DNA, 4161 bp, Oryza sativa
cgataacctcgcattggcagtatccgctctatgaacttaaatcctcatgcactctaggcgtccatgtttctagcagtgtgaggagttctggcggtcccgggaaagagaagtctcacacatattaaattatggttcaagttaagttctctctctcacacactcatggcagttctaccaacggcgacaccgatgtagggcacgcctctcggctctacctcaacggttgtcccatcgtagcgcacctgcctcactcaggggtgaaccatctatgcagggatactgcctccgctcggctatctaatccgctaggtctatacccattcgagaagtacggttgtacgggggtcgtttcatgcttaactttatggctcggtccttaattgaccggggacggtactagcctttcccagataccacccaaatcatccgtccgccccagttgaaaacagttgttttcgctttattttcctttcacaaatcatgttatcaatttcatggcaatgtggtgctcatgtctccacatgccgcatctcaattaccttcccaaaggtaattgcccaagcatttagcatttgataaatatgagtatgcatgatcctagaatagcatttctaagcaattgtcataattgactagggactcatacgtaaacatggataaacaataatcaaggcatggcataatcacaagtaggatgtgcatcattgcatgcaattttatttataaacaaaataatttcgcaattaggatcaacatgttcaaggaatagtgatgacttgccttgctcaaggtcttgggggtcttggccttcacttggatccgcaactccctcgggctctatagttacctgcgaaaattgatttggattcgattagaattcaaataaaaatccaaataaatccaaatggaagtcgaacgcgaaagtcgattcttttatattaactttactattcgcgtactagggcaaacccaatttctttttgtatatcctaactattttgtgggtataaatattttgttatcataagtttttaatttaatctacccgagcgttatatccatataataggttggaaatttctatcgcaagctaaatatcgaacggaatccaaaaattatcttataatattatacgatttaattttagtctaggactaaacgactaaatataataaacgtctaaaattcctagtgattaagtccgaatttctaccgtgaatcaattacttatagagattacccaaaataatctataatagtctataagaattcatctaatcgtttagttcttaattacatttaaactactaccgcgaattgatttcttgtagaaattaccaagaataatccataatttatattaaatttcgcaattctacgactataactaatctataactaaattctaattattttaaattttcaaaacttccctaatctccctctaatttcctatttatttcccttttctttttcttcccttctttttctttttccttcctttctttttcttttctttttttttctttctctctctcctttcttttctttttccttctctctctcccttttcttttctttttccttctctctctccctcccggtttctctcctccttccttcttctttctctccctcggcttctcccttcctccctctccctcggctctctctctacccggcggcacggcgacaaacagggggggaaggcagcggctcaccgacggcggcagcggcaacgacggcggtggtaacgacggcgcacggcgcggcacagcgcggcggctcgaaggcggcggcgcggcggcacgatgacagcgacgcgtggagaagttgagggaaaagggagaggaggaggggatggagtggggagaggggagattggtgggcttttataggggaaagagaggataagggggagagggaaagaagggaagggcggtggaggggggtgaggcgacggcggcgatgtgacggcgcgcggcgcgcgggcggagatgacgacggcgcggcgcggctcagggcgcaaggcggcgcggcacgtggcagcggcgctgggcgcgaggcagcggatgcgcggcgcgaggcgacgggacggcgcacggcgcggcagcggcacggctcgaggcggcgatggaacgcgcacgcggcgacgggatggcgacggcgacggcgcggcagtggtggcgcgcggcgcgaggcggcgatggtacgcacgcgcggcgcgaggcgggacgcgacggcgacggcgcggcaacggcaatgagatggcgacggcgacaggcggcgatggcgacggtggcgcggcggcaggcgacgatggcgacggcgcgcggtggctctgggcgcgaggcggtgatgggacgcacgcgcggcgcgaggcgggacgcgacggcgacggcgcggcagcggcgatgggatggcgacggcgacaggcggcgatggcgacggcggcgcggcggcaggcgacgatggcgacggcccgcggtggctcggggcgcgaggcggcggcgcgtggtgaaggtggcggcagagagagggggaaagaggaggagctgggttaggggaccacgtcgaacacctggcggccgatgaatagtgactttttctatttatcccgattttagtgtattttccatataaatttgattccacaattcctaattttgcatatgtgcattttactcaatatttgtgttatcttaactaatgaattcaccctagattaatattactcatattttatttttatataatttatttgagttttaattagggttaattcttattccattgtatttaaatttaattgatccaaatatggtcgcgataatattttatttatttctgtccacacctaatctttattttaatttgtatttattttaccaatttgtttgtaaggtttattcctaattaactattctttactcacgattaataatcttcgagatcaaatccagataaaatagacgaataagatcggcatgatgcaattaatttaaaaagtttttgaaaatccgtatttttagagttttgattttgtcggtcgaattttcagggtgttacattatcacttctaccatctgtacacatagagtgtaatatggctataagcaaaacttgtgagactaaggaaatcaaagttctttgtgttgaatcatttcatgaaggcacatgatacagtgacaaccaaattaaggatagattatatgttggattttttttctacgtagaagttcaactagttcaattttttacacagttttgaagaactttaaaggtatgttagaacacataacacccacacaattgcttggctggtaatgcaaaatattagcaattgtttcaagctaattactttgttttttcatgcttgattgttttctttgaaacaacatttgtttgaaataagatcaatagtgtataaatttgattagtgtgtgtagtgtacttataaattttgaagtgttctacagtaaagtttgcttttgtcatgtagtccaattatatcaaagaatatagttttatcatgtaaattataatcaataagttcaatataatttatatcatcataattaatgaaacttatttaaaaaatatgactacttaaaaaactatggttcgcttttttttttctccttatttactggtgcctttgtctactcggaatcaaagaaaaaagtaacacgtcatgccatagttgatatatggctatatgctatttatcagtactctatgtccactcattgctcagtagtgtcttccactcaccaatcatcttgtgataatcatatagacaatatttgtctatttgtttagtttacctaaagggcaacaccacattgctcctttctcatgcatggtcgtagactctaaaatgatttgcccaaagcatgttcttcattaacacatgtaactagaacattaattacataatattatacaagtgtggcacacttggtaattttcgttctagtttcacccctgttctggaaaaagtgctttaggaaacaatatatacataattctttttctgaaacacatcatttaggaacttgggaaatgtgcaaatgaaaatccaaaatccattaggtaatcaacccttcattttagcttacactgagttgcattttgcaaaaacttgacccactggacttg

SEQ ID NO: 9415 - DNA, 1900 bp, Oryza sativa
gtagtctatggtaatttaaatttaaatagtatatatagaatgatgattcaaatgtaaaagatgatgtggcttcgtgagagaagaaaaggagagagataatttggaccatagattaatcatctaagggcaaaaacaattgatatgatatagctaaatgagaggagagaaataatattaactaagtgaggatgaactatataggtgtatgggatgatgatttaacattcgttcattttaaagctctaaagttcaataattataaaataaaattatagataatatagcatgcttgtacgatgtttatatgtaataattattagtgaaagatgatgtgtcatcattgcatgtagagttttagaatttagtgggttatagctttatagtaagataagaattatgcgggatgatgatttaacattcttgcattttaaagaactaaaattcaataattataaaattatagataatatagcatgcttgcatgatgtttaaatgtaataattattagtgaaggatgatgtggcatatataagatcttgctacgccatcaaaacttttgcctgaatcaatacattacttcttctatcaacagacctatcccaactatttgtcatatttctgggctaacagcaacaacacacgggaaaatcttggaataaaaaaggtatttaaattaatattatttttccatatcgactggtagtgtttcacttttgcagtttacatcacacttttcttgtttctcctgatgttcataacatatatagggaactgtggatgagtgggtgaggtgccatgacgatggactaccttattctcaggacatagagagcagtattaagtaccatcaaaatcttacatctagaggctatcgtgtcttggtatacaggtaaccaagttcttgtatgttcacatctcaaaagttttatgattatgaaacgcctagagattatgtgcatgtctcttaacaacaattaataattaagaaccgatctcttattattggtgcttccgctaatacagacagaagcaccaatagtagtagattaaaaggtccaactgttgggaaggatttctcagctcatttctcggcttataacgttatagaccctctaacgtataaccattcgaatttatactattggttgttttcttttctttttttctatgtgttgtcaacttcttatttttgtctttcatatagtggcgaccatgattccgtggttccatttttgggtacacaagcctgggtgagatcactcaactacccaattgtggatgactggagagcctggcatatcgatggccagtctgctgggtaagattaatgtgcctaattcgttttcttgtttagttatgtataacactactacggggtgattaataagattttcataagtttaaaatacactgtgtttttcagttcataataaactcagtcgaagagtacattacctgaaatacgatttatttatttgcagattcaccatagcatatggaaacaatttgacattcgctacagtaaaggtgacaatatatctgtctacaaatgcatgattcttgtttttcaaaaagcaaatgaaacttttcttttttacattcattatttttactatggttattttgaatgaagttaattaactcctacagtttcaaacagtttgggagtatctaggttctaatgatttgttaaataccagatgcaaatgtttggttgcagtatgggttgaaagttgaaactgcaaaacgaaaattttgaattaagggtacaagttgtacactccacattttcatgaatgaaaacttcatgcatagtgatgagtaaaaataaatccaaccattaatgtaataaagctatgtttgttattaaagataagtgaattgttcatgcttgttcacc

SEQ ID NO: 9416 - DNA, 7305 bp, Oryza sativa
tccgcacgccgtcgagccctcctcactgccgccacgcaccagatcgagaaataagagaagggggaggaggatgggggtaccgccgccaccgctggccgcctagcgccgccgcaccacctcgccgcttcgccttcgcaccagcgccgccgccacgcgccgctgagccgccgcccaccgccaccgccgcctctcccgagggccgtcgagtcctccgccgcccggtccccttttcttctgtggataagggagagagagaaaggcccccttttgtttctatggataagaggagagagagagtgagggagagagagaggatactctagtcaagcctagtcaatccccccacccacacctgtgacggctgtattgacgggtccgtttgagctgagttagcctcacctttgacggtttataaggatgcaacccgtcacaggtaactagtcacctgtaacaggccggaagtggaaaccgccagaggtgactaattacttctgacagctttcacttccggcccgtcagaggtgactaattacttatgacgggttgtagaaggatgccttaccgatgacggcgtcctgtaggatccgtcaaaggtgaccctcatcactaaccggtactaaatcccgtcacagatataccgtcaaagacgtgaggatctagtgtagtgacaaatagtcaaacctatcaacaacatcgtcactacaagaatctatttaatctatgacgaaaaaaattcgtcatagatcactgaaaattcgtcatagaaatatgtctgtgacaattctcttatcgtcatctattgagcgtcatagattaattttgccgacgttttctccgaaatcgtcacggatcagtacaatctatgacttttaaaccgtcataaaacgcttttaggctcgtgtagtccagcccatgcccaacctttgtgacaaaattaaatgtcacagatggttgccacgtggcggccaacattgcaggtgacatggtcgttgacacgtgtgtgtgatgacgtgtcactgatgacgtggcagctaaagttagcaaatatttttaaacggcccattatttttttgacgggccattaattttttaacagtccattaattttttacaatggtccattaattatttaacagcggcccattatttttttagaactggcccattttaaaataggcccatttcaaaactggcctattttgtcaaccaactatcagatcaaagcccactaaacaggcccattaaatttgagcccaccaaattcaatccaatttcacataccatctcagattcaaacctaataacagataccatctcagattcaactaataacagatacaatcataatacaacagaattcaaacaatagttcatctcagattcaacctaataacaacctaataacagatagtctcagatactgacaatcaaccgaagcttagcattctccctcttctcagctttcagttctgcactcatccttgatcgcttagtgtgcatcccaacattccgaaggaacacactcttcttgtggttgcgctcaagtacactagctacaacctgaagcacagacttgggttgttcgggtgtagccatcctttttctcgctgaagtggcacattttgaacaaatcaaacgcatcatgttctttaccctcatcctcgttcttatattcctgaaaatcatgtttatatggtagattacttaatcggtgacaacacttgatagtaggaaaaaaatgaaaataaataaacagtgaacaagaagaaggttagcatgcaagtatgtacgtatagatttgctgaaagggaggaaggaaaattacctggagagaaattgtgcaacttgaggtatatccatgtcattatatattttagtagcaaatgcctcagctcatatgaacaaatcaaatgagaggtactgaagtctatgacatgacaactcacaagaaatactgaagccgcagcaactctaactcgccatcgctcttggtcgttgctacggctaacatgcataaaagaaattaacagatatagccaaaaagagacccaacatacacatggaatgagttagcttaggcctagcaaaactcacaagcataataggaggacatagacatagcaaaatcagaattccggcagtaggcaaatcttaggcattgttggacttaggcacagcaaaacctgtaggatagtatagcaaaatcctctaccttaggcattgcaaaaatagtaacagatttgcctaagcctaacaagttaagatttatccatagcaaaagaggtgttacttaggcacaacaaaatcctgatgttatatatagacattgcaaaacagtaagagttatatatagaaaaacatgtgaatgactacatagatatagcacaaaagtaaaagtaatacataacaaaaatcatgagttaggcatagcgtaattgttggaactagacataggaaaatcaatgagttagtaaaattaacagtctcaagattaacataggcataaaaagggaatatctggagtggggttggcccggagagcggctacgagaaggactgctgcgactgcgagagcggctgcaaccacggcagagacgccaccgccatggaagcggaagccgacgcaccactgctccccccagtcctcctgaacagccatgaacacactaccatgagcaaaacacatcatgcatgaccagaacacagcatggaattggacggaggacggagatggaggcggaggagctctccacggtggtggtggaggcggtcgagaaggagacctcgcccttggctcgactggcctggcccccccgactcatcggctgcctccgcgtcctcatccttcacactcagcacggggggacccgtctcggccggcgtcctcctagggcgacgcaggcgactcccatgccctagccactgccgccaccctcctcctcccatccgcctcgccgccacccaagtggcccaccatcaaatcatctagctgtaaggatgacggtggcgaggctccttatccccccagtagcattgtggttggggcacctaggcgcccaaggtggaggttgcctagatctgggtcaccatggttggatccgatgaggggatgttggtgggcatctttggccgtggtggtaggccgtgaggtaacaggagtagtagagttagcggctggatgataggcagtgatagagacaattgctggtcctctaggcggtgatggagattgttgttgggttacaggagacggatacacgaccgccgaggttggatccctccagatccgcttggtggggacaggtggtagcggtgacggtagtgacgacgcggttgggttactttgtgcctgaacagctgcagcagtggaggagaatgctagcagggtagtgggcggtggtgaaggcaacaatgggggctgtcggatttggcatccccatatgcagatccaacgtgctcttgaccagatccgaagaggtggcgggatggatggcgtcaaggtggcgcgatgaatagtgacggcgtgtggctaggaagtgacatggtgccttgatatggctttccccggcgaggtggccctcggcaacaacgagcgatgacgatgcaggaggggtgacgaaggcggcagtcctcccctaaccccttctcctatcatggtgacggtggcggtgatgtggtttgtccatttgtgtcactactacaaaaacggtttttcatggcgtcaccctaaaattttcgctggtggccatacgcgaaaactgcagcaacaaagtaacaaggggtggggggcttcggaccgccagcgaaaattgatcttcgctagcaacggagttgagcgggccaccagcaaagatgtcgcagttttcgctgacggcgaacttaagacacagctagagaagatggcaaatttttgctggcgggcgagtggcgtggcctccagcgaagatgtagctatctttgctagtggccgacttaagccaccaccactcatattggctttacaagcggataacttaagtgacaaccatcgaaaattgattttcgttgtcggctgctgctaaagagaacagcctgtgaaaatcatcgccacactaaaaaaaatagtgacattaaaaaccaccacccacctactgcctccctctcctcgctcctcctcctcctctctagatccacctacccacccaccggccaccgcctcctcctcctctcaagatccctctcctcctccctcaccggcggcactccatccctcacccaacggcggtcgtcgtacccctctcctcctccctccccaccagcggcgtacaacggctccaagatgctctcggcgatggcggctctcacgtcaggatctctcggcggcgggtggtggcacagcaagaccagcggtggcacaacaaaggggatgcggcggtagcgaaattgccctcccctcacctcccctcctctgtccataggggaggaggccagcagtggcacccttgccctcccctctcctcctaggcctgtctagaggggaggaggccggcagcagcggcaacaacattaatagaggaaatggcttccttcacctccccttttccaaatctggcaggaggggtggcagccagcagatggccggaggtggtggcttcggcgaccgcttgtccccaatggctttggtggctagggttcttgtgaattgtgggatacgctggggagctagggttttagtgatgaatttttatgttccgttcttccatttgatgcagcggtgatgcagacgattcgatttgaatttcatgtttgatatgtggaaatgggatgattagatttgaatttcttgtttgattcatggaagagggcagctgaatgcatatggttttttttgttgccaaaatccatctgcactgtcggtcatcttaactcaccgcttgcaaaaattggatttccacagatggtcggttaaacctagttgcttgcgaaaaccattttcactggcagttgggctaggttgcccactagtgaaaatgatttatcgctggcggctggttgccgccattgaaaatggtgcattttggccattggttgctggcggcagtgctgaccgtcgtagaaaacccaagctggctgccaagaaaaatcaattttgtagtagtgtatagataagacggagagactgcggtgctcactagagtggtactgatggtgacagctctcctccatcacgacgatgatctacggtgctagcaatggagggatgtagtggcactagcgcggtgtgacaatgtgcgggagacatgtctcttcctcaggatgggactcctacatggtgtctgtctggcgatggggcgctagtgtggcggctagtgggtgcaagggaaagaggttctctggtcgaaagcctaagctgttttagggtgaacagcggcagcgttttctagcactgcttggaggcgttgttgtgaagtcttcttccttcccaatcgaatcctttgggtgaaaactttgtccttgtttccagggataggcgatggctgcgccctaggcgtcgcagctttgttggaggtattgtttgaaggtcatttcgcactaatctattctgtagagggtttgttttccagctgtggcgcttttgtccaccattttggcgggtccacgtggtggagagcagatccatgcttctctctcgccctctccctctcagatttgagtgcaatgggatgttgtgttcttgtctatttctcagtggcgggccatgtgtcgaggcatgtggcatgacatgttgtatttcctttttctatctatagccttctagggctatagtcttgtaaaacttttctattatatcaaatgatatctctcactatcatgtgcgggtttcgtttaaaaaatagaatggagctagctagggagtattagggctccctgatgttttccaatcctgattgttgcaaataatagaagggaaagtgtggtaattgccaatccgattttagtgaaggtcatcatcaacatctctagttccccagtttctagtacagcttaccgtgggtgtctcttttttggtgttccataaagtggaaagcgcgataatttaggatgtactaatagatccgaaatttggaaattatagaattttcagaattttttaatccgaaataattaaatttgtacaaatttggtcaatgatggggcgaaggttggtgggagaccagaagggttggcaagaggaggaagatcgagaactccacctccccgcatggaaaaaggtgttggccattaacgcgtgattaattaagtattagcccataaaaacttgaaaatggattaatataattttttaaaacaacttccctatagaaaacttttgcaaaaaaaacgcatcatttatcagtttgaaaagtgtgcgtgcggaaaaagaagaaggtgagttggttaagaagggtggagaacatagccagttttgaacttacttgggtgttgtgtccatgcctctaataatctttcagcctatcttcttattggttctctattctactgctcctccgtgtaaataatacttgacattttggataagagtgatatcaaatattaaaatatttgactataaatattttcttaaaatatatatattactttatcatatatatagattagtctcaaaaagtactttaataaaatcatacatttgttgatatttgtatctatattttaataaaaagtattggtcaaagttgtttctttaaactgtatcattgtttaaatggcaagtattatctatctagagggactagtttttaatatgatttgataataataaccattctacccattttagataaacctgcagtggccaggggtttaggatggatagatggttttgaagtagatatagttgagatgtcttcgaaatatcctttgccctagattcaaaattctttcctatatcttccatttaaattttttgctgattttttaaattttatttagagtgaattgtactttgggcagaatttgtcaggaagttttactttggaccacctttcacataatatttttctttgaactacgtattttggccctatttcattttggaccagcccaactctcttagcacatcaacagcctcaagaacatcgacatgctcatgtcgacgatcttcctaatttacatatatgtcatgcttttgatggataagtgattggatgtgactacagaacagtattagggtgatctaagagcaataagggtaaagatacctaatccaaactgaaaaacaaaggataatggatggcccgaagtaaaatcactcttatttattac

SEQ ID NO: 9417 - DNA, 49434 bp, Oryza sativa
tgcgttgcaacgggtgaaggattttttcttacaaaatcataagctgcaattagaaatctgatcgtctcaagttagcatgtgagtatgtctatttaaagagatttgtaaaaaaaagcgaaagaacttaaaaatgaatcaaatagggatatgtattttaaaaaaacgaatggacttaaataccgactcaaaaaggattacgtactgaagtactggcaaaaacatcttcaatttttatatcttttaataattagttaagaataaatagattagattagagataaatagatatatagggatgatgcgttttttctgccccttttaccatataatttttgcgttgcctaccaatgagatttttttcgctgctttttattttctgacgttgttttattggcttttttgtcgccacttttttttcattgattacgaatcagccttctttttcgctattttgttggacggcgttttttccggtctttttttccggctcgtttttatatggcattttttttgcacgaatcggacctctttttggctattgtttttggacgggacttttttttcgcacgaatcggacttctttttcgctattattttttacggcgttttttttgggcttttttttcagatggcgttttctttttcgcgtgacttttttttcacacggaggatggaaacattttagactttttaagtagtactagcaatagtgcccgtgcgttgcaacgggaaaaacaccgtttgatagtgtgacaccttaaaaacctcaaatcggtaaaaatcaagtctaaattgatatattaacaaataggtagaaccgagtctaatttgatgaattagcataggatttaggatttagttttagatttatttttcgagcctagttaggagtttatccgacgaaatttaatttaaaaaatctgagctttgatcaaatttactttcggcccaggtcctcccaagacgacccaaacttgggctggccatcttcggcgagccgagtcaattcgacagcctgcaagtcgagcagctgaccacggcacatatgcggggacggtccgatgcacttccacagcccattgggcgcagcgtaatctgttgctgcggcggcggcctgacgctaggcaaatctgagccgttcgatctattggacggctccgatcgtcctcttgccgaatgaagtgccaaccaggagagaggggcaaaaccctagctcccaaatctctctctctcctgatcctatttctcttcggcgataagcgagcggaacaatggcgaaggcggcgatggcggtttggcaagctagtgcacgcgtgcggtaatgaccgccgagcagctcctgctttgccggctgtggggcgcacctgagggcggcacaaagccgtgccacggcgtcggtggtctggctaggtgggcgcgcaaacagcgacgagcaccgagcggcatggacctctaggcgggaggggcgacgccaagccgacgcttcccgtcttcggcaaggtatggtggaggggtgctccagcacaacgcgcgcacagggaacccgacacgactacgaggaggtgaaggtgtggtggtgccgcttcccgaaaagctccggtgagctttgggacttcaagtccggtaagtaatccgaacccttagcttaattgattttgactgttagggttcttacctgaaattagggttcttcgaatttggggaattttgtcaggaaatttcaatctattttattccctctttttgagttaggggagtttcaatatcgtttatcctcttttaattttaggaacttcaatctagtttatccctttgctcaatttctttttttttctgctttggctagtgtttcatcgcacggacggggacggagggcgctgctcggtcccctcggaaagattgagattaagataagataagatttttacagacgacggaagtaaattcaatcgtaagatactattttattcttttttgttttaattttttttttgcctttttccgtttcgttattacggacgatggaaacgttttcaagtttttaagtagtagagatagagacatatactacaatgtcacgcataatagtatttatttttttaccgcgtcacatataattccttttttttggaattgtaccgaattcgtttttgtccgcttttttttaccacgtccaaagaatcgattcttttttttgcctttttttcacccgatttcttttcgcctggtcttttcacccgattcttttttttttatcggacagtccttttttttcgcctttttttacacgggatcggattccttttttccccggttttttctcgcccgattttttttcacctggtttttttgcccttttttatcacgtccacggaatcggattctttatttttttaccctatttttcgcccgattttttttatcatacagatttggttttttttcgcctttttttacatgggattggatttgttttttcccggttttttctccctgattttttttcgcctggtcttttcgcccgattctttttttttatcggacagtcggttttttttatttttttcgcctttttttacattggatcggattcgttttttccctcggtttttttcgtcttcttttactgcagtcaccgaatcggattctttattttttacccgattcttttttttatcggacagagtcgttttttttggcctttttttacacgggatcggatttgttttttccctagttttttctcgcctgatattaatcgcacacggacctttttctcttctttttacgtgaactcaaagggagtcggatgtatttttcacgggagtcggattttttttttgtttttttacagtttttctcgctttgttttctgttttctcgcttttttttctttcctacggacgacggaaacatgttgtattttttaagtagtgtatatatatatatatatatatatatatatagatagatagagatagagatagtagaagtagaagtagatagatagatagataaaaatgaaaatacaagcatattacatggttacggaaaaaaaaagaaactagcataccaacgcagcaacgctaatgttcgtgaggccatcaagcaaataaaatggaggtagcttgtatttgtatgcaatttagatgtactagcaaaatgcccgtgcgttgtaccggtaatgatatggtgactgaaatttgacttgaactatttatatgaagaaaatgaattgtatttaatgaaatataaattttctgcaatattaattatactctttgaaattataacaaaagtagtcgtgcgttccaacgaaaagaaaaaaaaaagataaaattgaattaaaacatattaaattctaattagatgaaatacaaattttctgaaaaattttggtatttttaagtaggtaggtatataattaaattaatttataagtaaagtaagtgcgataaataaaatgttatggttggatttaatttttattaaattttctatattaattacactcattgaaattttcttagaatttacatagcttcattgctaattttgataatacaaatatcattttagtatttatttaaataaaaatcttttttttctctatgggcttttttcagcccattttcttcttcagcccgcaagcgaccaaagtctacttaatacccccatactccttctctcacttggtggaccgccagcccgcgtgcggctcaagtggtgtggccgaaaccctcgatcgatctgagctattcgtttggatggacggctcagatcagttccatattgatgaaatccctaaccctaacactaaccctctccctccctctcccctagccgagccgagccggccgcctccccgacccccgacgccacctctccccctctccctctccccactagcgccgctttccctcccatcccctccggcggcgccgctccctctccccctccccccagccagccgcctcccctgccaccggcgtcgtctctcccaccaccggcgtcgtctctcccccccaccggcgccgcttcccttcccttcaccctcccttctcgctgtcacggcgcagcgacggcggggtgcggcggagacagcgccctcccaacggctgcgtcgacagcgtcggcggcatccgtgctccctctcccgctctccttcccgtctcgccggcacggcgcagcgacggcggggtgcggcggagacggcggcgacggccatccctccccctctccctgtcagcctcgacggcaacgacgtcctcccaacggcggcgtcggcttcgtccgcgggtggatccgtcggcagtggcggcgaccgctggcggattcgggctccctccgcgcctctcttctcccttcggcaacagtggtggcgtaagctaccgccgatttttttagtttttttgcattttttttcatgtctattgctaaccaaatcggattgcgtacggacgaaaacacggataaaaattagacgtgacgaaaggaaaaacacgaatatttatattagttatagatagatatattagaaaaatattattatgtttctattatatttcaaattttacacgaatgatgcggggacagcagcactgcatgcagccacgtttccagcttttcgcagagagaagaattcaacgcaaagaagctcgaaaaagaaaaaaaaaatgaaaacagggggcccgtcgaaagcagcccatcctcagcccatagtccaacaccactaatccctaattccgtcctctccctcccactaccctcagccgccaccaaccagtccatcgtcgcatcctccgtgcaagcagcagccggctcgccgcctctgcccctaccttctccactcctctttctctcatcttccgccccaagcttgcactctcatcctgcccgtcgtggtgcgcccgcggtgcattttgcctcatgtgcactccgagacactgcaacgacggtgaagaggaggagaaggcggctacagtgaccatggagatggtagatctggcggtgggcggctagcaaggtgaaggctagctatgggtcgagggcagcagccagcaagcaaggcggaggtccgatttgtcggagccagcaaggtggagtctcaaactcttaggtccgatttgtcgattacttcctcttgcaatgctaattttgtttttattgggatgggtttgatttcttccatggatccctctgctttgactataattgaattggtgtggattagagtccaatttgtgtggattagagtctaatttgacaattcagtgttctcttttcttttcagtttcgtgtatgaactgggaattggaaatttagagacgatctagttgtgtaggaaattttggggtccaaattgacaaacttaatgttctcgcttcaatttcgtgtacgagttgggaattgagaatttggaaacgatctagctacgtgggaatttttgattttgttcatgtgtttatgcttgacttttccctgtctgattctgaggatgcacgcagctgtgaaagcgcattgtgacgggacgaatcgaagtgtgacgattggaaaattacgattttttatattaggtatagatatagaaaggattgaggagggaaggaaactgtggagtgtggacacaatcgaccggagaaatcaactctcctttgctcatgaccgaggcagactcgcttttgatggacgaacgctggcggaagcagaaaaaaaaaatcaatacggacacgataggacgaaatcgtgacgaggacagacgaaacgtcctatgaatatggaattatttttaatttttataataggtaaagattatgataagatgcatctagcaatcgtaaatggattcggatgaggtaccaaaatcttgacaaaagcatcttcaacttttataatagtagatgttttagtctttttatctctcgtctagatttactagcatcaattagatactatcacccttacaagtcacttgtattttcacattcacccctacaacttaattaggtacaaagacccccataactcaatttcccttctaactttccctccatcagaattaattgatctctcctcgtttgctcaatttctcatgatttcatcttgtttgtcccagtttctagtgacccgtgagcctccatgggagctatgtttataggggtggacaaaaagctcgggctcatgagcttggctcgggtttggctcgagctcgcgaagctcggcttggctcgaagactaaacgagccgagcccaagctgcctcctgagctcgtttgtaaatcgagccgagcccaagctagcttgcaagctgctcggtaggcttgtcaagcttgtgcaaaatctgacctggcccattaacaggtctggcccatgagaaaccctaacctattatgcgtacagcacaggcactgaggcacagaaacccttcccttcccagttcccacacgtccacgccgccatcatgagtcagcgatggtcgagggcgaggggcatctggactgggcgacagggcgtgaggaatcgagggcttgagggcctcaccggcgccgccggccgccggccgccacctccctcccctgcactgtcggccgccatctccctaccctgcgccaccggccaccgccgccgaaggccgccacctccctcccctgcgccgccggccgtcgcctccctaccctgcgccaccggccaccgccgccgaaggccgccacctccctctcctacgccgccggccgccgccttccttcactgcgccgtcggccgccgcctccctccctattcctagaggccacgccgctcgacgccctctgtgccgccggcccgcttcctcctccccgtgcgcggctgcaccgccttcggcctccctcctcagcgacgctcgtcgacagttcaagctggctcgagctagctcgagctttggaacgagccaagccaagctgcctttttgctcgttgtatttatcaagccaagccaagcctgtccctgacaagctttcacaagccgagccgagcctggctcggctcgtttccacccattacaccatgacacaatgacaaggcgagcacatttagggcatgtttagttggcaaaagattttgcccctgcaatgtcatgtagaatatacggacacatatttgaagtattaaacatagtctaataacaaaacaaattgcagattttgcctagaaactgcgatatgaatttattaagcctaattaatccgtcagcaaatatttaatgtagcatcacattgtcaaatcatggcgcaattaggcttaaaagttttgtcttgcaatttcctgaagaactgtgtaattggttttttttgtctgcatttaatactccatgtatatgtctaaacattcaatgtaacagcatgaaaaattttgtttgggaactaaacagacccttagaaatggtgatgggtggaagaccagaagaaaacgaggtggaagtttcttacatgctactaaaagagtactactccatccgtcccaaaataagtacagttttaacacttttcatgctcaacgctcgaccgtttgtcttatttgaaaaacaattatgattagtatttttattgttattagatgataggaattcctagatgataatacatgaatagtaatttatgtgtgactaatatttgtaatttttttttataaaattttcaaataagacagatggtcaaaacgcgggatacggatatctatagctgcacttattttgggacggaggtagtatcaaatttgaaactgactttactgctttggattttggacccttcaggacttgaaacattttgggacatgtttgttgttgtgatgttcaaaattcgaataatgactgacagttaactacacaagagaccaggctgagttggtttccaaattttcccaactcacctctctcttttttatcatgactgaaagatattggtttgttttttaaaaaaaattctatacgaaagttgctttaaaaatcatattaatctattttttataaaattgattaatatttaattaatcatacactaatgagttgctccgttttacgtccgcaagggactagttcccatccacaagtgccgaacacagcccatgtgtcatgctgcacccttgcgctatgattcctatcacaccaccatgttgaaggttgacatgggtcatgagaaattgagcaaacgaggagagaaattagtgaaaaatgaagggaggggaagttagaagagaaatttagttgttaggggtcttttatatctaattgagttgacgaggggaggatgaaaatacaataggggatatttggatttttccatatgaaattaagatatatataaaacacgatcccttttaaaatacctaccaccacacgtagcattagtagtgtagtaggatctaaatccgaacattgattattatggacattttaggttttttcttaattaaggtggaagggtattttagtgtttttgttgtggtccgaatcggtcgaaaagatgggctgctattgatcggccccagccgccctactctcgcgaaggcgcaggacgccgctgctcttctcacgctcatgcgttctcgcgacttccatacatcgtcactatgtgcgatagggtcagctcctacttttcctgtactagaaaaatgaagcttgcttatttatcttgtgatttttttcctggagcacatgtatactttttaaagtaattactttgagactgataaaatctatgtaaatatcatatattaaaagtattattcaatgtgtacttggatttatgtttgtagaatacctaggaagaattatagcatgacagtatacacaaaacaaacaggtgaatttcgtctcacttttgtaaatttaaattttgcatataataaaatactttttatttcttgctatttttctaaaaaatgttttaccttttctataatatgggattaacatgtttaagttacatgcttccaattttaacatatcacacttagcactaagggcatgaataacggtacaatcaccgtatacgagagaatgccattccgtatatattttctaatgtggaggtgagtgagagaagagagagatgatatgtctgttaattgctagatatatatgctacacacaatattttagacagcttaataccatatatgcactccatatacaaaatatagaactaaatttataatgtaggtaacatgttatatgaattctcttgtatatcatgtaaatatgttgtgggactattatagggcaaccgctctctaaactatttatcatgttctttttggatattgtgcaccaacatcctaaaatagtatgtaaatattgaaatattagtagaattactattttttgtcagctttttatatttgtttatacttatcttttttatacacaaattttattatttgttgttttatttttaagtaatatatgaatattataacccaatctaagcgtgtgcatttttttctttattacgttgcaaactatatcgtattctcttcttgagaaacatatgcttttaaaatggcattgacactgaaatttgatcattaatattcatgcaaattatattattattattattattagctataaaattaatactaatttaacgtcacaataattgtatatgagaccaatatactttgattttttttattccaagcatgttatatgctgcagtactcacaccaagggttcagctcgactcggctagcacaggcgcacagcacggccgaatgtggttagctgggatgagtgtgtttggtctagatagcagggacggcaggcgagacatccagaatttgcttgttattttttgttttctcccgcaccaaaacagcagtaaaacagcagtatatgcgtgtgacacaatggcggatttagtggatggtcccacccaaaaaaacagcatcaaccccactataaaaaatagcgactattaaaaagaaaaaaaaagcgatctattctactccatccgtcccaaaataagtagttttgcactattcatgtctaacctttgaccgttcgtcttatttgaaatttttttataattaatatttttattattattagataataaaacatgaatagtattttatatgggactaattgtttttaatttttttataaattttttaaataagacgtacggttaaacgttagacacggatatccacggttgtacttattttgggacggacgtagtatttctctttcctggcgcctggcacgcacggcccataggccccacacgcgagttgcgcgtgtatcgaattgatcgacgcgactctctcctccccctagcccgtagccctagcgacgacgcgatcgggatcggcgatctctgagactctgatctcatctgattttctcacgccacggccacgccacgcgattacagttcacacttcacagagccacgccgccgccggcgctcgcgcgagcgggcgcccccacgcccacgccgccgcgcgcgagtccgcattccgccgctggatcaaatcaagcatctcctgcgtacagtagctgccagccatgatcacttgtggcagcaatactttgagggcatctcgatcgttttcaggacgtctctggcttgacagctgagttgagattattcaggttgatctttttgcttggttcagatttcagacccgtcagactattcaattctgttttcctactcgttttacaggttctgaatttgccaaatgccgaccaaacgaactcaacatgacgtgattttgttggatgaagagaacataatgaagactttcatggtcattagaagacatagacccgataagaaaaaaaaaataatatggtaattttctttagactttcatagccatacaagcttctgtaaatcaaaattttacttaattactagttttatctatgcttgcattgtacatatgtgtttaggaaaaaaaatttaggtcagaccacccatatcctaaatccgccactggtataacaacccatttgcccaatgctttaatgacacgtggcataaagttaaatggtaaaaatggaccaatcagagataattagatttgcgagaaattggtgctgttccatagcactcgcgagagatgtggggttgggtgcatgtgcctgcattcgttactgttgccgctggtgaagttggtgatggcaaggctcttctgtcacgtgccactcaggtatctacatggctttagaagattggactgcactgagacctagaaccttccgcagggtatttcatgaagtatcagatacaaatcacacctaaaacggattagtgatatgcccgtgctaaacactacggtgtaattttaattttctttaaagaattttaaaatagcatgttaccaaaaacaatttcttgtatgatctatgcagttgagtcttaatctaatttatgtcgtctgtcaaatatattcatggcaagaataatatactgtgtgggtttaatagaacggattttcgccaatatctatttaaaagatgcattttcaaccctctaatttaaatatttaccaaacaaaaatcaaaaggttgaaagttttaaaaattgaaatgaaaatttaaaattttcaagtacaatttttcataattggagtaaacaatttaaacttaaaaagtggattaaaaatttttatgtgcatgaagatgagcggcgagtggtgacgagatagataaggcacacgttggccgctatcctttgagcacatagcacaagggcatgaatgtaaacccaaataacagtttggtatgaaacatatgtcaacgtaataatagcatgttcgtgctaatgctactgcggcatttggagcaacgactactataaccacaaattcacaaataaacaaccatttataacacaagaagttcatttaaaaaatcatatcgatggtgttcaaatccatacaaagattattacaattttggtcatttactcattgctacatttcatcaaagctacttggaaaaaaatatcatcttccaggaatcaagacagggatgaacgatttcatatcactggaactttaacccatgtctcacccttttgctaatacttcatttcactcttcacaacatagcacaactactgcactttagctaaaaagaacttctcagccatttcacaagttcacatgaacagaacaccatgttataacgaagcagccatttaataaaacaccttgtaaatgttataaccaataattattgatcaatttgtaatatatactgcaggaaactctggtatggtgttaaaaaaatagatacgcaaagtttctagcagcaaattaccttgttgcaatttacagggagaaaatgataatactcatggcaatacctcagattgagggcaaattaccccgcaacaggcattggtattccatcaaattttatgactgcaaaagaataaaaaaaaacttagctttgatactgaataccatcatgtttcgttttctgcccctcaaatcatttgatctgaggccaagtagagggaggagaagaacaacatttgcaggaacaaagaatcatgcagaagaaattatgcagtaattatgaacatctttacatttgatttgagaataaaattataagcaaattatggagcggccagaatcatgtatgaatgatccgtagttatcaactgatctacgatacactaaagatgcaaaatgtatgatcagggatttgctattaaaaaaataaaatggaactggattcattgttttgaagcaatgcatttgctgctgaaatggggaggattcctaacatgaggtgcttttatgtttcgtgaaaatcataagatatccatggcaaagggagtaaaccatgaaggaaatggtaagaaatgtgctcccggtcccctggtataaaactcatttacagacatgtagagtcaagggaccaactttgaaaaagcttccatcaacaactcgccgaacaatatgataagcctgcacgttttctacccagggataactccagatgattcatatcatgcaggtgctaaaacgggtgattaagcacatatgcttgacttgtgattcatatttcatggtaaaggctgacttggattttgctaacacatacagacaaaattgttgcattatactacttattttcactgcattgctatcagaaaccaagttgtcgtttaatacgatacaaacaaggaattcaattccaaatccttttcatggaaggacaacaaaattgacaatgcactatgatgatgggtgaaaaatcatgaaatttgtgcaaagtcatgattgacaatttaagaaaaatagtgtcacagttgtcccggacaagaaatgccagggaagtgcagctcaggctcagatgatgatgatttacttccaaacagcaggcaacacttgtctaaccgaaagtgcccaaccattcaactttcattctgaatttccgacagacgaccaaaagagagtaaccgcaaatgaagataatggagataaattacaggaaggcagtgcatctgcagcacaaatatgactcactaattcagacaaagaataccaaatcaaatgcatttgttcagatgatttagatgagacattcagatgtatcccttgtttcagagaactttgattctacgcaagtgctgagcttagttgcatctaaagcagagctagaaaggctaatgatcttttgtgttgttttctctcttggggaggaaaaagactaatgatatcaattcaaatgctattttgtcagtttaatcaaccacggttgttgtgttccgttcgaaccatcctttttttttctaatacttataactccatccactcagatcaatctcaacttgtttaaaaatgtgtacatccatcaggtattttagttgatgcagagacacatggaacatatattactcccacagatgtacacctacatagcgaaagtagtagaaagaactatccatgtgacaaccattaaaaacctgagaacaacctagttcccactgataatatttttggtcaggcaatgcagtttgaaaacgaacatcacttattgagccggtgtaaatgccagcgaactccaactaatataccctcttcctactatcgcaatcttttcaggttttgaaggcagatcaaataatgttgcatctgaatagacatgatctattcctagaatatttgccatggatggacagccaccaactgctgtgaagtaaagtgttcccatggtcatatcatcatcacctcaagggaaacaacattgcactgatgtgcaaaagaaaacatgcattttagtttcaggtgtatttgagtatgcagacagtaaaccaaatatgaaagcaagctaaaagtactaacttctgatggaaagtcatatagttatttcacaacatcctacattatgaagctatatatgaaatctcaaaaagctacatatggatggcagggagtttcaaggttggtggattccgaccacgcaccaaacattcattggtcttcatgatattagtaaattttgttactggtgactaactctttagcttaagcgctagaaaattcaatagaaaagctaaagatagatcatgaatttagtttagcctgaacttaaaataaaatgatgactaaaacatatcatcagctatttatcattccatatataggcaattcaattacagtttcacagaaacagaggagaaaaattaaggattttcagacaactacggtctgctgcaaattatatttaaaatagaaaatccattaaaaggtcacctctaatgtgcaaattctgcaggatttataagaccgggggataaggacataagtcttcactgcaggttacaggaagatgagcagctatacaagaaatcatgcaaattggaaaaaccgaggaattgtaggaaacctttccttcactcccagatcacagaaaagcaaaagaactcaccttcaatgtcatacaaggaattgtagtgcacctcacccagaaggttaaccaaagctatagaaaaggaacgaagggaatgatcaaataccaccatttttcattgggatagatttaccaaacccatgtgctaccatgaacctggtgccatacgattggaggtaaaaatatgagaaataattgcagtgtgtacaaacatggtagcatatataccttatcaagtgtaaaaccaacatatacttttgtattaaaaaaatcagcataagcatttacatgaaaagttcagcatatacgcatctacaggaaaccagagaggccttatttgtgtacatacaagatatttttaggtgacatgtctagtattcatttgaaaagggaactttatggcaacaataaccagcgcacagatttaacaaagaaaacacgactcatataattatgaatcgatacctagaatgacccaatagaacattcagtttatatactgaaaaggtaattcagtgaaaacattaagcttgtatataaggcaatacaacttctgactattgactaaaaaggccaattaatatcctgaacttcgcttctttttttttttggcattggaagaaaaagaagtatgtgcaaccagttcgtattagtaaaggattggttccaattaaatatcattttcattatctgtaaatattattaggtagcttgagcaattatttaccttgcaaaaaaaacagatcatatcattgagatgttttactgtgcttacaaagtaatagaggtactttcactttaaagagatataatcagcagtcgatcacctcaagtgcattaccaaatattgtcggacgacgcggcagtggcggcggtggcagttgaggcggaggccgaggaggaagtcgtcaaagcagcgctcttgacaaccgagtctcaagcaattcttacactggagcacgtcaacccttttgcctgatccatgctaattctgctgaaaacaaagaaataacacatatataccctcaacaaattaaagaaatggcaagtactgaagtaggtacttgacatatagagcaagcaggtctgaagtaggtaaattcggcagaatactggagctagtttatggtacacataaatttgtaagacttgatggagcaggccttcaatataatggtaaatgagatatttgcttaaagttgtcttcagctacaaaacactctacagaaaattatgctcatatacattgtaattaaagttgataattctcatggccaaaaaaagtgcagttaatgaaatgaccaaaggttgaaatcccaaaatttcactaaacgcaacacattggttgtcattgaatcactggagcatccaagatagaaatcacaaaatacatcaacctaccagcctcccaggtgtttgcagcaggaacacagggggacagggcactacctagtggttaccccaataacccactaaattttgcacaaacactcatgttcttaggttacagttcttgaagagtagttttgctgttgatcgcgacggagattggggatccgcagtaccggtggcgggataacacgacggcggcggcgcgggcaagatgcagggcgacgggacggtcggcggttgaagagggcgaggcggggcggcacggcgcgacggtcagcggtagaagctggtgggggcgcgggcgagattagggttaggggagggagcaagggtgagagcccctctggaaagaggatggtggaattgcaaagaggagggagggaggaatctgtggcggaggggaggagaccggcggtgagtcggggcgaggggagtcgatcgcgaggagggcgagaccgcaagagtgcggaggaggggggcgacggaattcagggagccgaagatccggaccattacacgaggaatgaaagaataagcgatgagtgaaaccatttgttaaactatagggttagagaagatagtaattataggcaaattttgctacagggcactttgactttgtggttttagctgtgggacatcgtccgaactcacttttggagaaaaacactccataacgtggtaatttgccaatcgacattgcgctgattagaataataatttccggttggagaggagagagaaatcgcatgaaatggccaatgcgaagagaccagctcttgcacgccggacgtcaaacgacacgtttttcgccgacggcgctggtcttgatgatcgtcgcggcaggcatggcggcgtcgtcgtcgcggcgatcggggcttctcggcgagctgccgccgggaggaggactgtgtctttttgcgcctcgagtgctggtgatgatgctgatgcttgtgcctgatgcctctccaatggctgtggtggctgtcagccttcctctccggcggcgtcgatgtcgtcgctgcggctcgtggcgtcgccgtcgagttcagtggtggggccagggcgtcgatggtgccgtttctgttgctctctcgtttgctcgggagcgtcgatgatgccgtgttggatggagttcttctcgccaccccttctccgccactgcgtattggtgttacggtttcctcctgctgttcctgtgatcgtgtgacctcctcggcagcaccgtcaccgacgtcgagtcgacgacagccacgacaggagtgccgccgccgccgctgccgacactcccgtcggggaagggaatgaggcgtccgcggtggggccgctagcgaaggtcaccatgagtgcgacggagaagcatgccagcacggccttgctaatcatcatcacatggccgtcgccgccactgccgccgtgcttactgccgccgctttgtaaccgttgagcaacaatgacgatgaggacggggagaggaggccgtggagctgcacgtgtagcgacccgctactcccgcctctgccaacttggtccagcaccgacaaccatgccttccttgctatctcacgatggcgttatcttctaggagagaagatagagagaagagaagagagataggagagctgacgtgtgggcttaagggtattttttatatttcgcgtgatttctatctcctctttaatcggaaattgttattctaatcggcgcggtgtccattggcaaattaatgtaaaatcaaaggtgtttttttattattctgtgataaacaattggcattgaagattattggttttgttatttggaatttattcacgaagtggttttggagatgattggatttataggtaaatcgcagattctgttatttcatgtgaccggtcagaccgggcagtgtgtgccggttagaccggcgtgtattgcgcggtcagaccggcgcagcccgcggtctgaccgactgactctgtgtcagtttcggtttcgggttgtttgtttggatatccgtgattgtttcatgattatggcttctagatggatactatacgtatgtaatactattgtttgctactaatgagtcaagttggagatagcttggtctcggaatatggtttctttgtttattttatgtgtaggtgactcgatgcctcgggagagtatttgcggtgatggatcgggagtcggcttggggataagacgacatccgtggtggttagagatcacgcgggatacttaggctagagttgatgcacgtggttgatggagattccatatggcatacgatggaggtatcgtgtgcgtatgggatacggagttgaatttggaaggagtccaaatttgatatgattggttatgtaaagtttgtgtcttgtactagagggtttcctaaggtgtttaggacttctaatatgagtttggttcgtggctttaggctgcctacctcgggtataaatagaggaggagcgtgatgcttccctgtatcgctttagagagcaattgagttgagttttgagttggggtttcgagtttagtcgaaatttttgtaaggagtgctattggtgcactttgtaaacacagagagaatcaatacagtcgtcatccactttaagagttctttgatttgtgtttcatcgggtttcggcggtcagaccggcggcgggcagcgatcagaccggcgggagcgaggcggttagaccggcaacgacgacagcaagcggcagctgatctcggcggtcagaccggttaatctacatcggtcagaccgacgacatctgagtggtcagaccggcatagcaacttcggtcagaccgatctccgtcgaattcgagggtaacttttatttccgctaaaagttttcggtttttgggtataccaaccattcaccccctctggttggcttagttattgtgattcgatgctacaattaacacgtttatggagtgttttcccccaaaagtgagtttgggaggtgtcccacgactaaaaccatgaagtcaaagtgtatgtagcaaaatttacctagattgtaccatacatcaatcacatttttttttccagatgtacctttcactacccaatactacaccatctcatgtatggtacaaataaacctcatttattggatctaatataattggtggttcacattcacccgagagtacttacaaaaattctaaaacgaaaccatcttataaacgtgcatccttgcgagttgcgatggaagttggtcatcactagtctttttttagtcacgattgaatagcgaagtcaacaggtttggtccagtacatttatcttcatcacaatcattaagaaaatggaaatgagacagatcaacagtcaacgctccaccttctcctctcaactctcttgctgagatcctgagacccgacttttcacgctgatatcgccgccggcagcgcctgttgctgctactcatggatgtggtgggggcggcgtcctggctggttcaggtcgtcctggagaagctcgtcggcgacggcatcgacgccgcctgggccgcggcgcgcgccgggggggacccgggccgcgcccacggcggcgacgtccgccgcctcggctcccgcctccagagcctccacgccctcctctccgaggcccaagagcacgcgcccatggcacgcaggcgcagcgaggccctccttcgctctctccgtagcctggagagcctcgccaccgatgctgacaacctgctcgacgaaatgctgtaccaccaaatccaccgacggctacatccggacgagcctagtacctcctccaactcttgctcctcattgtttgcagtccaactagtggagcccaataatcgcgttgccaagagggtgcgccatagtggagatggcgataccaccggtagaattaaagacatcctagagcggatgtgtgaagccggagatgatgttcgtgaggcaatcaagatggagaaactggacgtcagtgccgctgggggaggccaagatgatcgtataattcaacggaggccaacaacatcttactccactgagccaaaggtgtttgggagggacaccgtgaaggatcgcattgtggtgatgttgattagctcagagacatgtggtgctgatttggcagtccttccaattgtggggaatggtggcgttggtaaaactacactggcacagctagtctacagtgacacaagagtgcaagctcaattcagcaagcgaatatggatttcagtgtctgttgacttcgatgaagttaggcttactcgtgagctactcgattgtgtgtccaatggtgtcaataagcatggtggtatcactaacctgaataagctccaagagattcttgaggaggatcttaagtccgagcggctactccttgttttggatgacatgtgggaagacaatgataaaagccgttggaacaagctattagcacctctgagatgtagttcattgaggggcaatgcaatcttggttacaacaagaaatcactctgtagtaaagatgattgctacaatggatcctatccatttggatggtttggaagatggtgacttttggcttctgttcaaggcatgtgcatttggtgatgaaaaatatgaagggcatccaagtttgcaggttattgggaagtgcatagctaacaagttgaagggttatcccttagctgcaaaaagtgttggtgcccttttgaatagagaccttgatggtgggcattggatgagcatattgcaaagtgacgaatggaaactgcagagaggacctgatgatatcattccagcattgatgcttagttacatacacttgccttttcatctacaaaggtgtttttcttactgtgcattgtttcctaagggtcacaggtttgatggcttagatttggtccgtgtttggatatcacaaggttttgtttcttcgaacaataagaaaatggaggacattggccatcaatatttgaatgatttagtggattgtggattttttcaaagaagcacatactattctatgcacgacctgattcatgacctggcacatattgtttcagcagatgaatgccatatgattgatggttttaattcaagtggaatagctcagtcaaccattcaacatttatctattaatacaaggtatgcttataagtgggatgtatattcccagaagttttattcaaaagatgacttccagaggaagcttacttatgttggtgaaacagtgcaaaccaggaacttgagtacattaatgctatttggaaagtatgacgcagacttttctgaaactttttcccatatttttaaagaagtgcaatatcttcgtgttctgaggctacccacgctcacttatagcatagactatttactctctaacttcagcaaattgatccatcttcgctaccttgagctaatatccagtggtcctggtggacccttgccagaggttatatgtcagctttatcatctacaggtccttgatgtcgagtactgggtacacctctccactttaccaagagccatgaatgatcttgtcaacttgaggcattttgttgcccgtggtgaattgcacgcactgattgctggagttgggagattaaagtttctccaggagttaaaggaattccgagttggaaagactactgactttcagattggacagttgaatggattaagggaattgggaggatcattagcaatttacaatctagagaacatatgtagcaaagaggagtctaagaatgctggattaagggataaaatatacctaaaggatttgttgctatcatggtgtagcaaccgatttgaggtaagttctgttatcgaggaagaggtgcttgagagccttcaaccacactctgggcttaagtgtctaagtataaatggctatggaggtatttcttgcccaacatggttgagctccattaatccactcatcagcttagagactatctgtctagatagttgcacaaaatgggaggtccttccaccgcttgggcaatttccactccttagaacactgcatttgattcagttgccttcttcaagggttgtaccaactgtatccagtgacgactggactggttctgaaaaacatattatatttccatgcctagaagaacttgtgataagggattgccctgaactaaggacattaggattgtcaccatgctcttttgaaactgaaggctctcacacatttggccgtctccatcatgctactatctataactgtcctcaactaatgaatttaccacaatttggtcagacaaaatatttgtccacaatatctattgagggagtaggatcatttccttacatccgattgtttgtgcgagcattgtatatcaagggatgcgctagcccaagtaaattggatcaaatattaatgttgattgagggcaacctatgtcttcttgagaaattaacgattgagagttgcctcgatcttacatatttgccatggaaaacactcagcaaacttgtctctttggagatgctggtaattgtggactgcccaaggctttctttgactttatatccatataaccaagatgggggtaatttttctttcatgtcattgctcaacaagcttgtaatccgagcatgtagcattacagggaagcagttatctcacttgatcttacagttgcccttccttcattacttgacaattggaaagtgcccaaagataacatccttgttgcttggtgatgtgattaatgggagtgacagctcttcaacatctgattacctccaattgacaactgatggcatgttgcaaataccatctcatctcttaattcaacttcagtatttgagcatagatgactttccagatctggttctactctggaaagaaggcttccatggattcacctcacttcggaccctacacatcacaggatgcacacaacttctctcccccatgataacagaaaacaaaagatccaacaaaaactcttccctcctgccaccattactacatgaccttatggttactcatgtgcataatgagttgctacctttcttgctctcgaacctcacctcgttatccatatttgcaatatctaacagtccagagttaacatcccttgttcttcattcttgcacatctttagaaactttgatcattgagaaatgtgttgggctgtctgctctagagggtttgcattccctccccaaacttaagcatctacggatttttcaatgccctagtttggctaaaacatggggcccttcctcagtggacaggccaggtttctctttatatctagacaagcttgaaattgataccactgtgttatttaacacagaagtttgcaagaagcttccatctcttcgacatttagtgtttttcatggtaactattaacacaattagtcaataatttcgttggaacagataaacttgctcaatatacagtggtttctcatcacttcattttttgcaggcaaagaatgtgagatccttcacagaagaagaagaaaaagcactttgtcacctcacatctctccatgtacttgatttttgttattgccctaatctcctatcactgcctaaaatgttgcattgcctttcttccctgaagcagttgtcaatcaaggcttgtccaggaattaaatcattgccagaaaatggcctcccagcttccttacacgagctctacgtgagcagttgcagtgcagaactaaaggagcagtgcaagaagacaaaaaatgttagatgtgtttatgttgatagaaatgcaagcaaattcatagttatatgcaagctgctacgtctctattttaggtattattttacagttttaaaaagattagcaattttattttgtgttttagacactcgtggaatgggtgctctctgtataattgttttaactgtatcaattgattagtatttatttttgttgaataactggtattgctaacctcagtttattttttgccaacctggttcatttgtaggaaacggaagagatgagaaaaatgagaactactagttatgaatgaaccttcagtttctcaatttataaaaggcatgcctatgcttcgcttaattgattattttttgtcacaagaggaggatagaagatattactgatgaaggttcacatgcagatgaattcaataaaccttgtgtgcactcaaccattctgtttaatatagtagtctcctcagatatctgtaactggatggagcttgaaatgaagatgccatgacttcagcagattagttaggctgcttcatcaccagctggatcaataactactgtctacatgaagtcaagacaacacaaggtgtggctacacttctttgcagaagatttgtttcaattgcgtttgccattattttgtattaaatcatcttttcataacaacaaataaatatttatttgcgatacctgaagtgtccttgttctgactgtggaaagaacataggtgcaactgcaagtttgcaaactactatattatatagaataattgatctttctcttggaaacaaccactgtttagtatatgttcattcagtagtcagcacatcagtaaaataaaacaaaaaactatttagctgctatttattcttgtaaatgagggaattacgatattaactatatagttattctgatttgattttgtttaaggttttagcaagccgatgggggatttatttttgtgtgttttggaggatcaccaagctgggagcatggcagcgatcactatggctgcaatcaagaactgggggaagcaatgagctcatggtcctaaccaagtaagcagctggcagctgcactgttttactgtggtagtattgctctattctggttctgcattaccgatcttcatggctgtgaatagctaggaattttttaacagacaaatcgatcaccattgcccttctcttttccccttgagcattttggttaggtgataatggggaagtctgcactccgagagtgggactgggagcccatgccctttctgcagaacttatttgtctctgcacataataatatatcgtttaatttcttcagagtcctatttactatcgccactacagttgttttcagaactggactagtcatctctgaactctgatagcatgcataggaatgctggacagtgctatatatctcctttgattcttgaattagtgatctttttttccttcaaattgactgatgagttacttatttcaatcctgttcgacatcctacctttccactttccatgtcccattcgaatcctttattctgttgtttatttctgcagacctacttgtgtgctgacataactactttattgtgcctccatttcttaaatatcttcaagtccgtacatacacgacattttctcataaataatatattagatggaagggccaaaatgtttagcagcacatacttgttctaataatcatggccatcttagtagacgcttatttttttgcattcggcttgtactagtctaatacttatacttgcatacatttacgatagatattgcaatcagttgaactatgctgctccaagacagggccggccgtgatagtgtgcttttgcaatatggcgggctggcctggggcagcgttacagtgcgatcgtcctggctatacacagctatacatgcatatatagtttggttgctttgcgctggagtattagttaatctcacctttaaaaccaggccattaatttatccttatcatcactagtacagaaccttctatgtgtaacggcctctaatatgccttcagccgtcttgtcgatggcagttggttctctttaaacgtcctgagaaacctaccccaaaaaataagattacaatgccttgggctcccgtttgggccaactgggggtgccaacatgctcaccatgtggtgagtggtgggcctggcgagacccaacctgtccgaaacggtgccacggatccattcttgcccatttggctgtgtcaggtgtcgctgggcatgcacgaccatgtccagggctaatgacttagctctagtgtcttatctactacgccttttcgacttcagattggtgggggttccttccataaacccatttcacttatggcagagagcattgcttcacagctgggtgttgtcacagcctgaatttccgtttcaggatttataaattatttaataaactagaaaggtagcccgcgtacatacgcggcaactgggcacctccaaacataatatgagtgaaattttattataaatatttatgtgcaggtggatttttatcaaaatatttttattttattctaaactaaaattaaacttattttatgtgctttgaaccctgcttatttcttttacaattaaccttgcaacatataaattataaaataaaattacttgagatcgtgcgattttgaattgatgagaaaatattgtgtcgaaatagtggagcgattcttaagagaaaatttaggatattttaactccctagaaatatatcttacaacccaaaagaaatccaataatatcaattttttgatttattgtattttagtttttatattttcttttcattgcaacagtccttgtaaaatgtttgactttttctatttgcaatgggttttagatctagcaacatttgttcaaatttcaatttatgtcatgtccatttttatttttttgggagattttcattctataaaccatccttgaacttgaaatgatatgatctttgcaaatcgagacaaaaatataaatgcatataacatggcatagcgtaaaggcatacgctctaaatttctctcatcaaatattaaagtaatggtcatggagtttttagcaaatcatcactgaagtggagtatcttataacaaatacatgtttatagattgttctacactttataatttactgtagcatgttttaccaaaaatagaaaaatggacatggtatttaattattatatgaaattgacttgatttattgctaaggccaccaccaggttgtttaaatattaagattttttggtgcaaaccacacgcttatcagtatgatattcaactggacacatctttattttcaacctattatctatattgctagatgaatacttattatgattatgattagtgacttgatagatcatatgtgtaattcggatgctatgatcatcattcttttgaatatttatttatctcctaataagatcattttaaaagtaccaaggtcaatttgtatagatacatagccctcgtatgcatgttatgagaaattaattaagctggtagaaagtcgttagatgcctaacgggatatgagtaagatggaggtacatttgtgtttttttccatatagagaattttaatttcaattgccaaggagataaaaaacagagagaaaagaatggcgcacactgtacacgggcagagaggaaggggggtttggatttttttttctaaatgattaatctaacaacctaaaataatgtgtctgatgtttaagtcaaagccgatggtcaaatgttttgttttcttgttagaatttttaggattttttttacttaagaaaatgatgtaatatcttatgagcgttctctgatttaagagaatgacgaaatatgttaagagcgtttataagatgtgtaacggactttttcacaccgcatgccgcaaagaagaatgatggagggaaggaggttggatttttttccccaaaatttctaagatttttctataatttaggaatgtcatatagcagcttgagaagcgtttataagatgtttaatagattttaacgccacgctgggatggggaggaagggcaagaagtttaggttttttcttattacaaaaacctaacaaatcaatagccggatgctttgttctttttaaagattttctagtattttctctaatttaatagtaccacgtagcagcttagaagcgttcattggatgtttagcatgccagagcgagaactgatagacctagcaggtggaggtctatttatggtttttttaatgtagaaataattttgattttaatttcatatgaagatagctcgttcgtacctacgtgacgggggaggttctggatgtgtcttttttctgaaaaaaataatctaaccttctaaaataaaataatggatccactgatttaaatgaaaatcgatgatcggataagagtaccacttggcgacctaaaaacattttgtaagttgtcacttggcggcttaggagcatttatgggatgtttaatggacttttaagtatataatagtattttttctataatttctaagattttctttaatttaagaattaatgtcatatagcagtttagaggcgtttataaaatatttaatgaacaccgcacgggttgggaagggagggagagaggtttgggatattttattaaaaaaaatctaacaactaaatgtatccatcaacttaagtagaaatcgatggttggttgctttgtatttttaagattttctagtactttatataatttaattgtgccatctaacgacttagaagcgctcgtaggatgtttaaagtgatggaggaagagctgctagacctaatagttggtctatttgtgattttctgaaagaaaaaaaattgattttaatctcatgaaatagaaaataacagatgaaggaatagaagggaagtaccacagtagaaggaaagtaccacagtacgtacgttcgtatagtacatacgctaggaagttcgtatgatgccaaaactatgattttgtttgtttgtacattggttttggatgtgacttttcttttctaaaaaaaaagatctaaccatctaaaataatgggtccaccaactttaaaactagatggttggatttctcttatttattagagtgccactcggcgattgaagaacatttatagggtgccacttggcggtttgagagtgtttatagaaagtttaatggaattttagtatataatagtagatagattattatataatttatattaaaggttcattaatttacaagtgaagttaaatgtggaaaataaaatttcctaagcataaagcatggttggatttaattgatatttgtcgacgggggatacccgtagaccggatatagagggtattgggatacgctggtacgaggatctacgtagtacgacatcaagcaaacaggaaacaaggattatactggttcagaccccttgataggtaatagccctaatccatttgatatgggattatatagtggaaaccacagactacaaagagaatagcagaacttgatgataccgacgagaccgtagttgagttggctcgactagatcaccctggcgacttggttcctaaagactccgacttcgtaggctatggtggttgtgttggcggtaagattcgatcccttaggtcctctcgggggtcccttttataccgcaggtcagttggtctccaagtaggattcggagacatcggaccctacatgatacagtgacgacccagttctgtccaagtaggactccttccatctgtggactccgtgatggatttccttagcgtgtacagagaacgtccgtatacgcacaggtatgccatatcagtgtatgacgtatatccaagagtagagggtataccttatccgtaaccctgacagtagcccccgacttctgcttaaatgaactcatgtaactgattgcgacttcagatgtcggagtcgttgtcattctcgactggtcgatctcggtgtgagaacaccatgtgaagttcaacggtcataagtgaatttaaattgaagtccaaaaactgctgcgcgtaacggacccagaaatttccggcggccatctctctccttttcttggaattcgcaccgtcaatagtgcgcctatttaagggagttttgtggatccattttgaagtccgcctggtgcgaaaaactttccagcctccaagctttcctcgtcttctccgctcccgcaaaaagaaaaccctagcttggtcatcttggtcccttctccggcgatctccggcggcaacggatctcgacaagtccacttccaccagttcgtccctgaagaagctgcaggaagacggcgctctccttggtcgtgggactatggagagagaaccaggaggtactgaacccaaacccgtcctaggccgcatggttgcggttgaggactatattctttatggttttcttcctccaccttccgagtttcttctcctcgtcttgaatttctacggtctttctttgctccacctgaaccccaattctatcgccttcctcagtattttctcctatctttgtgaggcctacattggggtagagccctttcttgatctcttccgtttctactatgagttgcgctggatggaacctaaaaaggtgtccggatgtgtcggtttcaggcttcgggatggcatgaagtcgcgatacatccccttccagtgcccctcttctcgtagcaaatggcgggggaggtggttctatcttcagatagagaattcggatccagtcttcattgttcctgaggagcaaccagataagattcccgaatggaccaccaaacccgccctaaccccctcccttcagtctttcatcgatgtcattgatgacctccgagtacgaggattgttggggtatgaagtcactgccgacttcatcggtaggcagattcagccgccccaggcctgagcccacccagcctttgactattctgggccagaggacgcgacccgggtttctcctcggggtattgttctcgtatttcatattgcattctttatttgcgtgtttctcctgacttatcgagttccaacttctcgatcttataggtttaaacagcgaaaccgtgaagcgccgcgttggtcaggtgatgattagcggcactactacggcgagtaaagtccccgtccccctttgcgagaagggaaaggtcgatcgcgaggctgcgatcaacgtgagtgtatttgagaactcctttacttcttcttttctggatcgcactgtgacttcatgtatgcaggtccttcctctgactgacgtcatcgggccgctcgtggaccaccaggtggtggcttcgttgaaagagggcgtcgcccaggaggcgtccgacgttcctgctgctgccacgaccagtggcggcaacattccgaagagggggaggaagttttcctccgtgcttggtaatcgtcggaaggcgcccaccacatcggtaagcccctttggttctttattgcgtagtcgaaatatcttgtcctcacaccgtactcgttttacttaggcctcggatgcgtctcccccgcctcagcgacggcagaggctggtgacacttggcgagaagtaagtagacgaatttgaggtcttttaattcatcaaactttggcagcctgtcttcatggcaatcacggaaatccttcacagggcggcgcgggcgaaggcggtgcaagacgggtctggagggaactccagtgcgtctcctgcagcggcttcgacaaatgttgtggtcgtgcccaggagttgtgaggcgacgcccagcggccttgccggcggccttgtgcctgctcgaggcccgcccgctgacatcctcacctgggggagctccaaatcgagatggagcgcatcctccaggccggtgctcgcggcatagggtgcgagattgaggaggcgaaggcagcggcggcatcgtcggcgaacaaaagcaccaacaagctggcgcgtgacctggcgcggacctccagaagatgagggagctggtggccggcaacgagcggcaacgacaggggcgcgagcaccgcatgtcggagctcgagaacaacctatcggagatccgtggctcgctacgggttacctaaccagcttgcaccagctcgccggggagtgcggcgtcacgaccaccatcccggcgaatcccgatgagttctcgctgacgtcttcgctcgcggaactggccacggcgatggaggagatcccctccaagcatgcggccaggatcggggaggagacgtccaacgggatctacaccggggcgtgccacgtcctcgcgtgcgtaagattggcgcaccctgaactcgacctcgaatggatcttggatcaaggggctgctagtgacgcgcgcaagggcgtgatggaagaagtcggtgacttgggggagtctgttctccccctttttgaagagtaggattttagttcccctgtactccttagtcaattatgcttgtgaaacttttgttggttcaaactgctttgtgtgcgcagtcatctccttcgttttctttagcatattgatcccgagtactttgttgtcgttgtagagatgtcgatgttgaggatgtccagtagcgcgggcagcctgagtcactggtagtcattccggcacttgcgcttgagctatacgtgcctcgggatgttaatcagaacttgtccatggaagcgggcatggcgacgacttccataggttggttctttgatcttcatctcctttgctctttttgttaggatcgacttaatttgccgtgttctcggaagaggggcacgacttgacttagtcatttccatgttgagcagacctcgagagtgcgttggccgaccgagatcgtcggatccaatattggaggacgaaattcgaggtggccgaactcgagaggactatggtggaggtgaagaaggaccgagccgtagaagcgctccggggtcgcgaggtgtggttcaactcgtacctcaggagctgttgtacggccatggccggagtctgcagggaactccgagtaccttgcggggaccctgaggagtcggcggctggatacatctcgtggctgaatggggcttgtgctcagcttgaaggcgtcggcaagcgtatcgatgaggccctgaagtaggagtgtcgtcgatcgagccgatatgtaggggggcatgtgctggcctgtatccgagatcaccgcccacagctgcacctcgagttcctgcacgaaggattttctcgttctcagaggactcccgcagagatagataatctggcgaagtcgatggcgccgcttgtagagaaggtcttccagtccatggactgcattggccttcctggtagtctttatatcctgtaaaaaatatctcagggagacatgaaatatattttggaatattcaggaactgtaagaattacttgtgaaatagaaaagaaatctatctaactaagttttcttactctggatgcggtgtgtacgagtgtcttctcacttcgcaacttcgatcagtcacttgagtcatacactccccctagcccccagccttgtcatcggagaatttttctcgaaagataaggctcttggacctttgacctgccttggttgaacaagcactgatcctagctcccagccgtgaagttggaaaacccaatttccgattacacggcttggttaatacgcatgacgagaactcttacatgaccagatcttacatggtcatttgtctctacataatctgacaaggccttatccgctctgggcgtccccagccaaagttcccttaggttcctcagaggccttgtcaagacggcgtaaagggacatgaggataggtttcaacgctaagtgtcgtcgtggtaagggatcgtcgggaaggaacactttgatcgtagtctttacctgaaatcaactttattaaagtcgtaagatgtcttacaagtatggatactattgatttatacaaaaaatttacgtaattgatcaatgttccaggaatttactaactcgcgaccatcgccgtctgcaatcttgaatgcacctggtcgcaagacttgcatgatcgtgtatggtccttcccacttgggtgagagcttgttgcgccctgcttggttttgaacccgacgtaggacgtagtcgccgatcgaaagtgtgcgtgctctgatgcgcttctcgtggtatcggcgaagggcctgttggtagctggctgctctaacggcgactctttctcgatgttcctcgagtagattgacgtcgtcgtttcgctgctcctcctgattctcgtcggagtacttctgtactcatgtactctgatgtcgtagctcagtggggagcatggcctctgagccgtacacgaggaagaagggtatctccttgttggacgttgttggtgtggtacgcacggcccatagtaccgaggggagttcttcgacgcacttcttgtcatgtgacatgagcctgtcgtagacacgggtcttgattccttgtagtactatgccgtttgccctctcgacctgtccattgctctaagggtgagaaaccgaagcgaagcagatcttgactcccagcccaatgcagtaatcctggaagtcggcactgatgaactgggagccgttgtccattatgatgcagtgaggcaatccatatttgcaaaatatccctttaatgaatttgatggcgttgtcggccttgatttcccctgtaggtgttgcttcgatccacttggtgaacttgtcgatcgccacgaataggaacttgtagccaccttgtcctcgtggaaatgatccgagtatgttgagcccccagcacgagaacggccaaatgagagggatagtttggagcgcttgcgttggtagctttgtgtgtttactatgaaattgacaagcttcacaccgctgtaccatgttgcaagcgtctttgagggcagtcggccagaaaaatccttgtcgaaaagcttttccatccaatgtgcagccggcagcatgtgacgagatcccacagatcccttcatgtatgttgacgagatgtttaccgtcgtcggacgagacgcatttgagaagtaccccgtttggcgccttcttgtatagatcgttgctgatcatatagtagattttgacatggcgggttattttctcggcttttgcatcgtccttgggcaactcgtcgctacttatgaatttaatgagtgggatccaccagtcatctgtggtctcgatgtcggcaacaacgcgttctgcctctgtagccaccgagctgatgtcgggggcgagtgtgctatcttcgtcgtttgcctctttcaccaatggctttgtccggatgtccagaaaggtgctggattcgagtggctcccgtctggacgcacgccgtgcaagatcgttcggttcgatgttgtccttgcggtatacgtgtcggacctcgattccatcaaatattttttccagcttcctgacttctgcgaggtacttggataactcggggctagagcacttgtagtctttgtgcacctggtttgcgactagttcggaatccccttttacgattagtcgcttgactccaagtgcggttgctactcttatcccagcgagtagtccttcgtattcggcagtgttgttggtcgccctgaagttgaggtgaaatgcgtgcttgaactgatctctcgaaggtgatgtcaagatgaaccctgcccctgctccttggctgttgagtgcgccgtcaaacaccattgtccacgtttcgttgtcggtttgattgtctgacctgttttcaggcatagtccaatcggctacgaagtcggcgagaacctggtacttgatggctgttcgtggcacaaagtgaacatcaaattggcttagctcgactacccatttcgcaatgcggccgacaatgtctttgtttctcacgacttcaccaagaaggaagtaggaaacaactgtgaccctttgggcttggaagtagtggcgtagctttcttgacgtcatgattactgcatagagcagttttcggatcagtgggtatcttgtcttcgcgtcgtggagagcttcgctgacgtagtagactagtctttgcaccttctctctctcgacaacaatgacagtaatcacagaatatggcgtggcggcaatatagaggaataattcttcattaggttggggagcaacaagtacagggggatttgacaggtagcgcttgagtgcgatgaatgcctcttcggcttcctgtgtccatacaaatttgtgttgtttctttagcagagcgaagaaaggttgtcctcgttctcccatcctagcgatgaacctgtttagtgccgccatgcatccagttagcttctgtacttccttgagtcttgtcggcgacttcatgttctcgattgccttgatcttctcgggatttgcttcgatccctcttccagagacgagcaacccgagtagctttcccgacggtactccgatgcacttctccggattgagcatgaggcgatatcgtcggaggttgtcgaacgtttcccagagatcgtcaatcaatgagtcgcttgtcttggtcttgacaacaatgtcatcgacgtaggcctcgacattgttcccaagctgatcattaagtgccccttggaccgttcgttggaaggtgtttcctgtggttatcagtccaaacggcatcttaacgtagcagaatacaccgaacggcgtgatgaatgatgtcttctcctcgtcctctttcgccatgctgatttgatggtagccggagtaagcgtcaagaaaacttaacaactcacaaccagctgttgagtccaccagatggtctattcgaggaagagggaagtgatccttgggagacgccttgttgaggtcggtgaagtcgacgcacatcctccacttcccgttggccttccgcaccataactgggttggctagccactctggatggagtacctctctgatgaagccagctttgagaagcttgtcgagctcttctcgtatggcctgttttcgatctggtgcaaatctccgcagtttttgttttactggtttggcatcgggtcgcaccatgagtttatgctcagtcacctccttggggacccccggcatgtcaaacggctgccaagcgaacacgtctgcattatcgcggaggaaggtgatgagcgtgagttcctatttctcgcctagtgatgccccgatcttgacggtcttgtcggggttggtactggagagcagaacgatcttgattacgccgtctggtttcggcgtcttgttcgttttgctcactttcttgggtggctcagctgtggcgggtgggctgggcgtctgctcgaccatgtcgaggctccgcttgtcgcattgtaccgtcagctttgcgttcccttgaatagtgattgttcccttcggcccgggcatcttgagcacttgatacgcgtagtgagatgcggccatgaacttcgcgagtgcagttctcccgatgatggcattgtatgctgtatcaaattcagcgacatcaaaggtaatctgctctgttcggaagttatttgcttggccgaaagtcacaggcaacgtaatcttgcccaatggtttggacgatgactgaggagtaattcgatggaagggttgatcagtgggcgtcaactcgcttcgtgggattcccatcgtgtccaaggtgctggcgaagagaaggttgatggagctgccgccatcgatgagaacccatgcaaacttgatattccgaatagtgggttcgaccacgattggatatcgtccaggggtgacagcagtcttggggtggtcttcatctcagaactcgatcttctattcagaccatttcatcttgggtgcagccccccgccatgtcgaacaaatttcatgctccactttcttgtactcttgcttcgaagagtatgccgtagaacctccgaagatgtgcgagacatggaggtcggaatctgggtatgctgagtccgagtagtgaatagctgcttccgcggctttctcgactacatgtactcgcttgcccttctccaatgccagttgctttgtgagcgactttttgaagacgaggcaatcctccagagagtgtctgtccgacttgtgtatagggcaccatattttgttcgtgtcaccaccttgtgggtctgggtgcttgggagggtccgcgtattctgccgcaaggacttccgcttgagctttccttttctcactcttgtgacttttcttcttgcttgattcaggtgcgtccttggctggtttcttctctccccctgtcttcagcttgtcattcttgcgtctcagtgcgtcgtccgcgtgagcgtatcgatcgacaatctcgaatagtcttcgagcagtcgtgatccgccttgttgccaactcctgggtagtatagctatctctaacaccggtcttgaaagcgtggatcacagaggtgtcggtgatttcggggattgtatttctgcacccattaaagcaccgaacatagtccctcaatgattcgcccggattctgtgtcaacacgtgtagatcgtcttcgatcgtgtggcgcttctaagttccttggaagttagcgacgaactgctgccacatatctgcccatgaagaaatcgagtagggcagggggtgcatcagccatgaacgcgcagaacctttcaatgccgtcggcaaataattcaccaacgcgttgtcgtctgctccggcagcgtagagtaccgtggagtagacctaaaggaattcttctgggtcgatactcccattgtccttctttattgctcccggtcggaatctctcaggccatcggacatcacatagcaaacggctgaaagctctacacccgccgctgggggcggtgggttatcggctatcgtatgtccttcgtggatgtctatctgacgatgaggatgaagaggatgatgacgacgacgatgagtcactcggttccggtgtgcaattccgaggatgacgtccgagttctcgagaatcctgacgacgctccccgttgtcgttccggtgtcgatctccgtcgtcgtcatcgttatggcggtgccctcgaccagtattgcctgccacccgctgttcgtgatcatcgcgttcgtggcggctgtggcggttatcacggtcttggttctcgctcgggtgtcctcctcgctccttgttccctcgacgttgtgaagagacgcgatgtcggaaacgattttcgttgtctcgcgcgcatcgtgcttctcggcggccattcaaatggtcatggagatcgctggtgccgcgaggtggaggagtggctcgtcgaggtgatgtccgctactcaggtggttcaccatcggcgccgccagctatcagttgttctggctgtgctccggcagcggcctcctcgaacgcgttactaagattagccactgattcccgtagccgttctgtccactgtgcaaggtcatcgtttagaacgggatcataaggggtttccctcagtattgcgttgatggccccgatatgctgggccggcgtaaccacttgattctccgcttctgcgttagcgcgcgctgacgtgctggtcccatcgatagcaaatacatcacgtggtgtactcgtcgacgatgagccctggtcttcgagcaagtgtagaactgacggctcgtggggatcgatgtcgattaccccaacgaatcgatctgagataactgtcgctccttattccttgtccgcatctctaagagagattttttgacttctggatcttaggaggcgacgtcttcatggcgctgagaagaaccttgcagcttgagaggtcgtgattctttgtcttgtggataggacaatagacatcacgagttagaaaagtacgttgaattccatgctctttgcaggcacggatcttagcttgtacatcgagaaaaacccaacaagcttgcaaggtgtgtttcctggttttgtggataggacaccaggaccttgtcgcctcggaagttatccttgtcggctcgtgattcttgtcggaaggacaagatttggccatactaggatcttgctcgggctcagatgtcgtcgatgttccgttctccacttctatgggaggatccttcgacatggagtcgcctagggttttaaccatgacgttctcgcttccggtcattggtggaccagtcgagatcagcaccctggtgtaaatcgagaaaacaatttcgccgacttgggtccacaccagcattgttgaagtagaaactccttggttgatgccggtgttgacgctgttgtcgatgaagcttgacgacatagtagtagaaccttgagtaccaaaagcccctacctggcgtgccactgtcgacgggggatacccatagaccggatatggagggtattggggtacgctggtacgacgatctacgtagtacgacatcaagcaaacaggaaacaaggattatactggtccaggccccttgataggtaatagccctaatctagttgatatgggattatatagtggaaaccacagattacaaagggaatagcagaactcgatgataccgatgagaccgtagtcaagttggctcgactagatcaccccggcgacttagctcctgaaggctccacttcgtaggctgtggtggttgtgttggcggtaagattcgatcccttaggtcctcccggggtcccttttataccgcaggttagttggtctccaagtaggactcagagacatcggaccctacacaatataatgacgacccagttctatctgagtaggactccttccatctgtggactccgtgatggatttccttagcgtgtacacagaacgtctgtatacgcgcaggtatgctatatcagtgtacgacgtatatccaagagtatagggtataccttatccgtaatcatgacaatattaaattctccatgattaattatactctccgaaattttctcggatttttcagagatcaattcctaattttaataatacaaagaatatttcagtaattattcacatattaaattaatcgttaaatgagctggattcaatttttttaaatactttgagtgcccagttattttcaggatttttcttcaaattatttgagcattggaattatttttaacaattgaaagatcatttcagtgattaatttaattagaaaagtaattgaaatcaacttttccttttcgggccgaattaggaaaagtcctctcacttcctctcggcctgcagccctctccctctctttccccaagtccagtttcgttccctccttcaatcgggccgaggaaaaggaagcccagccgaagtcttctttgcctccctggcgctacagtactctatcttcaacctccagacagagcccgagccgtcccaagcctgtgcagccgtgccgatctccttcccaattccgaccttcccgttgctcctctttctaaattagttgcgggaatggaatcctctcaatctcctctacaatttcaccaaaaaatccccaatagtttctatataaatcctttccaatttcgcggatcaatctttcctttctccggcgaagatcctaaactttcccgagtttttctcgtcgatctgggcccggacccgagctccctcccgtgcctatataaagtaccccctagtcgtcctctacctttcccctcaagtcctgtccttcgccgtcgccggaaacgccctccccgcgagcaccttctcactattacctaatgatggatatttaattgtagctcacggtggtcaatcatgattggttaattaattaattgcgaattaaaacttgctaatggtgggttgtgagcacatggttttgatggtcgtgctcatgacaattaagcaccgtttcacgagtttcggttgtaaaacattaatcgtgccaaccactagccagcatgggcaacggctttaccttttgtatagcatggttcactgcagggcaccagattgagaagtagcggagataagcccacgggggtcgctgggagcccatgccttattttataagggggtgattatgatcaaggaacggtgcgctgtggtggattgtgttatgcgaggggtagtgtcacaactcctttccgaggtaccgtggtggtattgaggcgcatggtgacatgttgtggggctgtatcttgtgggtacagtggtacatccctgtccagagtaaaactattcgaatagccgtgcccacggttatgggcgagtctaataatgtcttttgtgattagtctcacacttctcaccataataaatgatgctataactggtaataatttgattagctcctggtttagaatggtacattcctggtttggaatggtacatttctgatttggagatagatctgtacaacctggtatggttgttcaagattggttggacctgtgcagcatgggtgtgctgttcagtgttgattaatattgatgattaattactctattattttacaattctcaagtgtttgctaaatactgcttttgtaaatgagccctatattatgccattctgtggtatctttgtgcacttgcatagttgtgtggcttgcagagtattccatgtactcaccttgcaataatcaattaaaccttagttgaagacaagttgcgaaggagaagacgtttggcttataccccagttgagcttgcctgtgggagtggagccggagcttcgctagattttattttccgctgcagttttcttcgtggtgaggactaagtgcctcttatgtaagtatttattattttagttattttgatgaatctgtatattaaattatcagtttgtgtacctcggctgattcctggacgaggattttaatacacattagttcggaaattactagtgaatttctgggcgtgacaggtgtgaagtacgctcgtcatcccaacccactctggggtcgtgcccccacatccccgaaaaggtagttatgctatttttagacgagcttgttgaagatgtttttgatgaatagatgtatatcttatatgtctccatgctcctctcactgaggaaagtgtgacttacaaggcaaaggtgcctgggtcctcggacagggccgggtccgaggcagaactttgcttatattctttggttgtatatcttataggtctccacgctcctctcactcagcgacgtgggacttataagggcaaaggtgagcccgggacctaggatagggctgggtccaaagtagacctctgcttatattcttaatatgtataactcgtaggtctccacactcctctcaatgaggattgcgggatttacaagggcataggcgagcccaggacccgagacagggccaggtccaaggcagacctctgcatatattcttaagatgtatatcttataggtctcctcactccaggacctgagatagggccaggtccgaggcagacctctcctcatattctgaagatatatatcttgtagttctccacgctcctcattgtaggacttacaagggcaaaagtgagcccgggtcctaggacagggctaggtccgagaaagacctttgcttatcaggacataagtcgttcaaggttctttctagaagagtttttagtcatctggaagagtttttagtcattgtagattttatatgtttcaacctcctctttaaccaagaagggtgatacatatgttggcaaaagtgggcccagagtcactgaatggaccggccccaaatctatcttttccaatcattattaagatgtatttcttataagcttcgctacccttaggagagatccgctcagcctacacagacccggggggctagacacaccacgtttaacaccttaaaatgtagattttgtacataactatgctccaacaagtgaagcatgcatgatttatgaggacgagggtgtgtctggccccagagccaattgggaccttggtcaccttgatttttcattcaatccagtggacctaatatttttaaccattggatcaatctctaatctctaaaagacttaaaagactgttcctttttcatttaaaagacttatcttccaaattccactccctaccagcactgtacatggagtcgtaagtatttatgtgcttatccttggttccttggtccacctctacgcctcctctctttctgtttctttccctctcttattcctatttttatacaatattagttagaaagcacaatacatgagcacagttgatgattaaaaaaattataacatcaaaattgctattttatctgtttatatcgttagattatttatgactaaatatatggttaaagatcatattcattatatcgttagcgaatgaatataagagacgaatgccaatgataattaaacaaattcactaaattccacgctacttgcatgtacaagcctctaaggtgtcaataaaaaatcaatagcatttcttataatgatatgattagaaatttcctaccaaaattttattttaagactcattgactaggtatttttcttaaaaatattatagggtcctacatataagaaacacaatataagatatacatatttgataaattaaaaaaaaagagatagcaggatggtgtgtgtgaacacaattaagaagggcaatacctcactttattgaaacttattttgttatacctgtttttttaaaccaaattagaacaagcacgttcgtgcgaatgcgcgggctaccttccaaaacaatcaggtaacatcaaagcaaaaccaacacataagaaataaacaattattaaattttattttgtgaatctccatccatagaagggaactatatattatatataagtacttccaagttccaacaaacagccacacagccacacaggtgcacattcgggccattatttagaacgcacaaagctgatatatagcatgcagccatgcacgcatgcagatgcaggagcatgacagacccagtgtcagccactccagtacatagggctacaattacaactatatatacgcgaccaatccctaaaccgagcaagctatatgctgcttcaggctgcagagacacccacatagttttaattaattaagggattgatctgtcgccggagtttcatcagttggcgacgacccggagtttcatcccggcggcgcagtggccggggacgccgcagatgtagtagttgacgcccttcttgaggaggaacgacgcggtccccgtcgccgccgccaccgagtccgccgagctgcccaccttgcagctcctgtacgtcgccgcgtccacggccagcacgttgtgtgcgcccggtttgtagttgaaaactgcatgcatatatatatatatatatgtgcagagagcagacagcagtgtagtcaggacgatgagtgatatatttttgttctttacagaaagggaagtgtaacttccgatctccgtaacaactaaatatgcacgcggttatattcatggacatgggaatttaaattctgatgtgtgaagtcatacaaccatgatttcaccattgcaaccttctggcataacttatagcaactaaaagaaagcgtcttagatgtatatggacgcatgtgttggcaacaagacataatataagaaactattaatttgcactcgttttaactgatataactggcttgaaaaacgttacttatgctgatcagctatgtagagcggaaaagatatatatatcatcgagaattatatatactccctccatccctaaatgtttgacaccgttaactttttaaaatatgtttgaccgttcgtcttattcaaaaaatttaagcaattattaattcttttcctaccatttgattcattgttaaatatatttttatgtatacatatagttttacatatttcacaaaagtttttgaataagacgaatggtcaaatatatttaaaaaaatcaacggcgtcaaacatttagggaaggaggtagtagtataaagagagaagatatatagagcgagactgtctctgtgtataccaagagtgtcaccagcagcgaagacctttccatcagcccagctatcaaacgacacagagaagtcccaaccgttggagtcaccaacaacatgtgtttcagccagcacagtggtcgaaaacgcaagggccagcaaccctaaaaccacgagacccacactgtacttccccatggccctatgcgataattacgaactaactgtgtttacagcaagctagatttacttgtctgatatgatctatctgaatgtgcatgcaaagtagcaggcttcatggctccatttatacccgtaagcttgctacctttttgtgatgcttgtgttagtgcatacgtgctgattttgattcctctagataaaattatagataactagttcggtcaccaagctttgtggtgcatgagtaggcaagcatgaaaatgttttttctagcttgtgagtggttaattattccatcgggtgaagccactggtaacgagaagttaaccatgggcacaattttaggttaattttggacataccaatagcctgagcacttgtacaaacccttccatagaccatacgaagataaatcaatgttatcgtttctctgaaggtgtaactattgcgaaccagctagtttaaaccacgggcccaaggtaggatttgtttctggttggatgctgtaaagttcagttacagtgcatgcatgtacctaaaagctgtggcgaagttgtaattaaaaccagtggacaccctacgcgttgtagcatgataatttagaaattcttgccgctggaaaaaggctctctactcccagtttacaaccccttcaatcgcaggttgtaaaccgggacgtccaactctggttaaaataaccgggactaaagatttatttttagtccaggtgtataacaccaaccgagactataatatttagtcctagttggagttacaaacagggactagagtttttctttttttcattgttagttttttcttttatcttattgttttttttgttgcttgcatctattgatttcagtaccatcaccccaaatccccatagatcatacacaacaaaatcatccacaatatattcccatccacaaatctgcaaatcattcacaaaataatccacaatacatgcccatccacaaatccacaaatcattcacaaatataaaaatttttacagcatctacaaatcatcattcacaaaataaaaaaaagtccacagatccaccggaagtccacagatccaccggccgtgcgcggcctcccgatcgacttccatcggaccgctgcctagccggcgcccggctgccaccgcggctgcttctgccggcccacctttccctcgtgcgccgcccacctgcgtcggaggggagagggtgggagccgccacccgcaggtgaggggaagtggaggaaggggaggagagaaaatggggagaggaagagggagaggaggggaggggaggggagggggaggagataagatcgagactgggagaggaggaggcacgctgggagagataagatcgaggctgggagaggaggagtgagatgaggaggcgcgcggctcgggtagagatttttttaatcttggtcccggttgttataaccaacatataaaacccgggactaaatatgaatctttagtcccggttgatattaaacataatggagtactcacaaccggactaaagataatggagtactcacatgttcgtgaaccgggcctataacaaccgggattaaagataatggagtactcacatgtttgtgaactgagactaaaaatgatctttagtcccggttgacaaaaaaaatatgtttagttccggttagaataggaaccgagactaatgtagtttttagccaacccagcaaagatcaattctcaagtagtgtccgttacagagagatcgaagtaccaatcctaaatgctgatataaaatggacgcattaattaaattgctgacataatttgatgatatggctaaacttaagagatattttgtactccctccgtttcacaatgtaagtcattctagcatttcccacattcatattaatgttaatgaatatagatatatatatatctatttagattcattaatatcgatgtgattgtggaaaatgctagaatgacttgtattgtgaaacggaggaagtagtaattacttcctctgttctatattataaggcgtttggctcctccatttttcgtctatattcactaacatcctatgattttagatatatatatatatatatatatatatatgtagcacatatatctatccatgcatgaatttatttaaacgtcagaacgtcaattaattctaatggtggaaaatccctattacaaaaatcatctgtgaaggccatatgctttccttttcaaaggcggtaaaaaaaaactgtatgtgaaaatggctaatgccatctcagggtaatgtttgtggaaaatatttttacatgcatatccttagagaaacctccttgcatggacagttttcctaaggaaccgtctacagaaatctcaaggaataagtttataaaaaggaataagttcactttgactcccttaaaagtgacccgaatataatccatgaccctaaaccgcaaaaccggatatctcgaccccccaaactattgaaaccggtgcaatttgactccctaggcggttttgctgacgtggcgcctacgtggcggtattgaccgggtcttttttacatgtggcgcttaagtggcattagaattaaaaaaatatgtgtgggacccatttgtcattcacacaaaagaaatgtgggccatgggccctccctcgctctcccacttctctctctttctctccccttcttcttccccttcggctggtggcgcgtggcggtaggcaagctaaggcagcgaaggcgagctagggtgccgccaaagttctcgctgctgccaccggcggcggcatcgtcatggtcacctcgtcggcctgcacggtggccccgcgggcacccgtcttggtgtccaccagctgcacgcaggcggaggagcaagaaaacagattaagcgtgaccggcgtgacccaacataacacacgaacaaaaagaagaaaatggaaaacaaaatattgtactccacttgtaatcgtagatgagattgagaatgatgagcagaacaaactgcattggcattgtatatagaggagaagaaataaagaagcggaaattgaggtgaagtaaagaaaaggatgaaaactttgcaaccaagggagcagaagcggaatgggtcgaggaggtcgagggcgcagatctagcagttgtaaggggaggcggcggcctcgccgacaacggtgctggcgtcgcgtggctgggggtgctcgttgaggaagaggaccttggcgctgttgatgacgtaggtctggacgccggagatgtcgaggacatcctccacctccgtcacccgcaccacatcattgtaggaagaacgccgtatctgcaccaaaaaccaaatcgataataatcttcctggaagttgtttgcaattgcaattgcaatagaatgaa

SEQ ID NO: 9418 - DNA, 7959 bp, Oryza sativa
acagtacaatggctgtgcggctctgctgctgctgcttcctcctcttcgtcaccatcgctgccgccggtggctccctgacgcggacgaacgtcgcgacgctgccggggttcgacggcgcgctgccttcacgcctcgagaccgggtgagacaactcaagaatcattcccccatctgctctgacgattttccatgctccctgcatcagtataggtgagaggtcctgtggtgtcactctgtacaggtacgtgacggtcgacgaggagaacggcgccgagctgttctactacttcatcgagtcggagggcgaccccagcaccgaccccgtcctcctctggatcaccggcggcgaccgctgctccgtcctcagcgccctcttcttcgagattggtcagcaacccaacaacaacaagcctccttgtctagagtgtcaggcgtggttcatcccgttgcaattattaccacgcagggccgttgaagctggtcatcgagccctacaacggcagcttgccgcggctgcactaccacccttactcgtggacaaaggtcgccagcatcctcttcgtcgactcgccggtcggcgccggcttctccttctcaagggaccctaaggggtacgacgtcggcgacgtctctgcttcgatgcagctcatcaagcttctcagggaggtaattcattactacctggttttttttggtccattggttccaggttttcagcgtacttggttcttgctagctcttggtttaatatctcgtttgactctgattcagtggttcactgagtatccgcactacctctcaaatccgttctacgttggaggagactcctatgccggaaagatcgtcccgtttatcgtgcagaagatctcggaaggtgctgcaataatgttaccttggttactctttaaatctcaaaggaatatgctcttgttttcttatgtgtgatctaaatagttatataaaaaaatcattttataccactgaatttattcaacgatttattattgacttcatctccatctatggtatatatatctccaactttactttttctataatatatcattggggctgatacttttcaaaaatgatgcttaaaatgccttaagacttacaagagtgactattgattaagcaacatgaagatatatatacatatatatatatatatatatatatatatatatatatatatatatatatatatatatttacttacatagtcttcttacataatataatatagaagtttttttataactaatatagaagtgatatattatagagaaagacaaattcgatgaccaactgttgaactataataaatttaatggcatagaatagattttctctgaaaaaaaaactattttgacaagttagattaatgtcataaaattttaaatttgattttacaaattagcgaaacaaatatgacgtgagcacacgtatacgtaatccattctttttggtatgagttactgatactgaatttgaactcccacatatttgtggataaatatattactagtagtgtgcctgtgctaatatatcctctaattctttttcaaattctttcacaactatttaaatacaagcaacaacgaggggaaattgcctaggattaaaattccatttccagatttctacaggatctcttttcaagatcgatcagttcgcgcaccaaaaagcttgacaattttgtgctctgttttcagatattgaagctggcgtcagaccgacgtttaatctgaaggtagagctcatgtctttttctataaagctacaactcccggttaatatatatatttgaggtgttagtgataactagggtgtccatcgaacattaaaaaaaaacaaaagtatatttcctatatcaagatatagttgattatcaacttgagaccaagagatagtttaaaacccctcatttagcaatggatagacaacctgtatcatgatctgtaaatactgcaattttactaacatgttataatatatacaatataggatcatgtccaacattttctcttaaaaaaacatatacttcatccctccttaaaaaacctagaaacggataaaacctagaaacggatggtatattttctagcactacgaatatagataggcagtctgtccagattcatactattaggaaatatcttatccaattctaagttctcatattttaggacggtagagtagttgattaatgatctagcggcaattaattttatgtttgggagattgtcagggctatctggtaggtaatccgagtacaggggaacgcattgacctcgaatcaagagtgccgtacagccatggagtcggaatcatttcagatcagttatatgaggtgaacagtcgaacacgcggctcacaaaatttaattatgtcctaaatgattcctgcgtgatctttgttaactctgattgcacatgcattcacgtggtttgtctgaagatgataatggagcactgcgaaggtgaggattatgacaatcccagcaacgtgatttgccaacaagctttggctaggtttgacagcgtaaggagacaagtacactctttttttttcctcgattgtattagttgaattttcatattatcgaaaaaactatttagttgcatttttatattatcgagaaaaagaatttcttggataattctgtctgaattaacttattaactacgaatgtctaaaaaaatggcgttttctgtgtttctcaagaatatctagtccttttagtgtaatttattctttttgcagacagtagtaacatatatacagtagtaacatgtattactcacacgacagcaaatacatatccacgtgtccatcctgtatgtaggactaacacttttgcccctttggagcaaaatatgcacctgctgttataaacatacataggccctgtttggatccggagagctattaaatagcctttcggaatcttgctatttaggagtattaaacgtagattactgataaaacccattccataacccctaggctattttgtgagacaaatctaacgaggtatattaatccatgatttgctacagtgacgctacagtaattagccgctaattatggattaatatacataattaaattcgtctagcaaaatagcctaggggttatggaatcgattttgtcgttaatctacgtttttaattaatacttctaaatagcaagatttcagagggatatttaatagcccagaggatccaaacaaggccataacagagatttgctaaccagctgaatgcccgtattttgatagaaaagaaaatatgtgcccgtattaatgtgttatcttgctatagagaatattgaccttaatctaattttatatgtgtagacttgattgtttgtaacttaaactttgtatgatttggaccctagttttcgggcacattatatataggtagtcccaaataaatagcattcacgtgtagttctcaaattgatgaattttaatatttaaactaagaaggtggccagcgcgtatgcacgggcatccatattatttaaatgtaatattatattttgatatgtattataattaagggcaactcaaagtcacacgtatcttaaaaaccattcatcgaaatttaaataaatgatggattaaggtcacatgacttttgaatcgatttaatgataaactgccgtagctaattatctgtggacccctgtttttataacaggaatcattcgtgtaaacagtaccatttccctggatcaagtagtctggtacacgagttcatagctgaaataccaaaagcacatacacgagagtctagtgctaattattacatcataagcccgtaggcattgtcttaaatcatcggaccgagcggtccggaatacatccaaaagcaaaaatagataaggcagcggaattcaggcagcggcataccattgccacaggcaacgaccgtactaagacctactgagcgccattgtcttcatctccctcctggtagtaggcatagggatcctcggaagcttcatctaccgcttctgattaattttatatttgtaagggtgagtaccaaccgtactcagcaagttaccacagcaacaatgcatatgaaaggggtatttcaaaggatggctatggctcttttgcgctaagccagttttgtaattcttttcacaaacctaagacctagcattgactgatcaaattttagtaccagtgtttgtatttaaacaacgacggttctgtccaccatccattgtgatcccaaggatagcttcccgccattgagtcgttatggttttctgaggacgcccaccttcccccttctcaggaagtggctccaacagcataaaaattcgtcatgcaacaacccatcccacataagttaagaatttagagactagccaagtgtaatacatgtcccggtgctcaataaccgcgagcacggctattcgaatagatttggttcactcacactgcagtggatgtacactttactcgcactccgcgactgcccaacacatgagcctcgtctcaacacatgaggcgcgtcacggcaaagcttttcgataacctcgcattggcagtatccgctctatgaacttaaatcctcatgcactctaggcgtccatgtttctagcagtgtgaggagttctggcggtcccgggaaagagaagtctcacacatattaaattatggttcaagttaagttctctctctcacacactcatggcagttctaccaacggcgacaccgatgtagggcacgcctctcggctctacctcaacggttgtcccatcgtagcgcacctgcctcactcaggggtgaaccatctatgcagggatactgcctccgctcggctatctaatccgctaggtctatacccattcgagaagtacggttgtacgggggtcgtttcatgcttaactttatggctcggtccttaattgaccggggacggtactagcctttcccagataccacccaaatcatccgtccgccccagttgaaaacagttgttttcgctttattttcctttcacaaatcatgttatcaatttcatggcaatgtggtgctcatgtctccacatgccgcatctcaattaccttcccaaaggtaattgcccaagcatttagcatttgataaatatgagtatgcatgatcctagaatagcatttctaagcaattgtcataattgactagggactcatacgtaaacatggataaacaataatcaaggcatggcataatcacaagtaggatgtgcatcattgcatgcaattttatttataaacaaaataatttcgcaattaggatcaacatgttcaaggaatagtgatgacttgccttgctcaaggtcttgggggtcttggccttcacttggatccgcaactccctcgggctctatagttacctgcgaaaattgatttggattcgattagaattcaaataaaaatccaaataaatccaaatggaagtcgaacgcgaaagtcgattcttttatattaactttactattcgcgtactagggcaaacccaatttctttttgtatatcctaactattttgtgggtataaatattttgttatcataagtttttaatttaatctacccgagcgttatatccatataataggttggaaatttctatcgcaagctaaatatcgaacggaatccaaaaattatcttataatattatacgatttaattttagtctaggactaaacgactaaatataataaacgtctaaaattcctagtgattaagtccgaatttctaccgtgaatcaattacttatagagattacccaaaataatctataatagtctataagaattcatctaatcgtttagttcttaattacatttaaactactaccgcgaattgatttcttgtagaaattaccaagaataatccataatttatattaaatttcgcaattctacgactataactaatctataactaaattctaattattttaaattttcaaaacttccctaatctccctctaatttcctatttatttcccttttctttttcttcccttctttttctttttccttcctttctttttcttttctttttttttctttctctctctcctttcttttcttttttccttctcactatcccttttcttttctttttccttctctctctccctcccggtttctctcctcgttccttcttctttctctccctcggcttctcccttcctccctctccctcggctctctctctacccggcggcacggcgacaaacagggggggaaggcagcgactcaccgacggcggcggcggcgacgacggcggcggcgacgacggcgcacggcgcggcacagcgcggcggcttcgtggcggcggcgcggcggctcgaaggcggcggagcggcgggacaacaacggcgacgcgtggagatggggagggaaaagggagaggaggaggggatggagtggggagaggggagattggtgggcttttataggggaaagagaggataagggggagagggaagagaagggaagggcggtggaggggggtgaggcgacggcggcgatgtgacggcgcgcggcgcgcgggcggagatgacgacggcgcggcgcggctcagggcgcaaggcggcgcggcacgtggcagcggcgctgggcgcgaggcagcggatgcgcggcgcgaggcgacgggacggcgcacggcgcggcagcggcacggctcgaggcggcgatggaacgcgcacgcggcgacgggatggcgacggcgacggcgcggcagtggtggcgcgcggcgcgaggcggcgatggtacgcacgcgcggcgcgaggcgggacgcgacggcgacggcgcggcaacggcaatgagatggcgacggcgacaggcggcgatggcgacggtggcgcggcggcaggcgacgatggcgacggcgcgcggtggctctgggcgcgaggcggtgatgggacgcacgcgcggcgcgaggcgggacgcgacggcgacggcgcggcagcggcgatgggatggcgacggcgacaggcggcgatggcgacggcggcgcggcggcaggcgacgatggcgacggcgcgcggtggctcggggcgcgaggcggcggcgcgtggtgaaggtggcgagagagagagagggggaaagaggaggagctgggttaggggaccacgtcgaacacctggcggccgatgaatagtgactttttctatttgtcccgattttagtgtattttccatataaattttattccacaattcctaattttgcatatatgcattttactcaatatttgtgttatcttaactaatgaattcaccctagattaatattactcatattttatttttatataatttatttgagttttaattagggttaattcttattccatcgtatttaaatttaattgatccaaatatggtcgcgataatattttatttatttctatccacacctaatctttattttaatttgtatttattttaccaatttgtttttaaggtttattcctaattaactattctttactcacgattaataatcttcgagatcaaatccagataaaatagacgaataagatccgcatgatgcaattaatttaaaaagtttttgaaaatccgtatttttagagttttgattttgtcggtcgaattttcagggtgttacaaacctacccccttaaataaatctcgtcccgagatttcttaccagttttcgaatagatgcgggtactccgtcctcaagaattcttcgctttcccaggtggcttcatcctcagtgtgattactccattgtaccttgtacatacgccacactttgctcctagtcctcttttctacttcatccaatatccggatcgggtgttctggatacgtgagatcgttgctaatgtgaatctcttccagcggagcttgttcttccggcactggtaagcatttctttaattgggacacatggaagactgggtgcacatca

SEQ ID NO: 9419 - DNA, 6667 bp, Oryza sativa
ctgcgcggcagtggtggcgcgcggcgcgaggtggcgatggaacgcacgcgcggccctaggcgggacgcgacggcgacggcgcggcagcggcgatgagatggcgacgggacaggcggcgatggcgacggtggcgcggcggcaggcgatgatggcgacggcgcgcggcggctcggggcgcgaggcggcgacgcgtggtgacgttgccgagagagagagagggggaaagaggagctgggttaggggaccacgtcgaacacctggcggccgatgaatagtgacttttcctatttgtcccgattttagtgtattttccatataaattttattccacaattcctaattttgcatatatgcattttactcaatatttgtgttatcttaactaatgaattcaccctagattaatattactcatattttatttttatataatttatttgagttttaattagggttaattcttattccatcgtatttaaatttaattgatccaaatatggtcgcgataatattttatttatttctatccacacctaatctttattttaatttgtatttattttaccaatttgtttttaaggtttattcctaattaactattctttactcacgattaataatcttcgagatcaaatccagataaaatagacgaataagatccgcatgatgcaattaatttaaaaagtttttgaaaatccgtatttttagagttttgattttgtcggtcgaattttcagggtgttacaaacctacccccttaaataaatctcgtcccgagatttcttaccagttttcgaatagatgcgggtactccgtcctcaagaattcttcgctttcccaggtggcttcatcctcagtgtgattactccattgtaccttgtacatacgccacactttgctcctagtcctcttttctacttcatccaatatccggatcgggtgttctggatacgtgagatcgttgctaatgtgaatctcttccagcggagcttgttcttccggcactggtaagcatttctttaattgggacacatggaagactgggtgcacatcagcgatattctctggtagctgtaactgatatgcgacttctcctcttctagccgtgatttgaaagggtcccccatatcttggtgctagttttcccttaaccttaaacctttttgttcccctcatcggagaaactttgagatacacgtaatctctttttttaaattctagatcccttcttcgggtgtcagcgtaactcttctgccgtgattgtgtcacttttagacggtctcgaattaggcgaaccttctcttcggcctcgttgatgatgtcaggtccaaataccgcccgttcacctgtctcagaccacatcagcggcgtccggcatcgtcgaccaagcaatgcttcattgggggacatcttcaggcttgcttgaaagctgttgttgtaggagaactcggcctagggcaaacacttctcccagtctttactaaaatccaacgcacaagctctcagcatgtcttctaggacctggttggttctctccgtctggccatctgtctgtggatgataagctgtgctaaaagcaagataacttcctagggcttcatgcactttttcccagaaatgcgaggtaaactgtgtgcctcgatcggatataatcctcttaggtataccatgaagacacactatcctagtcatgtacaactcggcaagtttagcactgctatagtttgtcttgacggggatgaatcttgccgtcttggtgagtcgatccacaatcacctagatggaatcgtaccctgttgcagtcttgggcaatccaacaatgaaatccatacctatctcatcccatttccattcggaaatcctgagaggttgcaacaaacctgccggcctctggtgctcagccttcaccttctggcatatgtcgcagagtgctacgtattcggccacatctctcttcatgttgggccaccagtagccttccttcagatcctggtacattttggtacttccggggtgtaatgagtatgccgatttgtgagcctcctttaggattaatccttgcagtcctccttgttcgggtacatacaaacttcttctcctttttgagtagttgtgtcattggccgggctatctttgagaacccctcgataaacgttcggtagtatccggccaagcctagaaaactccgaatttcggtcaccgacttgggtgccttccattccgtaacagcctccacttttgcagggtccactgctactccactggctgagattacgtgacccagaaaagcgacttccttcaaccgaaattcgcacttgctgaattttgcgtataacttgtgctttcggagtttctggagaaccaatcgtaagtgttccgcatgttcttcctcatctttggagtagatcagaatgtcatcgatgaataccaccacaaacttatccaagtaatccatgaatactttgttcataagattcatgaagtatgctggggcattggttagaccaaatgacattactgtgaattcatacaacccatagcgtgttgaaaacgcggttttggggatatcctcggtcctaatcttcagttggtggtatcctgatcgaaggtttatctttgaaaacaccttagctcccttaagttggtcgaagagatcatcaatccttggtagtgggtacttgttcttaatagttacttctttcagtgatcgatagtctacacacattctcatgctaccgtctttcttcttaacaaatagcactggggctccccaaggtgacgaactggggcgtacaaatcccttttcttgcaactccctaatttgctttttaagttcttttaactcattgactggcatccgatatggtctcttggatatgggggcagttgcgggtatcaggtcaataatgaactctatgtcacgatctggtggcattccaggtaaatcttctgggaacacatcaggaaatcgctgcactacgggcattccctttaggggtagcatggtaaatatacctccggcacgttcggttagcctaggattttgatccatggttgctctcatatccgatccccagggtgtgatcagggtaacttctctacgtctacagtcaattactcctctatgctttgctaaccaatccatacccaatatgacatcaagggtctgtggtatcaaaaccataaggttggagggaaacaccacatccctaaggcgaataggtacatcaatgcaagctgtgtccacggctatttcacccccaggtgaatgtactaacattggttgccttagtttaactctggttaaattgtgttgttgacttgctttcagagatataaatgaatgcgatgctcctgaatcgaagagaactttaactggagtgaagttgagtgaaaacatacccatcagcacgccttggtcttcctgggcctcttcagctcgaacgtggttcacttgcccgcgtccaaatccggtagcggtcctgttagtctgcggagtcctgaatagacctcgtccagcagcaggagtagcagtcccatgaatagccgttgcattagctccggtgcgaatgggtgtcttgtttggatgaggacatttattggcgaaatgcccatactctccacagttgaaacagcttcctggccttactgatccagtggcggcctgattcggtgcaggagctcggttttgaatggtaaccggcctgtggaaattgctggaggtggcaggtcgactggttgtcaccactgttggtctccatgccgaagaggttgcccctttaggacgctggggtgcggtctggggcgggcggttcatggcaagcctccttttacgattgtgctccacgaccttccggtcgttttctagtctaacgaccttattgattaaactctagaaactatcgtggtcttgtccaatcatgggcccgcgcaactcgtcatttaagccttcaatgaatttgtcgatcttttcctcctcgtcggcaagatctctagtcgcgtagcgcgccagctgagtgaaacagttcaggtactcttgtactgtggtattcccttgccgtagtctcctgaactcattcttcttcatccgcatcaccgcggcaggcacgaagttgtcacggaagtctgtggtaaattcctcccagtttggttctccagcatcttcttctcgggcttccttgtatgtgtcccaccagtctccgactggtccttccaattggtttgccgcaaagatcactttatcggcctcacgtactcgaacaagagttagcttcttctcaatgatccttaaccaatctttagcatccattggttcttcagctctggcgaatgtgggtggcttggtcctcataaactctccaaagcttgatccgccacggttgccttggttatttgcaatggcttgcaggagttgggtttgggtggccataactccggccagggtggttaggtcaggtgtctgggtttcgtcattgctggttgttgcccgacgtcggcttgccatctgtgcaggttgattgattgagtaagtatcctaattctctagctattttttacggctttatcccattaggggagattgttttgatgtgaactttattttgcaagcatggtggaataaactcatttataacacaaccacaatagatatcataaataacatcacagagtttcacaaatagtacataaatcatgatgcaatcgactgcatacatacgcagtccagttaaggtttgtccaaaagatacaacgaactaatcatcaaactactcgtcaatctaggtaaaggggggggtgtctcgcatgctatccaaaaaccatctgatacgagatcgaagctgcaaggagtccgtcagtctagtcctccagccatccgtaggatcctggggcaggtagagggtggtcgctggcacgcgcaaacctaagtccccacggctcagaagtagtggcctctggatctggcttgggcctcttgcccggaggtcgtgtgctcttgcgagcagtgctgagggtgcgagggcctccgaggaaggtgatgcggggaacaggggtctcatcctctaaaggatcagtgatgtctggctcgatctttggctcggtgtcggtcccctctgtctcggagtcgacctggatcggagtctccaaactggaacccagctgcggagaaggtgtagggatcagtggagtgtgcaccatctccgggacaggtggctgtgtcgctgtcgggtccactaggtaaggtgctgactcggtagctagcatactagcctctcccagaagaacgtggaacgccggtgggtatggcagggtgaggaataagtagcggtcacgacctactgctgtggaagtagaagcccctgtggtgctgatcttggctgctcgaagctgctcctccagctggctgacgtgctcctgactctctctcagctgctcctcaagagtatccatcatcccgcggcgatcgttgtactggtcagataactgctggaactggtcgccgtggacctggagctgtgccttcagtgagtctatctcactgccccaagcctggtgctcctcctccaattgaagctgctgcactgagaggtcagtcaactcagtctccagctctcccatacgtctctggtggtcgtcaatctccaacagagcctcctcgtagtagtcatctactgcctcagcccatcgtgacaaccgagtcaccatcgggttgtagcagcagggcgtgtcctgaactgtgcaaactgagttgctctcctcccggaacgggtgatgagcaaactcggtactcgctaactcagctcggtggatagagctgagtcggaggaaggcctctcgggctgcatcctgcattgcggtttctggcaggtctcggtggtgacgtgtcagaaagctgtagtccaactcggaagggactcgggggtgaacctcgacccaagcctcccaaactgagccacactgtctcactcggtatgacgggaacccagagtatcgcagacgcctcaacatccgatgcagctcaatgacatacccctctgattgaggtaagctcaactcccaggtagcgggtgaatccggatctgccatctaattttaagaaaaacccaaagtcagttgagagtaaaacttgttttgtaaagaaaatagttaagagtaagatgaaaattgtaccgagttttgtaaacatagcgtttttatttttgaaagtattactaaatgggaatttctcccttggccaacttagaaaaggggtggggcgccttttggtcttttcctacagtcgtatggctctgataccagctctgtggacccccgtttttataacaggaatcattcgtgtaaacagtaccatttccctggatcaagtagtctggtacacacgagttcatagctgaaataccaaaagcacatacatgagagtctagtgctaattattacatcataagcccgcaggcattgtcttaaatcatcggaccgagcggtccggaatacatccaaaagcagaaatagataaggcagcggaattcaggcagcggcatgccattgccacaggcaacgaccgtactaagacctactgagcgccatcgtcttcatctccctcctggtagtaggcatagggatcctccgaagcttcatctaccgcttctgattaattttatatttgtaaggg

SEQ ID NO: 9420 - DNA, 19884 bp, Oryza sativa
ttaagttgtcaagtaaataatgaggtatttaaatcatacacttgagtttggaatttggtattctacttcatcttctatatgcttaagtggatattccgatgctgattttggtggttgtagaattgataggaaaagtacgggtggaacatgtcattttcttgatacatcattgattccatggtcttctaggaaacaatctagtatttctcaatcaactgctgaatctgaatatgttgctgctgctagttgttgttcatagattctttgacttttatctactttgaaatattatggacttacttttgagaaagtacctctcttttgtgataatactagtgctattaacattgctaagaatcatgttcaacactcacgcacaaagcacattgatattcgctttcattttttgagggatcatgttgagaagggagatgttgaattgcagtttttggacacaaacttgcaacttactgatattttcactaaacctttggattctaatcgttttgcttttcttcgtggtgaattggggataattcatccttttggcatgatttgagggggagtttgtacctcatggttttatcaagcaaaaaatatgacaatgagaaaaattgagaaaagagagctttgtttatacatgtggtattttcttgtacatgctagcaatactttgaaggtttatttgtctctaacatagcttgtttgtattctagtctttgcatgagatttagattttgctttttaagggagatgatgcatgacacttaaattctatatttgaattaagtaaatatgcaatgttgacgctagcatgtggtttgatttctaaatgctctatatatatgctttattgaattgttattcctcgaatagctttaatttcttattgtgaaaagagaataaaaatatggaaaaaatgaataccgaatccttggaaatagtcttgatgacaaggaagtattcaatgtgagcaaaataatgggtgccgaatccctggaaacagtcttgacgatagggacgtacccagaataaaagagaaaaatataagcaaaaaggctcaagaaaagaaaaagttaaaaattctcttggttattttctgctaaaggttatttgagaaagagtgataaatgcaataggtctatatgtttagtgtttatttttcaacctatgtgcttgttaagatgttgcattataattcgtatgaaatcatgaattttgattgttgattcaagcttaattgtaaactctttggttcatggttatattttaatgcatgcttgctatattatagatgggttcatcttctttttattgcaacaaatgacatgatatgctatatgtatgctaagctcttatccattaatgaacataattcctatgcttgatgaaatcattgtcaaaagggggagaagccaagtgaaaatttttggagaagcaaatttctttcttttcaaaagtaagagaagttttcttttggattttcgagcacgatgtgtacgtttgtacgaagtgtgctttttaccagttttgtttttatttttccaaacaccaaaacatttttgatgggtttgccaatgtgttcatcaaggggttaattgtaaaatcaaaggtgtttttgattattattctgtgatgaacaattggcattggagattattggttttgatatttaaaattcattcacgaagtggttttggagatgattggatttcacaggtgaatctacaggtactactggattgggtccggtcagaccgggcagtggttgccggtcagaccggcgcaactcgcggtctgaccggccgactctgtgtcggtttcggtttcggattgtttgtttggatatccatgattgtttcatgattatagcttctagatggatactatacgtatgtaatactgttgtttgctacaaatgagtcaagttggagatagcttggtctcggaggaatatggtttctttgtttgttctttgtgtaggtgactcggatgccgggagagtatttgcggtgatggaccgggagtcggcttggggataagacgacatccgtggtggtcagagatcatgcgggatactatggctagagttcaatacacgtggttggtgaagattctatatggcatacaatggaggtattgtgtgcgtatgggatatggagtcgaatttttaaggagtccaaatttggtatgattggttatgtaaagtttgtttcttgcactaaagggtttcctaaggtgtttaggacttctagtatgtgtttgattcgtggctttaggctgcctacctctagtataaatagagggggagcgtgaggctttccggtatcacttttgagagcaaatgagttgagagttgagttagggtttcgagtttagtcgaaatttttgtaaggagtgctgttggtccactttgtaaacacagagagaatcaataaagtcgtcatccactttaagagttcttcgatttgtgtttcaccgggtttcggcggtctaaccggcgacgcaccggcggttagaccggcggcattggtttcaccgggtttcggcggtctaacctacggcgcaccggcggtcagaccggcggcatcgcagtggtcagactggcgggcacacggcggtcagaccggcgtcggcgacaagtttcggcggttagaccggaagatcaacaccggtcagaccggcggctacgcttcgatcagaccggctaatctactccggtcagaccgatctccatcgaattcgagggtaacttttatttccactaaaagtttttggtttttgggtataccaaccattcaccctcctctggttggcttaggtattgtgtttcgatcctacaagtggtatcagagccttgttttcttctttggattttaaccgatctagagtttttgccatggctgatagattttcaactaagcctcatgtttttgatggaacggatttttctcattggtgtagtaggatgcaatcatacattatggctaaagattatgatatttggagaaaagtttctcatccttatgtgattcccgaagaaattaatactaccgctttaaaacttgagtttgaacaaaattgcaaagctcgcaatattcttttgagtggaatttctcgttcggattatgatcgtgttgctcatcttcaagctgcccatgagatttggattgctttgagtaattttcatcaaggaacatataacattaaagaacttcgtcgaggtcttttcaaaaaggagtacattaaatttgagatgaaacctggagaagctttggatgactatctttctaggtttaacaaaattttgagtgatcttagatctgttgattcttcttatgatgctaattatccacaatctgagatttctcgtcactttttgaatggtcttgacatgtctatttgggagatgaaagttacatcaattcaggagtctgttaatatgtctactttgactttggattcgctttacacaaaactgaaaacacatgagatgaacgttctttctcgtaaagttgattctaagtcgagtgctttggtttcttcctcttcttctttggatgttgatacttcttcatcaaagtcttctattcttactttatttaatgccacatccgatgaccaactcgaacagttcgagaaggaggatttggctttggttgctaacagaattgctcgagctatgaacaatgccagcttcaggaaaagaggtggtccaaatcgttgctttgaatgtggttcgattgatcatcttcgttcgcattgtcctaagcttgggagaggcaaaagagaagacaaagatggtgagaagaccaatgacaacaagccgaagggtacattcaaagggaggaagatcaaggagaatctcaagaaggcttttgatcaagtgtacgccgcgtttgaaccactaagcgatgtagatggggatagtggagatgacgataagggaaagaacatcttcggtgttcgcttcatggcgcgtggtgaatcggattcagagtgtgaagacaatgaggtaagtgcttttgaggaagctattaatattttgagtgcaaaaaataagaagtgtgagaaaatgtatagaaaacaggagtttatcattgaatctcttaattctgaaattgctagattaaaatatcttattcctaatgatgatggttgcaaaagttgtgaggttttaatgaatgtgatttcaaaaattagagatgtcaatgctgcccatgatttgaaaaataaatcttctcttgctcttagttttgctttgcacacacgcactttggatgagttgtttttgactaaaaagttgttgcaaaaatatcaaattgcttttcatgctagtttgatgtttaacatgatttgtgctaaaaagttaaaacaatctcatgatgttttggattgctcaacatctaatttaaataaaatgaaactaaaagatgctttagatcgtgttaagtacatggaagatgttgtgaaaaccaatgaagtgctttcttgccccaaatgtcgtaaaagcaaagttgtcatggtagattgtgaaaattgtgctaatttagaaaaagaggtttcttatttgaaaaattctttgctaagattttctgatggtaaaaagaagctcaacatgattttagatcaatctaaggttagcacacataaccgtggtttaggttttaattcttatgctcatcatactagtcatcctcctgttgtgttaggtgctggtgctagaggtggtgagattttagttaaacctgatactaataaaactatgtttaaatatgatggtatcatgtctaccttgagtacatcttcttcaaagtccaatgttgtgcatgcaaaacctcctgttgttgcttgtgttgctaagtgatgaggacatcctccactattacccgctggcaaagacgccaaagtcgggcaacgaccgtgtgagcctttgaataatcccaccttgcttagcttgggaggaggaagccaccttaaaagggagagccacccttcccctattggactagtcttttagggagattgggcctttctccgagtgggtgtgcctaagaactgttggggtccgggaaaccttaagttattgggcctcagccgaccccacctaggccggattattatcactaagttttctgattctaccaatatgtcgaatcatcgtgaaaaattgtcacataccatgactttgggtgtttggaaaacatggaaatggtggaagaagtaaaataaataaaacttttgtttaaaacttatatgcttgcttgtttgtgcattttgtggtgtatgcatatggtttataggatcatgttcatatttaactaaaaccaatggatcaaagaaaaattcttggaacaactcaaaaatctgggaagaatttgtggtaacttcttgctgaccttagaaactaaatgtggattttaatttagcttatcaactcattagatcaaccaaacaactctctaaacacttaagcacaggattttgacagattctctggagcactctttgacacactgccaaaattggatcttgaactcctaggctgtaaaactcgatccaaactgtagttcaatcattgctttacaactttgcctttggtcactagctctaactctgcctagaactaattttaaactgaacccaaagatggaattccacctctgttccagacttggccaaaacctagatctcctctccttctctctcactagtcgctgccatgtgggccagggctgcatggcgggaccccattgtcagcctcacattcctctccacacgggcccactgcctgaactcgcatgccacgcgtgtgagcacgcgtcgagcacgggagaaggcgagctcctcttgtccatctccgccggcgaccatacttaacccgaccggccgaccaactttctctccctctcgcccttgtctcgtttcgcagaagaaccgaggtaccccgcctcggattcgccgggaacggaggcgccatctccggcgccggcgagataagtcctcgactccgtcacaatccggtgagcccatttccgttcaatatgcgttctgtaatcccctctcaatgccgtctctaacaccaccaagaacacctcatttggtgcagccaatctccgggaacgtgaccgcgtcaaatcggaacaccgtcgcgctctggacgccgctgcttcgcctttgctcgtcgccctgcttccatagttcgttacaggctgagccacttcgtcacgagcttcatcaacacctgtagatcaagaatcccgaaggaatcgacgcgaggtggaccacagtgggagatcctcttcttcttctccaatcccagccaccgacgccattcctttctttctccttctctggtgagcttcggcgcaatattttccgcctagagctaccttgtgctgatctaaacagagtcatgcttcctctctttgcagtagaagcctggggatacgccgtcgacgacgaccgtagcagccgcgccgtcgccgaaccagtacaccgtcgccaagacttcgctgagctgcgtttgcttcttggtgagcctcctagtagtccctagagtccttaccatacgcatgcacgattagatcgagcctcaaaactcacatgcatgtgcaagccgagcttagccgccgcttctaacaccctgacagccgctatagagcaccaaggcttgcaagaaaaacaccaataggttcgtacggttgttctctacactttttgttttgggagcttgagctgaatcgccgctgttcgccgctggtgatactgtgaagttcgtggctgtgctgctgctctgttctgtccagagcaagggcatggcttttgaaatttaaagactcccagggatgcattagcagcccgagcaatcacttacatatggggtcgtgcactaatctgtaaataacatagaactcaagtcccattttgaataaaatcctggaacacgtgctaggggctgcgggatctatttcctgagaacccaggggcttttgcgcaaaatgttagtctctgtctggtggacctgagaaaggaaaatgatgtatgaaaatttgagaaaatacaaaaactaatttcctatcaactgaaaaatgtcagaactttagaaagtggtagaaaattcatcctgactctaaaaattgcaaactaaattatgttagaatcatattttcatgctttgcgtcataaaaatgtttgacttaacagaatcataaagatttatgtctcaataattcgaaatgcatttaggaccataattaacatgtaaacactttaaaaaaaatctgtaactttgaatgtaaactgttagattgaagtttctttcactgaaaatcaaactaacacggagcacaccaactccataaaaaaaagcattcattttagagcatgttggatttttatgtatgtttaaattttaaatttttgcatatgtatgtttagacgattcgcagccgagtctcgaggaggcctactttgtagctgagcaaggagtggaagagcaaggcaagccacctcccttctttgatcacattgaacctatgatttggatgtttttgaaaagtttgcaaaatatgcatgtctattgtacactaatccattaaaatcttgtaaaatttgttagatcaactccttaacttgcattatcacctgaactccacaaaagaccttaaccattattccaaaaccttaggaacaatccattgtgtcacattaagaatgatgtttgagatagcaagtctataaaaatgctcagccatgcttagtgatgagtttacttaccatttgggctcaattacatatattaaatgatttattttatgatctggattaaaatgataaaatgtgatatttgttaaataaaatgttggaaaatgtggattttaggtttgggccgcatgtggtacacatattgtgtttagttgtgtactgatagggggacagtgtgcccaaaccgacctaaggacttcactcagcgtcaattcatttcgtatacagtacaaccacatgtgctagtatgggatagcccaagcttagtaaattatttatgatttagccttacattctggtaggccggtgtgtatgagttagtcgataattctgaggaattagtcgttgattcagaggaactttctatttaccccgacgtggtagtttaggtgactaagtctgtccaatacaacggtattgtgccacgtgggtgggttcccgttgcgtccgccaccacggcgttaagtttaaggcgtgggcccgccacttaacggttctaggtcatatatcgagtatggcttaggatggagtaacacgtatcgtgctggtgtaaggctaaatcatgaatcttggaagggctttgttgtgagtaataaatcgggtacttatgtatcgcgtgccatgcttttgcatgattattatttcgcatcatgtgggtaaagtgtacatactctgcagagttaaaactaatcgattagccgtgctcacggtcaagagcggcgtgtgaatatgtcatgagtttagacatgtgttttattcttctaaagctgaatttgaacttcaaaatgtgatgtaatttgtggtttatatccttgctgccatggaaggcaataaggagctatgttatatgtgtttatcatctaatttggtgcccaattgctaagtgtattcttgctgaaatttatttgaaaataaatctgaaatttgaaatgctctttgcaaactaaatttgctttatgctaaaattatcccatgttagctttactttgaatttgccatgcatgtagagtactaggcttgcttggtgcttgccagtacaatttattgtactgactcttgcttgtattgttatattgttgcatgtttagaattggttgcaggtgagatcactcctgtggaggatgatttcgttggggaagtttctttcttccaggatggttcttactagggtctatcctagtcggttgcatgaaagatcttttgggtagaagatgcttccgcgaacctatctattcagccaatcggccatgtgtatctaagttataagttgtatgatcctaactaaaacttagaacttagaactccctatgttgagatatcatgtgcttggatgaaagtgtttagtgtgttccttttgttagggacatattaaacatgagtatgagttaaagatatttgagatgttgtggatctttagccatttttgtcaagtctcctgattgtgtaacacatctggtcgccaccttcgagtggtttgacgggcacatctcaggctgaagttgactggcaggctaaaggcccggcaatgtctcacatatttttctctcggagcgtcgaatgtcttaatatgtttgatggaagaattgtgattagctattcatccttcaaatatactaaggggttcggagtgcttccgacagctttggtatcagagccaagaccgactgtaggaacccttttaagactgagcggtagtaaggcttcaaaagaaaatattttgagggtaatgtcctcactaaaatatatttgcaaaatctaatctattcttacttcttagccctgtttggataaattcctttcctatgaatcttgttttgattttaaaaccccatcttactctataggaccggaagatgcataaatagagaagtagtaactcatagagaagaataaggaatgaatgaaacaaattcgattcaagtcagtacttgaatgatttgaaaacttctcagtaaatagatgactaaatttttcccttctaaatttgaatttaaaattttaaaattttatcgatggcctagaaagtggtagtacggggtaggatggaattgatttgttttaaccatagtttgcttgtcatataaaggccaccagatgtttgtaaagcctctacattaagttcttagcatgtcccaaaattggtacgaattttacatgctcgcattttttttaaaaaaaatatatataatttttttttaaactgcgcagattctagaactggtagcagtcgtccttctccttttttactcagagcagtatgctggacagaacctgacataataaccaaaacaccatttccaagttcctaaagagtttcaattgaaattctaattggtctatacttccaatatcttgtagatgtcttctatgtggcaaccattgggctattctggaggttttgaggaagaagcactgcctcacatcctgtggcttatgctgcaacatctaggttatgatcatccaccggagtatcatttcttttctcatgagcggagttcatctctcgagcatatatggctgagctgtgtatacagggactttggacccatgaaccacccctttactttcaagcttgtggttgggatgcaccctcagcaatgcaggaagctgcattacaagcaattgtgtattaccgacattataggccagggttggacgggttctttcatttctttccagctcgcgcaaaccaatcctccgctaattactatccaggtcttgagggaaacatgagagagattgacactccaggactattcttagctggcctggttcgtgctatggatagatatctcgcaaaaactataactgagttgcgtagattgcaagctagggtggtcatgcttgatagacgaatagaaccactcgggcatcaaggacattttgataatgccatcatttatgggaatcatgaactccagcctcttacagagactttgcctcctcccatgggtatttatcataatataaacactagagcccgcatgagagttggttttcatcgaaatcgtcgaaccatgccagaccctgcacttgctggagatccggtgctgctggggccattctatgagttcgagcggaatgggagacaataccgtttgactatggccactccgtcaaccacagtgcctcaacctcccatcggattctccgaagttccatagaatggtgtactggaaaaaaagaatatgtatggggtgtaactttcatttcttttctttaagatgtatgagatgacaccctaatatgtaatctttttaacggtcaaaattttgtaacaccaaggcatgaacttggtttcttatgaccattatccactcctatgtatctgtgatcacttagatcctttaaaactaatgtactggaatgaacttatgctccttttggaatggattgcttgctgtccagaaatttgtttcatgcaaatatatgatggatgacttgtaaattcggctataagaaatcattcctgtatgctacctatttagggtaatgtatatgccaattctatgctcaagcagctcatgtacttttgtactttgagtgcaggatgacacatactcactctatggctgctcttactgatgatgccaatggtgagggagcgagtcagcctcgcactggcccatattcttctggacgtgccgggggtagtcgccgtgctgccactgcagaacagcatgatgatgaaccatctcttgctcaactcctggctaatcagaaccgactttttgaaaggatggtagcgaactctgaaaacatgggggctgccatggcacagcaggccaatcaagcaccctccaagctagcagatgttcaacgaacacatccacctcatttctcctctgcggctgatccactcgcagcagatgattggcttcgtgatattgaaatcaagctgaacctttgccggtgtgatcctgtagagaaggctacctttgctgcttactacctgcaaggtgcagcagctgcttggtgggagacatacaagactctcattcctcctgacgagccaatcacttggactgttttccgtgagggattcaggtctgctcacatccctgctggtctcatggaaatcaaaaagaaagaatttcttaacttgaagcaaggaaacatgcccttcatggagttcatggaacgcttcaattatctgggtagatatgccgcttctgacttgaacactgaaacaaagaaggttgagctatgcagagatcgtcttgcacctgaactcaagcatgctcttgctgctcatgaaatcaccagcatgaagacactggttgataaagcccttcgtgttgaatcaagtgaaaaggaagtggttgaagaccgtaagcgtaagtgggctgcaaagaaatttgctggcagcagcagttccactcggcctcgtcttgctccatctcctgcggttcgtcctatggcacctcagccacctcggcagatgtatgtgcctccacgtccgcaaactcagttagttcgtcaagttcctcgcgcagttcaagctgcgggagatgcatctcgtaatgccaatgtcacctgctacaattgcggcaagaggggcattattctcctagctgtccttatccgaagactggaaaatccggaccgtactcacagggagcaccgcagcagcctcgtggtcctcctcaagttcagcctggacagcgtggagctcctgctgttcccaagccagctccaacttttggaaggggccggctcaaccatgtcactgcagaagaagcaaccgacgcacctggtgtcgtacttggtacatttcttgtgcactccattcccttaacagttctttttgattccggtgcaactcattcattcatgtcaaccttgaaagcaaaacaacttgacttgaaaacagaatttcttagcgatgctatgcgcatccaatctcctggatccaccatggtcaccaaacttctatgcaaaggtgtagaacttataatagacggggtaaagtttaaagctaacctcatattattagacaccttgggcctaaatgtcattcttgggatggattggttaactaaacatgagggaaccattgattgtgctcatagaactgtaactcttcgtagcaccgatggtcaatttgttaggtttacctttgaacaaacctccacttcaaatcaaccctctatacaatctctctctataccggagttaaaatcagtacccatcgtgaatgaatattccgatgtgtttcctgacgaattaccagggatgcctccagatcgtgacattgaatttgtgatagatttaatccctgggacagcacctatagccaaaaggccatatcgaatgacttctgaaaatttgatggaattaaagaagcaactcaatgagcaattggctaaaggtttcattcgtcctagttcatctccctggggctgtccagtgttgtttgtaccaaagaaagatggaaccatgcgaatgtgcgtggattatcgacctctgaatgaagtcaccatcaaaaataaatatcctcttcctaggatcgatgatttatttgatcagttaaccggaactcgtgtcttctcaaaaattgatcttagattgggatattttcagcttaaaatcagaccggaggacattcctaaaaccgcattcacaactcgctacggtttatttgaatacaccgtagtctcttttggattaaccattgctcctgcttctttcatgaatatgatgaataaaatcttcatggaatatcttgataaatttgtggtggtattcattgatgatatactcatctactccaagagtgaagaggaacatgcgcaacatttacgtatggtactcgataaactccgtgagcatcaactttatgccaaattctcaaaatgtgaattttggttaaaagaagttgaatttcttggtcatgtactttctgaaggtggtattgctgtgaatccaagaaatgtacagaacgtacttaattggaagcaaccacaaaatgttcctgaaattagaagttttcttggactagctggttactaccgtcgtttcattgaaaatttctccaaaattgctaggcccttgactcaacttcttaaaaaagaaaataaattcatatggtctgaggcatgtgaaacaagttttcatgaacttaaaagaaggctcacaacagccccagtgctagtgatgcctgatgttcttaaaccttttaatgtttactgcgatgcctcacatcatggtctcggttgtgtactgatgcaagaaggaaaagtagtggcttatgcttctcgtcagttacgaccacacgagatcaattatccaactcatgacttagagctagcagctgtggtgcatgctctaaagatttggcgccattatttggtcagtaatcggtgcgaaatctttaccgatcataagagtttgaaatatttctttacccaaccagatctgaacctaaggcaaagaagatggttagaactcattaaagattatgatctcggtattcattatcatcccggtaaagcaaatgtagtagctgatgctttaagccggaagctacatcaccttgccgttattgagacaataaatcagccatcgttgtcctctgaatttcagaaattgaatttgggattggtagaggatggttatgttgctgcactagcattacaacctactctctattctcaaattaaagctgctcagtccattgatgaggaagtagctgaaattatgaaagaaatcaattcaaagccacaatctatatacactcttaattctgatggtatggttatgcttggcaaacgaatctttgttcccaataatcaacaccttcgagaaaccattcttgatgaagcacatcaaacacctttgtctatccatccgggttgcactaagatgtaccaggatattcgcactcaatattggtggcctagcctgaggcgtgacatagcagcatatgttgcaatttgcgatgtgtgccaacgtgtcaaagctgaacatcaacgacccgctgggctactccaacctttgcaagtacctgaatggaaatttgatgaagttggaatggattttattaccggtcttcctaaaacacccaatggacatgattctatatgggttattatggatcgactgactaaagtggctcacttcattccggtgcatgtgacttatggtggagccaagctagcagagttatatttgactcatattgtaaggcttcatggcgtaccaaaagtcatagtatccgatcgaggaacacaatttacatccagattttggaaaaatttacatgaacttctcggaaccaaattgttcctcagcaccgcctttcatccacaaacaggaggtcaagtggaaagaacaaaccaaatacttgaagacatgctccgagcttgtgtgcttgaacataacactaactgggagaaatgtctatcttttgctgaattctcctacaacaatagctttcaatcaagtatccaaatgtcaccatttgaagctctttatgggagaaattgtaggactcctctttattggtccgaagtaggagaaagacaattctttggacctgctatcattaatgaagctgaaaagaatgtcactcttattcgggaccgattaaaagaagctcaaactcgtcaaaagagctactctgatcgtcgtcgacgagagctaagttttgatgttggtgaccatgtctatcttaaagtatcacccatgagaggcactcaacgattccaaattcatggcaagcttgctccacgatatattgggccataccaaataatatctaagcgtggacaagtagcctatcaattggaattgccatttcagttgtctaatatacatgatgtattccatgtttctcaacttaagaaatgtcttcgaactccgattgagcacacctcacttgaagacattaatctaaagccaaatctctcctatcaagaatacccaattcgtattctcgaagaaagtgaacggcgtacccgcaaaagctccatcaagatgcttcgagtacaatggagcaatcatactgtggatgaagccacatgggaacgagaggaccgacttaaggccgaattccctagtttcttctagaatgacgaatctcggggtcgagattcttttgtaagggggtaggctgtcacataccatgactttgggtgtttggaaaacatggaaatggtggaagaagtaaaataaataaaacttttgtttaaaacttatatgcttgcttgtttgtgcattttgtggtgtatgcatatggtttataggatcatgttcatatttaactaaaaccaatggatcaaagaaaaattcttggaacaactcaaaaatctgggaagaatttgtggtaacttcttgctgaccttagaaactaaatgtggattttaatttagcttatcaactcattagatcaaccaaacaactctctaaacacttaagcacaggattttgacagattctctggagcactctttgacactctgccaaaattggatcttgaactcctaggctgtaaaactcgatccaaactgtagttcaatcattgctttacaactttgcctttggtcactagctctaactctgcctagaactaattttaaactgaacccaaagatggaattccacctctgttccagacttggccaaaacctagatctcctctccttctctctcactagtcgctgccatgtgggccagggctgcatggcgggaccccattgtcagcctcacattcctctccacacgggcccactgcctgaactcgcatgccacgcgtgtgagcacgcgtcgagcacgggagagggcgagctcctcctgtccatctccgccggcgaccatacttaacccgaccggccgaccaactttctctccctctcgcccttgtctcgtttcgcggaagaaccgaggtaccccgcctcggattcgccgggaacggaggcgccatctccggcgccggcgagataagtcctcgactccgtcgcaatccggtgagcccatttccgttcaatatgcgttctgtaatcccctctcaatgccgtctctaacaccaccaagaacacctcatttggtgcagccaatctccgggaacgtgaccgcgtcaaatcggaacaccgtcgcgctctggacgccgctgcttcgcctttgctcgtcgcccggcttccatagttcgttacaggctgagccacttcgtcacgagcttcatcaacacctgtagatcaagaatcccgaaggaatcgacgcgaggtggaccacagtgggagatcctcttcttcttctccaatcccagccaccgacgccattcctttctttctccttctctggtgagcttcggcgcaatattttccgcctagagctaccttgtgctgatctaaacagagtcatgcttcctctctttgcagtagaagcctggggatacgccgtcgacgacgaccgtagcagccgcgccgtcgccgaaccagtacaccgtcgccaagacttcgctgagctgcgtttgcttcttggtgagcctcctagtagtccctagagtccttaccatacgcatgcacgattagatcgagcctcaaaactcacatgcatgtgcaagccgagcttagccgccgcttctaacaccctgacagccgctatagagcaccaaggcttgcaagaaaaacaccaataggttcgtacggttgttctctacactttttgttttgggagcttgagctgaatcgccgctgttcgccgctggtgatactgtgaagttcgtggctgtgctgctgctctgttctgtccagagcaagggcatggcttttgaaatttaaagactcccagggatgcattagcagcccgagcaatcacttacatatggggtcgtgcactaatctgtaaataacatagaactcaagtcccattttgaataaaatcctggaacacgtgctaggggctgcgggatctatttcctgagaacccaggggcttttgcgcaaaatgttagtctctgtctggtggacctgagaaaggaaaatgatgtatgaaaatttgagaaaatacaaaaactaatttcctatcaactgaaaaatgtcagaactttagaaagtggtagaaaattcatcctgactctaaaaattgcaaactaaattatgttagaatcatattttcatgctttgcgtcataaaaatgtttgacttaacagaatcataaagatttatgtctcaataattcgaaatgcatttaggaccataattaacatgtaaacactttaaaaaaaatctgtaactttgaatgtaaactgttagattgaagtttctttcactgaaaatcaaactaacacggagcacaccaactccataaaaaaaaagcattcattttagagcatgttggatttttatgtatgtttaaattttaaatttttgcatatgtatgtttagacgattcgcagccgagtctcgaggaggcctactttgtagctgagcaaggagtggaagagcaaggcaagccacctcccttctttgatcacattgaacctatgatttggatgtttttgaaaagtttgcaaaatatgcatgtctattgtacactaatccattaaaatcttgtaaaatttgttagatcaactccttaacttgcattatcacctgaactccacaaaagaccttaaccattattccaaaaccttaggaacaatccattgtgtcacattaagaatgatgtttgagatagcaagtctataaaaatgctcagccatgcttagtgatgagtttacttaccatttgggctcaattacatatattaaatgatttattttatgatctggattaaaatgataaaatgtgatatttgttaaataaaatgttggaaaatgtggattttaggtttgggccgcatgtggtacacatattgtgtttagttgtgtactgatagggggacagtgtgcccaaaccgacctaaggacttcactcagcgtcaattcatttcgtatacagtacaaccacatgtgctagtatgggatagcccaagcttagtaaattatttatgatttagccttacattctggtaggccggtgtgtatgagttagtcgataattctgaggaattagtcgttgattcagaggaactttctatttaccccgacgtggtagtttaggtgactaagtctgtccaatacaacggtattgtgccacgtgggtgggttcccgttgcgtccgccaccacggcgttaagtttaaggcgtgggcccgccacttaacggttctaggtcatatatcgagtatggcttaggatggagtaacacgtatcgtgctggtgtaaggctaaatcatgaatcttggaagggctttgttgtgagtaataaatcgggtacttatgtatcgcgtgccatgcttttgcatgattattatttcgcatcatgtgggtaaagtgtacatactctgcagagttaaaactaatcgattagccgtgctcacggtcaagagcggcgtgtgaatatgtcatgagtttagacatgtgttttattcttctaaagctgaatttgaacttcaaaatgtgatgtaatttgtggtttatatccttgctgccatggaaggcaataaggagctatgttatatgtgtttatcatctaatttggtgcccaattgctaagtgtattcttgctgaaatttatttgaaaataaatctgaaatttgaaatgctctttgcaaactaaatttgctttatgctaaaattatcccatgttagctttactttgaatttgccatgcatgtagagtactaggcttgcttggtgcttgccagtacaatttattgtactgactcttgcttgtattgttatattgttgcatgtttagaattggttgcaggtgagatcactcctgtggaggatgatttcgttggggaagtttctttcttccaggatggttcttactagggtctatcctagtcggttgcatgaaagatcttttgggtagaagatgcttccgcgaacctatctattcagccaatcggccatgtgtatctaagttataagttgtatgatcctaactaaaacttagaacttagaactccctatgttgagatatcatgtgcttggataaagtgtttagtgtgttccttttgttagggacatattaaacatgagtatgagttaaagatatttgagatgttgt

SEQ ID NO: 9421 - DNA, 19229 bp, Oryza sativa
  unsure (1)..(19229): unsure at all n locations
cccaaatattgtacttgtgtgattcagataaataagagcaacatcgacttcggccaacaggagtagggctattacctgtcagataaggggtccgaacctatataaaatccttgttttcatctcttttacctcaatctcgcatataccctggtaccaacgatccccataccatccaaataccctagccgagacctaaaaggtcgacatgtacgtcatcttctttccttatcatgaggattgccttgatgaattatcactttcgattttagctagatattcatcaatatatgaagtttgaccacttctatatcttcatgccacttgatgtcattcaacaagtaaagtccaatctttacccattttgcagtcaaactcgatgtgggtccacctatgaattacatcttattgatcttcaccatttcatcttgcattcttttaatggttgatgtgggttactcatagattcaactgacctcgggtggaccatcacggcaaagccttcaatcatccttatgaatgaaatggtcacggaaattacctactgacctcgtttctgaccattaccgtttctagacatatataaaatttaacttatttaacttatctaatttatttcaacatctgattgatgttgacactgaatagttcaattgataaatatcatcaattcccaattgatcgagcaacatttctgaagagatctgccccatttcatccctactcgtacgcaccaccaaatttggtcaattggtggcaatcacttgcttgcccttcaccatcgcatggctcatcatggcggacatggcttacccatcgccattttgttgtagataaataaaaagctatgtaatagctaaccatgtgcacgtcgtgtctccatgctagcacttgtagtagtcattatcaattgtggccaagagatggtaactaatcatgaaaagaacattctccaatgtagtcgtataacaagtgtcaatgttttatatcggtataataaaaggggtagcacacgggacctaaaaatagatggaagtggaagataagggtttgtagaagttcaggcctgcccaatgcaaggtattaccatattcctattttagtggattgtatctattgggtgtattgatcttgatgttgatctcatgatttgattgtgggttgtgtatctcatttctggttgccctcgatggggctccctgccaaccttatataggttggaggtgcagggttacaagtaggaaaccgaattagatattcctttggttaccttacctatacatggtattatttggttggggctatataaccttgcttggaatacaagaggtaacatggcaactgtattctactctattttatattacattgtagtcggatacctaactattgttatttgttatgatcacaaataattccacaagcgcacagatatcaatgtacaacttcaccatagattatttcaagggtatcgaatcataaggaacatgtgtgtaatatctaaaaaacatgtttgtccaaggacaataactaaatcataggcggaggatagagaagtttccgaagggtcaaaattcttgaattaagttttggtaaaagtctatcacttgctttgggtaccggctctcccctggcacaccaagcaaatctggccaatagctctgtgatgtacccgaatgtgaaggatcataatggacgaacaaggctgttatcacatgccgcctacctatacaatccgtggagcacacaacaaaccaaggtaacctctaacctagacactacgtctacgttatcaattactacactagcctcggtcaagaacttttttttcatccagagtcttaatactatagcacttaatacaaatactaagtgacgaacccacagtgatgagaatatgtaatgatctaaatcaccctaatctttaaatcgtgcttttatgcattttctagaaattgtaaaaaccaaaacgagcctcaaacaattaaaaatatcaagatagaactcaaattggcttgtgggaattgttattgaatttctcatgcctccaaatatttaaacaaattttactcgaaatttcagctcgctctaacaaattttactgccacaaacacttttattagagttttataacaagaaaaataaaagaaaatcctctcttcctcttgcgccgaatctggcccaaggtgtccttttccaccctcttcacccctcctggtctaggccagccacctctttcccctccctccttccgggcctcccccttcttggcccattctttccctccttccctccacttggcctgctcccgcacgtgccccatctcctcttcccgcgcccagccgagcccgagcactgtgtgcggcacacgcgagcgctcaccctcacgcgttggtaggtggggcccatggatcagctcatcccctacctccagccaccgccgcatcctctcactcctccaaaaactctagctgtttctccccaaatcctcagcaatcaatccatccgtggttttcaaactaaagtggtggagttaatacccattaaatcctcttcaatttccccaattgcccccttgattatagctcccaatctccacgaattggccgctcctcccttaggtcttgttcgtttaatccccaagagaggtggaacggaggggattaaggaggaataattccacgccacaataggtgtggaataaatcacctctaaatccccctcaaacctttttttatgtaacccccctcaatcctattgtgggggagattaaatgaacaaggccttaccggtttccatggctactggcgggatttacggcgccattccgccactccccttggaccgttctctccatcggcctataatacagagttctctccctcctatctttccttttccccctcccgagctttgttgccgtttccccactctgctcctctctctcctccgaactaggtgttgtccagcagcctatttctcctcgtcgacgctccacctttacctcaccgccaccttcctccactctgtgaggacgagctcgaactcggccaccgtttggctttgcccagaggccacctcaccgcgtcaccggcctctccttcctccttgttgaagaaccatattatgaacttatgaactgtttaaacttagcctttatgcaaatgaaccatattatgccattcctttgttacccctatgcattattgtgcatctccgatatggcttgctaagtaccgtgagttgtacttatcatttcttacatctaattcaaaagatggatattctggagaagaaggcttggatggctagctcgtatcaccgtcaagtatatctagttgttgtttccataagcttccgctatcattttgtttatcttagagtgtaagggcctatgctcactctttaataaagtattatatttacgcttccgcaagtgtagcttgtaatacaacaactttgtacgttgagattgtggttattgtactccgccttgctgggacagggattaatacaattagtttttgggaatatggttgtatttctccgggcatgatgaaatttatcctacataaataagaaaacaaaatacccgaaagaaatcacgtatacttatataaaaaaagcatttgtcaaggtaaaactgtggaaagagtaccaacaactccggcactcctccagagctttcngtcacgctcttgccatattctaactctattagaaggttgcctaaatatgtgttgtgttgtgttgagtgtaaagtgagaagctcctttaatagggtccaatgacggctgtggttaatcggtctcacacataaccaacattggggaccaatgggggagtgccacgtagaagaatgcgattaggggtgccattagtggttcggtcgaaccacctccaccgcccctagccacagaccttctctgtgaggattgcaagtgggcccctatgatgatgatgcacgatggataggcttgaaatatcactacaccatgacacaaaatccccaacggaaaatcggttgggaaagaccacattcaaagacaaactgtcggtcggcaaaagttttcctaaccaacttcaacagtcataagatgtctagtcggcaatgaccgatatatttttaccgaccgaccattagatcccgatgacagatttgccgacaaacattattttttccgaccaacatatttttcccaaccaaccacaattcccaaccgatgactggccaaagatattacaattgccgacccacattcagtccaagaactcagtttcttctttttttcacatatacaattcaataatatacggtgaattgtatttcaaaacttcttgaacacatggagcatagggaaaaactaatagtcacaccaaataatgaaagtctcactttattcattcaacgaactgtattacatagttcttcaaaagctacacataaatcccaatattctctaagtacaaagaagttcctagtagcaactttccatctaacaagttctatccattgtacaatgtcttcatcatcaagtgaatttgagcaacaggatcagtggttcctctaggacctcctcctgcaaaaaggaactagtttagtcaagtagctgaacttttaactaaatgttgctaacaaaaaaaatattctaaaacactatgtcaagtactctagttgcttccaatcatttggggctctaaattctccacacgcatgatatgcttcaacaagcatataggagcttcttcccattatttcagtaccatatatatatttttcaagactaagggcctgtttagatccatttggaatggcaaatggcaaatggcaaaagttttggtagcaaaagttttggcattgcaaaagtactagttggtgtttagatgcatgttaaagttttgccattctagcactaaagtgagagagagaaagagagagggagtggtcccaaagcattttttggcacaatttgctactatggactagcaaatgccaaatgccaaattgccaacttttgctactagtgtttagatccaaaatggcaaaaagtgctacaaaatggtaaaacttttaccattttagaggatctaaacagggcctaatagaagtaaaaccaagtttgtaaaatactacaataaataagtagtagatagcaagcagtaaacatcgatcggatctaaagtacaatgtccatatattatattctttccaacttgtgaatgtaaatccacggtaccaagataacaaaattggagttctcttcaaataagatacaaatttgtaaaagaaaccgcatataagtggttttggtcaccgccttaccggccggcatcggtgtcctaagattacagaagcatacaaactcaactgtggttgaaagcttgaagccactgccatgctggagcagccgatgccagtcatggaacagcaaaacaaagtcctcatcatggaacctgcaagaaacaaaaacaacagcctgagataatcctatgttcatatattttaaaatttaaattttcattaaatacattgcacatacatgattgcaaaaatatagtatctgggaacaaatctattaagacaggcattgctacgattacatgaaagagcttaaagaccacgtgtttcttaggcaagggtgatgtatatgactagtgaatctatgcttatgtggaacctatgtccaacatcagtagtcaatcttgaacagaaaaataaaactaataaatcataaagtacaatctgcacacataatgtcgaagtatcaaatatcatattttataagaaaattcaggtattataataacagataaactagaagtttaaagctccttagtccttaccttcaatagatcaaacatataatatcaaacaagttatccatcaagcatgtcattttgaggtgcacacagaactatactctattttcccacattatcaaccttcacacgaacaattaaaactgaacataacagtgatacttgccgttattctcttcatttcgaatctcaggtctcaaatcgtgtatctttgttcactccgcctctggattcctctgcaattttgcatataagagaagcgagagcatcacatcaaacatcttgacaaatctgccgcatgcaagtgggttagtcaccggaagtagtgttgcttgtgagattacagatacgtaccaactcgtggttagtaataattcctaccattaggtttggtgtttcattttattttcttttatgaatgatttgatggtcagatttggtatttaaggatcgtcaaataaccattttgtccgcaacaagataaagaaaaatagtagtttcaaattgcttgatatattttgtttacgcttttactttttttatgaaatgtttaggcttttactttttttatgaaatgtttacgctttttcctcaatctatcagggtggtggacatactgcaccagagtaccagccggggagatgctcagccatgtttaggcgctggatttcaaacatgccactgtgataaattaatgattatgctagccggctagctgtacagtgtacacaatatgatggatatgtattttctcgatttctggttaattaattaccttgcaccatgctgtaccagattctgaaatatcgtacgcggtcgaggcagataaagtttttcatggaacaagtcatgctggtgccatgtgccaatcctgagctagtgcttgaaaacaaaagcttgatctgtccaatcatttgaagaattttacttcctctttatcttcaggtgctagttttcgatgaggtattttaatattttgtgattattttattggctgctcaaagtttggcagatatattctaataaaatagatacctacgtactttggcactctcaggaaattgagacaataatctagggattttgaataaaccaagcgtctaaactatgtttataatttagtccgtttaacaggagagaatttttatgcatattgaaaaaaaaaagaaagagcactaccaatacatctgggaaaccgatcagacataaggcgtctatcaaaccggtcacaaatttcggtggtatatattctaaaacactattgttttaaacttttaaagcaatataaattatttgtctataattatatactaaaagttcatactataaacgctcctaagcatatgatgctcctgcaaatgcttcaaagagtgtcacgtggttctttaaaaaaaactactcgatttcccttaaaccataatacccattattctttaactattagatttatgtttagagatatagataactcaaatggatcggcagacccattacagggcatttagttgggggaactattaagagtgaatgggagtttgagggatgtgggtggttatggctgttgtttgtttagttgatattagtgagcgtgcacgtgtaagacatgttgccatatattgaatgaagtaaattgaaaaaaacaaatacatccatcgcttaaatcaatcttaaccctacaggtaaacagttcatactttcagagacaactcggtgtggttagtgcatcagatgcaaattatgtgcagaagaagtgttttctggcaggtcatattgagcacaaacatcttgcaaaaagcacataacattatattctaattcacatttattttttcttcaaataagaatcttaagggtaaataaaactcatagaagaataatcttagtgtgtttccttaaatttattgaacccataggtaaaataaataaaatcattgtccccactacataagattttttgaattggcaaggatctcagatcaatcttgctcccataagtatcaggcaaaatttgctacagcacacttaaagattatggtctttgctgtgagacacccgaagatcgtgtatttgcccttggacaccgaaaaatgtggtaatttgctggcggacactcctcccattattttattatttccggctgaaacggtgagagaaactttcctaaaagacattttgcccatgggccatttgtataagccgaccaggtccggctgcaaccagatatgagagaaggaggaggaggcagagcagccatggctccctggccgtgctctgccatggcggcggcgcagcggcgttcgttggtgacggcgcatggctgccgcgacgagcgtcggcatctgcaagaggagatggaggcgaacccggtggcgtggcacggggctctgggatggcgtggaggtggcgctgcggcaacggacagcgttggccggaattggggaagagagagaggcaatggcgcgaggggaagaaggcttcggccttggagctcaccggcgacggcagcgcagcaaggaaacggcgatgcccacggtgcagcaaccggccgtgatggcctccacgacgcggcggctcgccgcggccgcgccctcgtcatcgccggtcaggcacaggcagaaccgcgctctgcccatgagcttgccgtggtccacccctgccgggaggagaccgtacagcagctcctggtcatcccgcccctcccaccgcgtgagcagcacctcccgcacggcgccgctacctgtagcgaagaacacgacctgtgtcaggggcaggaaagagagaagaaagaagaacagtgtcaggggcattttggtactttcaacactctttctctctgttttcaccgaaaataataaaataatgcctcgagtgtctagcagctaattaccatatttttacagtgtccataagcaaatacacgatttttgggtgtctcacagcaaatgccacaatctttgagtgtcctgtagcaaattttgctactgtatcagctcatagccccatagacaacatggcagtcagtcaagtagacatgaagggaagatagtcttcaggcaggtcattatggaaaaacatcttctagaaagacaaagtctatggtcatcatccataaacatttccccaaaaaaagtagcctatggccatcatgcataaacaccttcctaaaaactcttatcttctagactgaatcaacaaaggcacacaacttcttctatctacccatgattttttatggtactacctagtctcgtgtccaagtttgtcataatatgcccacgcacagtgtcatatgtatagattattacgtttaggtgaaggagtgaattaggtgttttctaactactcaagtttaaggaaagttcatccctcttcctttgatcacattgaaacccatgatttgggagatcaaaagtgttgtttgcaaaattgcatgcttatttataactatcggtaacagggcaaatggtaattatgcctgttgactgctgttaaataccaaattcacgccgtcaatacctgcataaatatgagagtataaaatatccaacatagtggtagggtttatttctaacaaagtccactagcgttggtgtatatttggatgcaggtgacaaatcatcaaagttgagacaaaagatacataaagaaggaggtaaattaaacttccatatttaagcctatggagtttttgtgtcacaaacctaatcaaacacaagcaaatgggcccattcaccatatatatatgcaccgaggagtccttcaccagagcccaggagaaaattcggggcaaaatgggccagcaagggtttggccgaacacaaaaggatcccaatcggctccatttttcacgggcagatacttaccgatattctaagacccttgagaccgtttctcaagaggacacatggcaagaggagagtgaagatgccatttagatgcttagcatctccacattttcccaaagcatctccctacctataaatacctctctcttcctcacttctaaacacgctcaagcatgagctgaattataagaggctctattgtatcttttatatacattagaataggcagacagtaaggaagaaagagtcggaggaattccgaagttgtcagtattttcctctttaccttttgtaccttgtcaattactttgctttaattgataatatctttatcgagtaagtgagttttactttgtgaggattatctcttagttagttcctattagcatattggattattgttcactattgttcaataatagatagtgattactttagtgtttaactaacgctacaatagtaattaattgcatagacgcaatgtctaggtatttaattaccagtgattgctgcgtatctaacatttcgttagaggttggtgtagaggtggtgatagccctcgagatcaccggtcctccctgtccgggtatggagtaaagcgagatctggtagcagcgagcaagccaatgcctgaagtattgcgataggattaaatttaagttttctgtacacactgttcctcactaggaaatcatctctacgctttgcccattttgctttgtgtccttggttgaactttaagaggagttgaacacacacgttccccgtgtccttggttgaactttaagaggagttgaacacacatatatatatagaaaaaatgcccgtgcgttgcaacaggtaaaaacattttttatactatacaatatactcccttgtttttgtttttggaccgaacgttcattctttccttccttttcagctcagtcccagtgcagtccgctgtctctatttgctcggcctatctctctctggctcagcccacaagtggagctgtaggcccagctcgaacagtcctttgcctggcctatctctctttggctcagcccataagtggagctgtaggcccagctcgaatagtcttgtgcctggcctagtggcctacctctcttcggctcagcccgcaagtggagctgtagtcccatctcgaacagtctcatgccccgtaccatgacggagccgatcttcccaccaaatccggtaatctagtcgagctcgcataataccgtgcacgtacaatgatggagtcgatcctctccgtcaaatgcggccgaatctttctcgacctccaaaattattgacatattttaatccacttgatctcctttttctatttttttcataaaaatcgaagcaatccgcaaaatttgggataaaaaatgacgaactaaagggaatttaaggggaaaatgatgagagagtagtggggaatccgtttttcaatcaattggatgaggaaacacatggagaggcaaatcgatacggcggctagggttcggccccacaaaaaaaaaccgccaaaaaaatagcgtgttggatttcgttgaaactggaaaaatggtgaaaaaaatggcgaaaagaaaatgaaaaggaaaaaggaaaaaaagaaagggacgaaaattttgtttttttggctcttttatatgttttttctgccgtgccgggttttttttacaatcgttttttttgcggcactttttttgtccgcttttttatacggacaggaatcggtcaggtttttttttcccgcgccgttttttttcgcgccggactttttaattacaatcgaacttttttttatcgctttttttaattaacggacgaaggaaacatcttatactttttaagtagtagtagaagtagaagtgtgtgtctatatatatatatacatatatatatatatatatacatatatatatagctaaaataagtctattttacatccctactctttgagccgtgcaatataataaggctacttttcctccctattctttgtgacgtgctttacatatggttgagaataaatctgtttcgcatccctaaacttcgggccaggccgtgccggcccagcgtgctaaggtagcagcctagacacgacacggctgttgggccgggccagcacaaccacgaccggagcagctcaggcacggcacgactgttgggcttggctggcacgggaacgaccgtcgggccaaaattaccgggcctgggtacatatagctgtaccataattactgattggtcgatctagagaatccgacatcgaggtccccctttttacaaattgcgcatgttttgtaactatcgtctccccaatatgcaataaaccgcaagtaggggtgccgagctgtttgacggtgtcgtccttcaatgcgacgatggccttgctcctcccgctcatcgtaatctgcatcgtctccggcgtcaccgccgacgccaacgccgacgcgccaatgacgcggacgcatgtcgccagcctaccgggtttcgacggcgccctcccttcccgcctcgagaccgggtgcgtccatctcgtacgcccaaagttttctggtctctgctctgcatcagtcggtgagaggggtcgtgctgacgctacgtgctacaacttgccagctacgtgaccgtcgacgaggtgaacggcggcgaactgttctactacttaatcgagtcggagggcgacctcgggagcgaccccgtcctcctctggctcaccggcggcgaccgctgctccgtcctcagcgccctcttcttcgagatcggtcagcaaccatcttccaccccgagcagtgccactgacacaccgtcctccaatttatcaatctgctagtagctgctttcttgcctgcaggcccaatgaagctggtcatcgagccgtacaacggcggcctgccgcggctgcgttaccacccctactcgtggacaaaggtggcgaacatcctgttcgtcgactcgccgatgggcgccggcttctccttctcccgggaccccaacggctacgacgtcagcgaagtatcctcgtcgctgcagatcgtgaaatttctctaccgagtatcgatccacgcatgcatgcactgtctatcctatgctaattgttcgtggttgtctcgtgatcgttgtaacctgttgctcgtcttgttcagtggttcgatggccatcctgaatatctcgcgaatccgttctacgtcgggggggactccatggccgggaggttcgtcccgttcatcacggagaagatctccgaaggtgttgcaatgttacgttacatttattacccgagatccctacttgttcacaagaattactactactgctacaagcttaattaaaccagttcatgcttgatcgctcctctgtttttcagacattgaagcggcggttagaccaactcttaatctgaaggttagccaagtcttttccattaattgatttaattcctcgcaaaaaaagtcattggaattaattagttggtgcaacttaagaaataaaactgtggtctcccatatgtatcaaaatactagccaccctgtcgcgcttcgcgcgactctgagttctaatataacctgtcaatattagtaggccatctatattggggtgtcgcaaggctgatgcgagagcgagacgacggagactgcgcccaagatttggggatttggatcgtctctcttgtgtgtattgtgtcttctccggagaataggagagattatcgctggttttttttatcctctcctttcattgttgtgcaaccttcccgatacttcctttttatttatttattgtttctttgactagatttgctctaactaccataaactatctgcatatgtgcaccgatgcgtgggaactggaactctcctgattctgtgattggtttacatgatccaacggtcctgatttattcatactctcatcctaaggctattattagttcaactgacgtggctcattagtttttgagaaagcttgttgctttcacatatgtagatgtcctctgtacaatttgctcttcgaggaactgtagttgatgtatagtcagtactagtacgaatatggggttccccgaaaaaaaaattgaaaatatgagcagtagttgaaacattacttccttcatgatttatgtttgttcacagctcaaatcagtttcacctaatagcttgacaagtttgtgatcagacattcctctgttttaaggaattccagagggttaggagttagaaccgcacttactcagaaggtagcagtatttatgccttttgtacggtgcaaatttcattgtaggaactgttgttaaatagcaacgttttttttttcgcgggcagagacagcgaatacagtacctagaaacccgagaaaataaaactctatatgtcgattctagaaatcggcaatgagaaaagaaagtagcacacgggatttaaaatagatgagtaaacgaacaaaggttagactggttaatacactattcctgtttcggaaattgtatctgtcgggtgtattattgatctcacaatcttagtgtggttatgtccttggaggggctccctgccctccttatgtatataggttcgggggtaagattacaaagaggaaaactcagtcgaacatgacatggatttcattatacagttatacagtcatataagactaagatttcatactgtaccttagaatataaggtaatacagtattcaaagcttaatctctttacataatatacggacttggtccccacctcctatctctagtctacgagtaaccaatctctacatgtaaactaccatggttaggactaaaaaaatagggagaatagctcctgtagtccctaaagtttttatgtaggatcagtttagtccataaccttttaaatagttcaaagaaatccttaaactttatcataaggcctagaataatccttgagtccaccaaaatcgtcatatagatatgacatgtcatcattcatggaaaatctatgataaattgttcagtttacccttacgtatatcatagaaaaataaatgtaaaggtgaattagacataaccataggaaaaaaaatacttttccttttttcacccttttgacgtatatttttgctcttacatataccatattttttaactttttccttttgttttttattttactatgatatatgtaagggtaaattgaagaaatcatatagattttgcatagaagggtgacatggcatgtttatgtggcgattttggtgggaccaaggactatatcagcccatgtgacaaatttaaaggacttgtttggataatatgaaagattaagtactaaaatgactcatgagcgaaactttagggagcatcttggctattctcccaaaaaaaatactcatggtgatatggtgataagaataaatctcagacatttatttttatcctacaataatttttaagtttgtactgtatatttttctcgttatctctgtataattgattatgcactcgtgctgaatattttgcgttttgggagattctcagggctatctagtaggtaatccagttacaggcgaaagtattgacaacaaatcaaaggtgccatattttcatggagtcggaataatttcagatcaattatacaaaataaggagacaagtgcaacttgatttcatggagtcggaatagtaaagagtgacttgtacatttcttaatattattaactgtgacacacctggtcttcagatgatattggagcactgcaaaggggaggactacgacaagcccaagaatctgatttgcagacaagctatggctaggttcaacgaggtacaacttggttttttgtttattctcgtgcttttggaaaagttttatccttgatatcctttccagtggaaaataattatatgggaatttctgttaaaatcaacttaacaaaaattgtatgttcaaaactatatttatagtacttacatgaactagcgggaagcccgcacatatacacacttgcgcaggcaactcatttattctttactaaaaaaagcaactcatttattctttattaaaaactgttaaaagatgttatgttaccgtattttatttaacgacggtagattatcttatgactaagaaaacccgctctgagcaggagatattgtgtcctgactctcttcatcaccccgacagcaaacccatatctatcgtatttttgtttgtgacctttcttgtgcctacctgcacaaccgtacgtggtgaaaatttcaggcaagctaaatagaaaaaacttgagttccaaaaggatctcttgatatcagttccatttcccatctcaatgtacatcgatgccctcaccctttctgactgacgtaagctttttttaataaaaaacttttaaattaactatactttaactatatatttacagaacgcagagttttaaaaaaagagtgatttgtgctagaatcaagattattttttttaataattgaaatgggttaccggtctatgcccatgggcacatagccaacaagtttcagataaatatagacgtgatgggaaaaaccccacaactcctgccaataaaagagtccactgaaataatgttttcataatcacatagtttctagcatgaaatttcgtacgtactatgccatccaacctagaataaaatctccgtgtaggatcgaaacacaataattaagccaaccagagggggtgaatggtcggtatacccaaaaatcaaaaacttttagcggaaataaaagttaccctcgaattcgatggagatcggtctgtccggaataaattagccggtttgattgaagcgtagccgccggtctgaccggtattgatcttacggcctaaccgccgaaacttgtcgccgcctcctgttaccgacgccggtctgaccgccatgtgcccgccagtctgaccgccgcgatgccgccggtctgaccgccggtgcgccgccggttagaccaccgaaacccggtgaaacacaaatcgaagaactcttaaagtggatgacgactttattaattctctctgtgtttacaaagtgcaccaacaacactcgttacaaaaatttcgactaaactcgaaaccctaactcaactctcaactcaattgctctcaaaagcgatacagggaagcctcacgctccccttctatttatactcaaggtaagcagcctaaagccacgaatcaaatacatactagaagtcctaaacaccttaggaaaccctctggtacaagaaacaaactttacataaccaatcataccaaatttggacaacttacaaagtcgactctacatcccatacgcacacaatacctccattgtatgccatatggaatcttcaccaaccacgtgtattgaattctagccatagtatctcgcatgatctctgaccaccacagacgtcgtcttatccctaagccgactcccggtccatcaccgcaaatactctcctggcatccgagtcacctacatatagaacaaacaaagaaaccatattccaagaccaagcattctccaacttgactcaaacaacagtattacatacgtatagtatccatctagaggccagaatcatgaaacaatcacggatatccaaacaaacaacccaaaaccaaaactgacacagagtcggctggtcaaaccgcgagctgcgccggtctgactgcgcgatacacgccggtctgaccggcaaccactacccggtctgaccggacccattccagtagtacctgtagattcacctgtgaaatccaatcatctccaaaactacttcgtgaatgaattccaaatatcaaaaccaataatctccaatgccaattgttcatcacagaataataatcaaaaacacctttgattttacaattaaccccttgatgaacacattggcaaacccatcaaaaatgtttggtgtttggaaaaataaaaacaaaactggtaaaaagcacacttcgtacaaacgtacacatcgtgctcgaaaatccaaaagaaaacttctcttacttttgaaaagaaagaaatttgcttttccaaaaattttcacttggcttctcccccttttgacaatgatttcatcaagcataggaattatgttcattaatggataagagcttagcatacatatagcatatcatgtcatttgttgcaataaaaagaagatgaacccatctataatatagcaagcatgcattaaaatataaccatgaaccaaagagtttacaattaagcttgaatcaacaatcaaaattcatgatttcatacgaattataatgcaacatcttaacaagcacataggttgaaaaataaacactaaacatatagacctattgcatttatcactctttctcaaataacctttagcagaaaataaccaagagaatttttaactttttcttttcttgagcctttttgcttatatttttctcttttattctgggtacgtccctatcgtcaagactgtttccagggattcggcacccattattttgctcacattgaatacttccttgtcatcaagactatttccaaggattcggtattcattttttccatatttttattctcttttcacaataagaaattaaagctattcgaggaataacaattcaataaagcatatatatagagcatttagaaatcaaaccacatgctagcgtcaacattgcatatttacttaattcaaatatagaatttaagtgtcatgcatcatctcccttaaaaagcaaaatctaaatctcatgcaaagactagaatacaaacaagctatgttagagacaaataaaccttcaaagtattgctagcatgtacaagaaaataccacatgtataaacaaagctctcttttctcaatttttctcattgtcatattttttgcttgataaaaccatgaggtacaaactccccctcaaatcatgccaaaaggatgaattatccccaattcaccacgaagaaaagcaaaacgattagaatccaaaggtttagtgaaaatatcagtaagttgcaagtttgtgtccaaaaactgcaattcaacatctcccttctcaacatgatccctcaaaaaatgaaagcgaatatcaatgtgctttgtgcgtgagtgttgaacatgattcttagcaatgttaatagcactagtattatcacaaaagagaggtactttctcaaaagtaagtccataatatttcaaagtagataaaagtcaaagaatctatgaacaacaactagcagcagcaacatattcagattcagcagttgattgagaaatactagattgtttcctagaagaccatggaatcaatgatgtatcaagaaaatgacatgttccacccgtacttttcctatcaattctacaaccaccaaaatcagcatcggaatatccacttaagcatatagaagatgaagtagaataccaaattccaaactcaagtgtatgatttaaatacctcattatttacttgacaacttaacgatatgaagcacgaggagaagcttgaaagcgtgcacacaaacacacagcaaattgtatgtctggcctagaagcagttagatacaacaaagatccaatcatacttctatactcctttt

SEQ ID NO: 9422 - DNA, 26039 bp, Oryza sativa
cgttaacaaggttttttctaaaatttcatgtgatcgtttataaaaacatctttaagttattaggtatctccttgattgtggaggaaacttttaatgaaagtcacataggcctttcacatcacatgcacagtttgatggtgagaaatttgatcaatatcagagcatgagacaccactcaatatcaagttgagagctttgcagttatcttcaaaatcaactttacttgtactatcagaggcatccaggataatataacctctaagaatgttttgctaaacatcaagacctgacacataatataagattgcatcttttgtttccaaaactgaaatcaactccataaaaaaacatgaggcttggttcaaaaccaattgcccatggctaatcgaaagagagcaaaaacgtgcctctcgtaccacttgtacgattgaaacgcgagaacaaattgtactagagggtgggtgaatggtaggtaaaatgagtggaagtcaaattatcgaacttcaaaccatcaaaacccactccaatctcaaaagccaaaggggcactagtttacggttagacagcgaagtgtaccacagtctgatcagacctaggtccaatcagaccacctgtacaggcctggttggccagctagatgagtgtcttttggcggaggttgggatgttttcttatcttttgacataacctaccattcaaacctcctctggtagacttggttctcatgttttgatcatacagtttcatctttatatctatagatggtacactttgagacctgtatccctattttctatatgattacgtacccaagaaaggtggttataatgatttagtatatctactatatatgaacaaccattccaactcaccagctatatatatatatatgtgtgtgtgtgtgcgcgcgcgcacgcgcgcgctactctaacatatttagagagattggttggcatgtaactgattctatatcatgtttatgaactattaaagaatttaacatattgttatgtgcagtggtgaccatgattctgttgtgccatttctcggtacacaaacctgggtgagattgcttggctatccaattgtagatgactggagagcctggcatgtggatggacaatctgcggggtgagtttgaagattgtgttattagtattgttgtttggttatgtaaccaaatctgttgcacaggttcaccatagcatatggaaacaacttgacatttgctactgttaaggtacaacatatcaatgcacaaccaattttcttatattcatagtaatttccagaggttgttatatatgaatgaagttatattatatatgactcttaaaatttcaaatttataatgcaaacagaaaccatcatgatcgatcaggattttagcgtatattggttctagctatatttacataactgattggcatgtggtaaatattaaagccgggaacaaacagatttttaattgatatagctttttccaaaaaatttgaaaataaaagcctcccaaaaattgttttctgattcaaacattgttttacgacgctatcctgaatcctcattgccatactgaaatggtcaatgcaaaataaaatagttgatgcaccctgagaaggaccttgccacatcactgtatatatatgggaacatttatcgccaaaaggttcgttgttagaaatatgttcattgaatgttttttttacaacttatacaaaataggtcaaaatatagtaacaggctgaagaactctttgtgaaactgtttatacgtttttcacaccaattaaatcaagcttcacagaatttctgagaaaatcattcgctctataggtggcacattagctggaaaattctgaggaaaaatgataaatatttaatctttccgctagtgtaatttggttgggattacatggtaatatgaaacattattggatggatattatatactgaagaaaaagacctgaatagaaataataggaaagtaggatatccaccgaccatcaatgccggccttatctatatccaccagatcgacggcatttggtagcttttgttacgaaattattgggtgatctcatccataccttggatgggattggcaaccgagtattagccatggcttagtgatcaattagaacaacttaattgtgcttcataaggggacatgccttttcaggatatgttcacatcccctcctggtctataaatatttgaaatcatccatgtaaaacctagaattgaatacaaagaaactcctcctttgctcaatctctctcgctctctcgtttcttctcaacacgttatcagcactgctcgtgaagaagataaaggaggaaatcaatcaaggagccagcatttgaaggtatgatgcctaccttgggtgtaatgcctaccttgggtgtgattcttgacgccattctcggcctccctggttggcaccagaatcaccgtctacaccaccttctatgctgctcgttgtcgtagcactagggctaccgcatcacccacatcacccacttcgaagcatggatccgggtaggtggccgccgccaccaaccccggcgccgcatggtcgctgacgccacgcggcctctgcctcgccggcctctgcacagctttcccccacctcactggacgtgatgctgtgatagttgggtttgggcaagccactattacactttgataggtatacgagttacaatcgaggatgtcttactgtatcccgattcaacccgtacattattaagttatagagatatccatcaaaatgggatccccattaaaacccatatgcataattaagatgaattttttctcttaactaaaccaaatggatatggcaaacgcagcgataaaattccatctctcacatctagattgtactagacatacattaatctcattgcacaagttgcatacagagtaatttttcaaaacgtcgatgcattccacacttggcatgatcgacttaggcaccccgatattgagatgatgagaacatttattggcaactgtattattcataatttcaacacagatagatttgtcaaaacctctgattttgtatgcactgcatgtgctactacgaaacagattttgagaccctcttaattcaaaattacagccgaatcacttaaaaattccttgaacgcattattcaaggacatatctagggaaattcctattatattagaccggccatgcagacctggtcggaccaccggtctcgacaggaagctagggacacaaatattcaaacgaaatagatgccgagtttatttaaattcagacgtgtatttcttaggattagaagatgattggagaattccctcatatattatatcaaaaatcttacccttagggttgatcggaaaattcggtggcaagcgtttaaacatatctgcttgatggtgagttatattgcataaatatggatgtggcactatttaagtgcttagatggtgatcgatccaaggttgctatgggggaagttcatgaaaggattcgtggtactcatcaatcggcccacaagataaattgttttttcaagtactatagagggtgtgatgcttgtcaatggttcggcaaccgccttgctgaatcttattatcaaaccatggttgttccaaggttgggcttaggatttcataggtcaaatttatttgtcatcctcaaaagggcatcggtacgtactagttgcgacggattacttcatcaagtgggccgaggccatgacactcaaaaacaggactcatgtggagataattcactttattttgaattttaatttattgttaatttatcttgaatcagaggatttgaaaatctatatgtgttgaaattagaggatttatcggttgaggaaaataaaaattgatgacacacaatcttgatgatgtgatcgataagagtttaaaggctttagaggagatagaaaaggagaaaaaaaaaagagtagtcaaagcctataacaaaaaagtaagagcaaagacgcttcaagtaggagacttggtatggaagacaatttttctttcggttctagatctaaggagttcggtaaatggttacctagttgggagggtccttatcgaatatgtggaatcattcgagaaaatgcatattttcttgaaactttacagggaggatgattttagagagcggtcaatgggaaatccttgcaaaaaattactccctccgttgactttttcttacatgtttgactattcgccttattcaaaaattttatggaaatgtataagatataaatcacacttaaagtactatgagtgataaaacaactcgtaacaaaataaattataattacgtaaattttttgaataagacgaatggtcaaacatgtgaggaaaagtcaacggcgtcatctattaaaaaacggagatagtacttcccgagtatttggcaagatgcttaggaggtgatatgaccggtaattagtttatcgccctaagatcacatgttatacacttttaggttcacaagttcacccaaaaggcagggggcatgtgttaactcccaaatttggcacctagattcgaagtaggaaaatattgccaaagtttggaaggcatcggatatccttcaaggggccagtctaaactccgagtatgggctagtctgaccggcggcaagtcgccggtcagactggctaaatccgagtctgaaacaaatttcgtcggatctcgggtttccttgcatggggagatattttttgaattctaattggtctctacctggaatttgctgtggagaaggtccgtaggaagcaagaccaccccccttataagggctaaggcatgttcaattggatacacaatctactttcaacacaattagcaaattgaattgctttttcaatatcgtatctactttttgtttagttctagcttagttttatccatcgctgaaagtcattcgtccacaccgtaagaatgcaattatccctttataggtttatcatgtaaaccttctgttcatccacgagacggatgtttatcctttgttcgatctaaatcggtttcgctaaccattttggtcttacaaaacccatcttgatttagttttggctagatcgaggtggttggtgactccatatactgcaagatgtttaggtatcctgattgtgattatcttcttgaaaagaaaagttgccaacagatgaatgcatgcttgaagagctctatgaaagaatgtacaacaagcaatatcagacaatagttaatatagtttatgcaaaacaagaagtatggttgtaatgctgagcactctaagtagtgtggtttgaagttaattaacagcaataaattcattttgaacaattcaatatttgagcaacactgatgatctaggctattaattaactaaattgttagcacaacaaaccatagttatatgacattcatagtcatttatcatcctacgcaagacgcgtctaataactgatcatcaaaattgatgacatgtgttgggtcacaaatttagtccaacactgataagggttcatcttcaacttttattcatcccacagataagtgcctatgtgatgggtcatttgtttccgtcacagatatcgttcaccaacgtactagtgatctttctccattaccaagataaatagcaatctcgaattgctagatctattttatttaggacttctatttttttgacggaatatttagccttttacatgttatgtctgtgctttacaatattgtgttcctaaatttaactgttggatggcggacatactgcaccagagtaccaaccggagagatgcttagccatgtttagacgatggatttccaacatgcctctttgataaattaattagttacccggcttgctgcacacttataaagatgggtgtatttccttgccgatttatggggaattgacttgcatcaatgttgtacccaattctgaattgggtaattttaccatctccggaggtaaatttaaactttgctatctctaaataatagatatcaaaatttttattgccaaattttggtatgccttctcaaggaccgtaaaagttctgatatgaatgtcatggttgttgaaaatgatatttgtatggaaccgatctggtcatatgctgtggtagcaatcctgaacaagtggttcaaaacaataactttgaccaaacatttgaagagttgtacttccacttgtctaaattaaatcaagcttagatggttattttcaattctgtatggccgtttttctttttgttgtgatgctcaatgtttggcatatatatattgtaaggaaaatagtaatattttttctataaacatggtcaacttataatatgatacggagggaatatttatgaatttggcttctatattctaaagcaactcgactgaaacactgacgcttaccttcggaatatcaactatacctaaactaaccatgtaagaaacttaaaccccaccaagaaagccacacacaatataatatacttgctctactagcctagccctactaatacgtaggtcaatatgtagcctaggccgagaaaaacctagtggataactggataactggccgagaaaaacctaggccaaccaggatctagagcatccaggatagtgtggaaggagcctacacgacaagtccacacgggtgtataccatttaatctacatggtatacccactacaagattcctaacttttaccaagggggtttaaaccgtcggccacttattaaaattgtcagccatacatattccagggtggataccgtcagcaacttcccctcagccacatgtggtcggtaattgatcatattgccgagggtaccctcggtaaccatgtacccgaggatttcatcccgagggtttacggttggtctttttttcatagaccacgcatggtctttcttgccgaccacatttcccgagcgtataccattggttattcttattcttactgagaggtttattttcccgtcaaattgtgagaatcctcggctattaaccgatggttctgtaggccttcggaaatagtatttgccataggtttttatataacgtcatccattcgttaccctcagaatagtatagctgagaggttatttaggttacatggaaaagtaaatcaaacccttggtaatttgatattttctaaaaaaaagcaaatttaaactgtacccatttttaattattcttataaaagtaacatactacgtagtcacatcaaaacaaatttcagcttaattaatccctaaatagatccatgggaagttcaaccatagatatataaccaaattgttcaaaaatatttatcatccatcaccatagcaaaactaatataccccgttggtcactaatagttatttccgagagttaaatcaaacccctcggttactaatataccccatcggacactaataataatttccgagagttaaattaaacacctcggttactaatataccccgtcggccactaataataatttctgagagttaattaaacctctcagttactaatataccctgtcggacacttataaccatttccgagtggtatcttataactctcactcactgatatatcccgtcggccacatgctaaatagccgaatgttctcgtaacaaccctcattaaaatttcaaacggtcggccacctaaatcttcctgacggtctgtaggtttttttgcttggacgcttggcaaatcttaggattctagtagtgaccacgcgctagcggtcacttgctagcagagacggtctgatcacccaggccatgcatgaactagatgtccgtggctagcttaggatttgggccagtcctgggtccacccaacattggtagggatggaaataaactgtcatagaaacggcaggaaaatagcccaaccatttctgtatgaagaggtaattgtgttttccccttgttgtaaaactcaattataattttaccccttattgtaaaactcaattgtaattttacgtttacttttctggggttgtgattcttcccttcctttttaatacgaagcttctgtttgccctcattctgtatggtagtttggtgagcaaattaagtgtgttaaaaaaagaagaaatttctgagaaaatatgaaaaggaccattatactcccaaactaaatataatacgtccattggttcgagtccatcccgatatggctcctcgccgatctgatccctagccaattaatggccaaccctaactggagcagcatggcagcagcgtgcaagctgactagtggtcggcctcgcctgggcgacggagaggcgagcaaaacacagcgcaaggggaaccaggtggcccagggcaacgagcaaaaggaggcatgggccagcaaaaggtggcatggcaggctaggtgaagctgggcggtgcagcattaatgtcctcttccacaaggagtccagactacggctggcatcgatattttcgattttcttttctcgctgaactcctgcgcgttgctcccattagtgctccctatgcattagcatctctttgttcttcggatatgggaggcaatgagttggatcttaggtttgtcaaatcatgaagaaattaggcttaaaaaattcgtctcacaatttgcacgtaatctgtgtaattagcttttttatctatatttaattctctatgcatgcatgtgtccaaatattcgatgtgataaggtgaaaagtttttgcgtaggaactaaacagggccttatgcattttataaacaaaacatttaacctccaaaacacaggggaaatataatcaacgagagtggggaggtgacttgtcttgccatggttctattccctgctcagcaacgtaatggacctctttgttccccatctaaataataagagcacacgtgacaatccataaatacaaatatgcatgaaaagtaaacatgctcaaaaatggatgctcttttaactgtgaataggtactgttatatcatgattttagtggaagaatttctgttttatcgcattccaaatgcaggttataaattttaaagttacacctcaaaattgtgatgcttatgtatatttcgaatttttgtggcaatttcaccaaatataagttcacaggattacacagcataaaaatattaatctaacaaatttttgttaacttcacttggagctataatgagtttcctatgaatttttaaatttaacacattaattttcagtacatcaataagtcctaaactattattctatccattccattaagggggcctgttttttttctaccctataattcaccaacaaagtcttacacattacattcctcattcctcattcatcaaatccaacgaaccatattcatctgcatcagattgaacgtgtgagatcgagtccccccactcccaccgctttcttcccctccactcaccaactccctccgcactgacccacggcctcgccccgctcgcgattctagccccgacatgctgcaaatccacaaaccctaactactcgcaaccccctcgccgtcccacaaaccctatatcctcatgatcccatagccctcttctgcgccgcccccgatttctgcctcgactactccatccacactgccgagtccgttgccgatatcactcttctccgcactcagccattgggcaacggacgccgctcttctccgtgcttagcagctggctacctggtcatccacatccctcgtgctgctccccatccccatcactgtttcaccgccactgatctcaagcatcatcacctcctcttgccaactaccgatctccaccgatggttcaatgtcgccctcctcgctggtctcgccctgccgatttgcttcgccgatgcgctgccatccccggagcctcagcttctctgctgccacaccgtgtcgcactcaaaccattccttcgatccaagaaatctgtgattggggcattctacttattcatcaatttctgtggcagtgcaatgtacgtttcattagtacaacgaaatatttgcagcgtttaatttcattcaacagggtcatgtatggtggatgtatgtacggtttcagatcgtggttttggatgaataaattgcgttcaggttttctctttttttggaaaaattggttctatagcattagaagttcatattgttggtttaacagcaccaaatattaccgattcattttaatagcactgaaagtttcatccgttcatgtttctaacacttctgttacttttgcactttttgccgttagctttgaccgcaattgacccagcgaactacactgattaaaatctgtgcccttacgtgtaggtcttcatccctcccagcctgtcctctcacttgccacaatccagccctcacctagctggtgtttggatgtagagactaaactttagtacatgtcatattggatgttttgatactaatttagagtattaaatataaactaataataaaactaattgcataaatgagagctaattcgcgagacaaattttaaagcctaattaattcataattagcaaatgtttattatagcatcatataggctaatcatggattaattaggctcaatagattcatctcgcgaattagtctaaggttatagaatgggttttgtaattagttcatatttaatacttcaaattagcgtccaaacatccgatgtgacaggacttaaaaatttttagctccatctaacctatatacgctgctgccgccacccccgcggccctgtcacgcggaaggcgtggacggccagagggtttgtccggcagccttgccctgtcgatgttactgccccgttcttcgctttagcctcgcactgtgcagaacatgttgccgccacccaatccatcagcagcacgtacatacgtctcgcaaccttgccctgtcagcacggatccacgtctatgcctagcacgagctcctcttccaaccaacagcaatctgacgcatcatcctgcaagtttaaacgaattatcaggtattcaacccttcatcggcaattatagggcaaggtagttcttacaatcttaaccataacatactacatcaaacctaactaatgcaacactatgttataattaaacccaatagatctaagcaagctgataattatatattattctaacataacaaacttgtttaagccataccggtctaatctagatagatcggccgataagggtaaacaatgatgtcaatttagattaaacaatgcatatgatcaatgtccgattccactaagattggatcaaactagaactctatgtctaatttaagaaaactattataaactctgactcactgacgacttgtagcggctaaacattaccaaacacacttggtccgatctcaacacgactccaccaacttagaaaacaaggaaactacgatatactctccttaattctgaagctaactcaaacttgaaaatctctgagattatgacatgaaagcctccttcgactctatctttgtacagttactatttccacatggctcggtcgattgccaaatttctgtgactattccacccctgtcgcgcccttcagattttcacacctaaatgcacgaatcttggaccaaatataccttctaatccttctctcccctatttccacttctaccggcgaaaaaaaaatcaatggatcaggtcgctaatcacggacacgcacacaatgcggtggtggcagaccgcagatggacgaacgcggccatgggccggtggtggccacttcggacacttcgtcgtctgtccactactttccgctgtcaaatttctgtgataatgtcaggaacgatgaagatactgcacataatcagttaagttcagacaagacagaggctgtgtttagatccaaagtttgaatccaaacttcagtccttttccatcacatcaaccagtcatacatacaacttttcagtcacatcatctccaatttcaaccaaaatctaaactttgcgctgaactaaacacaaccagagctaaagatggcatgaattgatgaagaaagtgcaccaatgtgaaaactatccaaaattctggagtaatatttgtgtatggccagccaagcaaagagcttgttgtgcagaagatgaaggaagcaagaaatggccaagaaatagtctgattcgcccggtgatgagtcggcggtcccctctacttcatcggaactcgcaggggagaagtgccctaggcgacgaacatccgatgtctccgccgccttttattcctacgagcgcgattaacgggctagcgctggatgatcagtcaatcaactttttggttcaacctatgacatattcgacagttttaagggaaaatacattcactgtgaccatagtgtatttacgttgtaacaagggtgcagttaaactggtaacagcgtagctaaggtacagttacagtttaactatgatgtagctttagtttgtactccctccatttcgttatgtttgacgtccgtattcaactcaaaagcagttttaatatttgacgctggtatacacccaaaaactctctttccaactttgcccttcgcccatatacatcagtcataccactgcttccacaactgttagattcggtgccgccgacgacatccatcgcgctgtcgtagtccgagcgccgctaccggcagtcgatgctttgttggtgtcctgcctcctaactcccctcctcatgctccctgccaatgcggccttcctcacgtagtcgctccatgctcgttgaagagatttgtggcggtgtggcctcaccctctgtcgaaacatgaattcggcaataataaaagagggtagcacacgagacctaaatgtggatggatgcggagacaaaggatttagacagattcaggccttctcaatgagaggtaataccctactcctgtttggggatttgaatccgtcgggtgtgtattgatctgacgatctagttgtgctcatgccccctagagggcctccagcccaccttatataggatggggggcaggattacaagatagaaaccttaaccaatacggtatcggttttctaaatctattttacaatattatcaaattaggactttaggccgctccataatataaaaggaaacataatacccaagtcatgatctgttacatattccatagatataagttatcccctataaccagtcggataaccatgccgtgtgggtatgtggtacccataatctccacagtagcccctgagaccttcactgtcgaaaagataatcttctctcgacccagattactccaaagccaagtgcttcaatcatctttgccatggtctcccgagtacttttaccaaatatgaagactgtggagggctgaaaaataaagtcaagtacatcgactatatgcacctaataggtgtagcccccgactatatatgtggttagctaaacaaactaagcatatagtcaagtaataaataatccaaccaaccgagtggttttgataattgtaatcaaccaagtgacttgatatcaatatatagcatatgcggtgtgaatcccccaaataacatgatccaagtgatataccgactgctttgtaaaaattgatgcgagcaacctaaagttgactacatcattgaaaattcacatagcaaaacagctataaaaaagctcgaatgctgtgaataaagaaattaccaaagtattgggcatacgccatgcgcacactgctttaacagatgtgcttaagtccctaaaagacacatgttttcaccacacccgaaaatatacggcatatgtggtgtaaaatccgagtaaataaactcataaaggatttaccaaccgcctgaaaaatgaccaagatatataatcagcctaagccataatattggtcaataaaaatgcacacttacgtggcaaaaagcaacgatattgtatccaatcaattgcttaaaaactcaaacagtaccttgacttatataaaaaagtcagcgaggcagctatataaagctttactatttgacaccttttaagatgcattgtaccaactcctaaaaagttgagtaactgcggtataaaaggattttaagatatttggcactggatcacgcgcactttggcctaagcaaaaagtgcctaagtccctaaaagaatgtgacatgccacacctaaaaatatgggctgcagacatattagacctaggccaaaaaatatgccttcgacaccctttaaaggatgacgcatgtatcatgctcccgagtaataaatcttccaggtgatatagaccaagtgtaactcatatgaatagcttctgatctgagtgattatcccttatgggatactccaaaatagatataaaaattgaatctcgactagcgcaagtactcagctgttagccctcacgacaaataatgagtggtccagtcgttgagcatgagaaatcgactcatgaccatgaatccatgttgaatgtatccggaataaatccaaattgaagatataatcctcgcgcttgtgttgatgagcccctaagcatgtagcttatccttctgttgtagtcacaattgtccattgatagtagctgacaccatcggcatggagacgaaatgaccaacatgaagatgatatcacccatcaaagctgacgaaaatgttggtagtagtaaagacaatgacaccaatcaaaggtgatgaagtcgcatagccatggaggcgaagaaaccagtcggcatcagataagtcagccagcagagaagacgaaggtgcccagcaacggtgacagagttgtgcagccatggcagcaaaaataatcagtcgatgacagacgagtcgctcggtgcagaagacgaagactcccaaaagtaggggcataataagccagccgtgaaagcaaagacaccatgggcggcagtagaggcaagctggtggtgaagacgtagacgctcatcaaaggcaatggcgcaatccatcaatcatgaagatgaagaaaatagtcagcgacggcaaacacatccgacagtaatgatgattagcggcaacagagatagccggctatgatgacgaagttgcgcatcaaatggcagcagagtaggcatagccaaagaggcatggtaggatgttaatgaagatgacgatgtcagtgatctggtcaatagtagtgttgcagctgatgataatgatgagatcttttatcagcagttgcatagtaagccaaccgtgaagacaaaataacaagtcggcgaagtcgtagtcatccattagcaacggcggagacatcagggccaatgaagtagatgtgctggtgatgatgtcagtaacaacaatccatcaaactgttgagaggaaatccatgctcaagtattttcttaatgttggcatgtgtgtgacgaagattgatgcaacgcctcttgatttatgaagatgacagtagaacttggtgctatagctgttgcatatgcttcacttggaggaaagtagatgttgttgtccttttatgatccgagtgatgttgttggcatgaagaagccaaaattgccggtgtaataattggagtcgctgaaattaaatgtcggctctgaagcgaagacgaagataataactccccaaattgactcgttgattgattgattgcttcatcttgacataaagcttgtcgaattttttgagagtcttgtatttgtgtagcccccgactctttggttagttgagaaacaactgaacatagagtcgagaactgtagcttcttgtcgtcgagtagtcattgcttgagtgaacatacgtgttgaaaatgtctgagtagaaatattgaagattggaacaccacttgttgtagtaaaataacacggcatcatatttcatgacacatgccgagatgtcgagtctcttgtagacgtcgtggctgatgaagtagcaaaacttgcaaagtagcagcaattgagtttgccggtgccgaagataataaagatgaagtcgctccactatggtgacaaagttgcaaagccgtgatgaagtgaacacgagtcagcggcaacagtagaaaactggtggcgaagacgtgtagttgtgaagatagatactccagtcggttgagcggcggcataataggctagccatgaagacgatgacgtccatcagtagtggtagtggtataaactagccgtagaggcgagggcactagtcagcagcagacgagacgaccggcggtgaaaacaataaggccaatcaaccctggaagaatcatgcagccatgggagtgaagaaaccagttggtagcagatgtagatagcttgcattgaagatcatgacgcctattagtggtggcggcgacgtggccaaccgtgaagacgatagcaccagtaggcatcatacaaggcggcccgtcagtgaagatgtagacgtccaacaatggtgacataataggccagccgtgcaggtggaaacaccaatcggcggcggacgaggcagccggtcggtgaagacgtagacgaccaacattggtggcataataggccagccgtgcaggcggaaacaccagtcggcggcggacgaggcggccggtcggtgaatacgtagacgcccaacgacggcggcatattaggccagccatgtaggcggaaacaccagtcggcggaggacgaggcggccggcggtgaagtcgtggacgcccatcaacggcagcataataggccagccgtgcaggcggagataccagtcggcggtggcgaaggcagccggcggtgaagtcgtagacgcccatcaacggcggcataataggccagccgtgcaggcagagataccaatcagtgacggcgaaggcagccggcggtgaaagcgtagacgcccaacaacggtggtgtgaccatccatccgtataggcgagagcaccattcggcgacggcgaaggcaagccggctgtgaagacatagacgcccaacaacggtgatgtgaccatccaaccgcataggcgaagacaccagtcggcggtgacgacagcgagccggtgataatgttctgactgatccattcctgaagcataggagataagcttaaagccatgaatccctattatgcatatccggatctggatcttgcagaacaaacatataggatgagtagtatctgatgtaaatacggtactcggggaaaattcaagtattttaaaatgtttataaatatgtatttctcctcttatcaattttgatttccccgagtagatgactcattacgtttaaacactctgcccaactagtcatagcccccacgcatcgggagtcggcctaagcacttcccaaacatgcatatgagtgacatgagttcgtcattaatggaacaaagtttcacgaatcagaatttactactcgggtacttttgcaattgttaagagcagaaaataaatttatcttatctctatgcttttgatttattccgaataatacttagcaccttgcattacccagtccatccaacaagcccccgggtgctaggaatcggcccaaaggcaactatccatcagcaaaccaaacggaaagcataggaagatagaactccataactcgataggcacttttgtactcagattatattgcaagcaatcaagataaatattataaaaattgtttaaaaaatatgatataacatctgtagcccccgactcactagtcaacggcgaaccagttgatgtagtgaggcagaggaaaaggaaaatatcatataaacaaagttaatgatgacttagctttgtaatattccccttgatgatggcagaggtggccaatgtgggaacaaagtcgtccgtcaataacaatgaagacaccagtcgggggcgaaagaaggcggtcgacggtgaaagcgaagatgcccaccaacggcggcataataggccaaccgtgtaggcagagacaccagtcggggcggcaaaggcaagccggtcggtgaagacgtggatgcccatgaacggtggtgtgactaatcaaccgtataggcaaggacaccagtcggcggcgacggaggcaggccggtcggtgaagttgtagacgcccaacaacggcggcataatatgccagccgtgtaggcggagacaccagtcagtggcacaacggcggcataataggctagccatgtaagtggaaacaccagtcggtggcgacgaaggtaggtcggttgataaagtcgtggacgctcaataatggcggcataatagggcagccatgtaggcggagacaccaatcggcggcggcgaaggtaagccggttggtgaagatgtgcatgcccaacaacagcggtataataggccagccgtgtaggcggagacaccaatcggcggcggcgaaggcaagctgtggatgaagatgtagacgatagcaccagtcggctgcggcgagggcgagcaggtcggtgaagacatagatgcccaacaacagtagtgtgaccaactaaccgtataggcgaggacaccagtcgacggcggtaaggcaagccggttggtgaagatgatgtcgccaccagcaacggcggcggagaacaccaaccatggaggcgaagagaccagtcggcagcgacgaaggcggccggcggtacggaatcttgataacctgatacgaggctgtgtggcttgatgcaatttttggcccatcttaattaggtcttagccgagtaggataaccagacaatgtcgtagccaagcaagagtcaggttagcttgttctcgatcggatttggctgttaataaaacaattttgccgatggaacacaatagctcgatagtctgggacttcgatttgtgcttgacaaagatctgtatacataagcatatatacggccatgcaatctgaggactccatccaattggttggcaagattgccatgcgtgcatgcatgtatatgtagatggaagaatacacttgcatgattggttggcctggtatccatatatgctttaatgcgtatgggctggatggatatactagttggtgtccattatcaagggtagctcatgatagccgattgacgatgtatatgtatagcaattcttctcggatgtagttgcaaaaccattttgtatatttgtatccaataaaacatgtgtgcttgactgcttgattccgcttttctctgccaaggagcgatcgatctatgcccatatgcttgtacgtctcgtcgtcttacgtagctctggatacctctggctttgaattgacgtgaacgagcggagtcaggctgatgggaaactcgccgaaggcttgtcatgatgaggaacgaattcagacgactgattttcgacggctgcaatgctatccatgcttccgtacagaaaaacttggcttggaaaaagatgagtcgacgatgctggtggcagccatagtagattgaatctaaaactcgctgtggtagtctggtagagtggttgttatcctctgattggatcttcttcgactggtttgaaatcaagtcagagaaaaagagcttgttgaaattgtcggcggcaaggaagtcaaagctggtgaaccgaaggcgaaaaccggcgactcatgaagttgattccatcgcacttgtcaatagaaactcgacgcgcccctacctggcgcgtcaactatcgaaacatgaattcggcaatagtaaaagggggtagcgcacaagacctaaaagtggatagacaggttcaggccctctcaatgagaggtaataccctactactgtttggggatttgaatccgccgggtgtgtattgatctaacgatctagttgtgctcatgccccctagagagcctcctgcccaccttatataggatggggggcaggattagaagatagaaaccttaaccaatacggtatcggtttcctaaatctattttacaatattatcaaatcaggactttagaccgctccataatataaaaggaaacgtaatacccaagtcatgatctgttacatatttcatagatataagttattccctataaccagtcggataaccatgtcgtgtgggtaggtggtaccctcaatgcctcctctggtcctccctcgttgatgccccgacgtcttgcgtgaacgcccctgcgtcgatcagctccaatccgctagttatcctcatggcagaatcgccctgctcaccaatggggtagggacaactggcgaggagatgaagggagaggagaagatgctcctgttgatgctcaggtgtggcttcgtttccttgttcttcttcatcacaagttgtcaacttcccccaaatccttttcggatgaaggcgatatttttctctttttctgtccacagaagatgttcttgatttctaacaacagttcagtgcaacaatttgcaccgctgaatcatctgcaatcttcagagaaagatgcaattctgctgcttcaccagctcattcaattcagaaccagaacaagaaaaagatcactgggtagatcactgggtgttcaatggtgaactgaaactgaaccgaattgtccataacacctgtatgcagcagcagaccgcattctgctacattcatacaacccaaagatcctgatgaaacatttcttcattgtagtattgatctgaatatcttgagtaatgtcacttcaactcaacagcacgaaaagcttgtgcaattttgacaatactcttgtaaagttaacaatatggtttcttgtgaactgtgacttcttgtaaagttaacaagggtaaaattatggtgcaataaaggatgccgattttttctggatatcttgtgaattttgaataagaatgaacaattctgtgtctttgcatttgtgcaatgaggttgaccattaggagcaaagccagaacagggtgcaattagcattcaaacagagagaggagggaattccaaaagaaaaaaaaatagaggtgaatttgttttcttggctactaaatgttgaatctatataggatgaatttggctaccatccctccgccgccgcatgcctcgccccgccgcaacctcatgctgacccgccgccggtgacgccatgggctgcttgcacggccgcccctccaccgcagccccgccgcgaaggcttcccgtcgccgcctcctactgttgctgttgcggagatgtacaagcagggagcggatgcttctacggaggcggaggctaacgagaagggtgagcagccggccgtcgccgccgcaggtccgctggtgaagagggagaggcgtggtcgtcgaggtcggctgccgcacgtgcacacgcataccaaggtgcgccatcggggggagcttcgcatacaagacgcgcggtgagcaggtcgccgctgggtggcccgcatggctctctgccatctccagcgacgccatcgacggctggactcctcgccgcgcagccactggtgctctgctccatggtcacctgccccaccggcgcggtctggatgaacgcagcagcaggggagaccgtagaaataactcagcaacgggagggcaaactcgtcaattcactagttccttaattttgtcgaagctgtcggaaacgacatatataaaaaagaagggtgaggtatcagaaaaagagatggtaccagaaaatagcacagaaaaagagatggtaccagaaaatagcacataattttttcccttttaaccataagtatatgtctttagtttttctttgatttgtagcatcccattacatttgaggggctaagttctcaatttaaaaatgttgcatatatctggttggatgtagatatttgccatttattgggatggaaaaaagactaatttatccttcttctactcatctttccccttttcttcctcccgtcgatcttgccagtgcgtcagtgggcagccatggtgcggcaatgcagcgtagcagccagcatgcaatgcagttgtgtgcagtgctgctgccgggactaaggctgacgctgcggccagcgcatgcggcgcaacgatggcgaggtgcacagcgcaacggtggcgaggcacgtggtggctgacatggcttatggcgcaacatttgatgtggttactcgccgtggtggtcgcacagcttcccggtagcttgcgtcgtacaacctcattggctgcacctcgtcctcatccgccgcaatcgctgtcggtcaccccgccaccgtcgccacggtctccgcttcttcgctcgctgagctaaatagatcagaattccaaattcatgtttggttacaataaaggataaatttgtcttttcacatctctaatcatggctaaccaatcgattcagatagaaaatgtgacggaagtgctacaaattgaagcaaaacttgtgacatgtgcttctggttgaaaggggaattttcttttaccggtgttttttctacatcgaattttctctttatttttttcactggtaaatagagtagtataatggtcctgccacattccttgttgagtaaatcttaaagatcgcttttcatccaattaaaaaaaagaggaaagtgcgagaccagctagcacttacagaatcacaagtacatatataggacaagtacgtgcttaattcgtactactcccggttgaatgaaatttgattctcataaaaaacaacgtaatacagtatatgatagattctagtagtataaatttggacagattgtgattagatttatagtcctacaagatcttttcatatttgtagtaataggatatgccaaatctaatgcagattcgttttctttttaagagacggagtacatgtaggacaatgaagtctgatagaaagcagttccaggcgtcactactcgtctgtacgaaatctgacgacgcagggtccagactccaccagtccaccctgtaattcatggcgaaggacgaggaaggtgagcacaggacgaacagcaacagcaagctcgaaactaatccggtgataaatgcatgcgccccaacttccaactcacagttcctcctcgtcattcaaaggaaagtggcaggcaggctagctgctcggttgacacacgagcacacacaagacaaatgccgccacgccggccggcggcgcagtgcgtccgatatatggcggcgttctggttcatcatcctcctcgtcactttcttctccggcttcgctgccgccaccaccggcgtgaccacgtccacctcgaaccagaagccgacgtatatcaccagccttccgggactcgacggcgcgctgccttcccttctcgagaccgggtacgtgcgtccgtccatgccgatgacgatggacgactgtaggtctgtagctacgtgcatccattgaaaattacattttcccgctgctctagttggtgtgcaagtcgtggtgctcgtgtcaaaatcttgtcaggtacgtgaccgtcgacgaggagaacggggcagagctgttctactacttcgtggagtcggagggcgaccccggccgtgaccccgtcctcctctggctcaccggcggccaccgctgcagcgtgctcagtggattggtcttcgagatcggtgagccatccatacatataccgattaatcaatccgcgtgcactctccgtgctactactgctgatatgacaacggtggccaggcccggtggagctcgtcagggagccgtatgacggcatcagcctgccgcggctgcggtggaacccaaactcgtggaccaaggtggctagcatcctcttcgtggactcaccggtcggcgcaggcttctcattctcccgtgaccccaacggctacgacgtcggcgacgtctctgcttcgctgcagctcatcgaatttctctacaaggtactagcataaacagtctgacatgcacctacgtgcatgcacggtgaatgtgttgccgttggtggtttcgttgtttctgctcgattcatgcatgatctctcggtcgtttgacatagtggttcagcgcgcatgaggattaccttgcaaacccattctacctcggaggaggttcatacgccgcgaagctcgtaccattcatcacccagaagatctcagaaggtacgtatatatgtaacttcgctttcattttctttctttgggagtttttaggctcttttgcagcgatcaggttttccaaataaatgctgtaaattgtttacttacttatgattatctattaaaatttcactggctactctgctttcaggtattgaagctggagtgaggccgattattaacctcaaggtactcttctagttacctataagttttgcaataacaggcgaggccaattattgatcagcaacacagttagcaaactcacattatccaacttacaaccaactatagtatgaagcttataatctagtaaaatagttacaattgagtatggaccaatttgtatttctgggtgatgaacagggctatacggtcggtaatccccttacaggtgatagcattgactttgattcgcgagtgccatactgccatggagttggagtaatttcagatcagttgtataaggtaagaaccttactcttttaactcaataatcaaccaccatatattatagcctagtcctcccatgaatcgctaggatttgcccattcatgtgtcacggagatgtgggtgattgagagttaattactgacacatgcaacttcaaaccctaatgaattaatttgctccatctgtgcatgctacacttgagacttcctccagtaagattaagtgatctttgtttctcacatgcatgtggtcgactcaagacgataatggataactgccatggaaagggttacagtaaccccaggacttttatttgtgcaaaagctatgtccaagttcaacgaagtaaggaacattacaatttacaaatacctaaccgattttgcaataccctatgtcgacttgtttcgccagtggttcaagtcatctttttaattactgttggattgctctaagattcatgctgtcagtttctcactgaggactactaccgtgtgtttcgctaatatatgatgttagtttctaaatgtttgttgaccattcattttaaacttactctgttattgcagccacacaaagtggcggcaagaaagaaaagggcaagaaagactgatcatcctggcctgtctccctcttcgtagaaaaaaaattaggtatcatgtttgttttatcaattaaggtactacaaacattacttttagttttgcatatttatattaaaatttaaaaaaaatatgtacactggataaggagaccttagacataaggtctcctgtaataggcccaaacacttatctttaacgggtttgggcttggtcagtgatcagttgtcactggtgagtccagtcacctttgatgggtgaccggcccatcggcccatcagaggcacactcacctctgacgggtccgtattttccggcccgtcaaaggtgaggatctccacaagccaatgtgtagttgcaacccgtcacaggtagacacctttgacgggtgcatattttccaacccgtcatacctgagactcacctcctacgagttcaagatatgaacccatcacaggaatagaaagtcatcttaaaaaaatggtgcccagttgcaaccatagaaaattggtaatagaagccgaagaactaataattaaccccaaacatttcaaactaattcctttcaaaagatggcaagaagccgaagaacttacaaggtttacaataggaaccgaaaaacaaactacaaaactaaaaactactgggaaactacaaggtttgagacactgcatttcagggaaaatgttaagattctaattttctagctacatcacaataaaaacatctctagtatcttcaagaaaaacaagacaaaagttcaaaggtcttcttctagaatcaattaatctccattggcaacacatcatggggcttcaacaagaccacacccgattcagaaacttgtaatcgatgacttgcaacatctgaaacaaaatcgtaagcacataaacacattgatcagtacttgggagtggattaatccggaggaggaagctacggcggtggccgcaagaggatggaggaggagggcgcttggggacggaagagaaggctgtccggcgcggacacggtcgcctcctagaggtcggggttgaccggatccggcgtcccctgacctctaggaggctggatccagtgt

SEQ ID NO: 9423 - DNA, 156583 bp, Oryza sativa
gaaacggaggtatagcagttagatggtaactattacattatgaaatatcatgaacataaatattgtataaaaccaaattaaacaaaatccaggaatccaactacatgctaactttgatcaaccattcaaagctcatttaatgtgaaatggactgtttggccaacactgacagtgggtggatgtaagtatcacagcaagacataatatcagatttgctatacaacacacatgcatctagtttgacataatatcaggcattcaggttttgatgatgtcagataaaatcatacatggaaccaaacatataattactggagtcatgaagcatgaagaaagttacctccatttccattttcaacgagatgtatctcgccaacacaacagctgcagtttcctggtcaaaaccctcgactaattcctacagtcaaatagatgtcagttaaagtcaaaaccgcaacatatttgcccttacttgccctatcattaaataaattaaacagtacgacacagcatgttttggaatccagattgttcaagccaagaaacacctttttttgcagctatacgacaaacagtgtaaaagcttaaaaatattttccaaagcattgttaacatttaaccaaaattttcagatatgctgttcactgtctagccagcagagcgtaattgtccttgctggctataaaatacatgggttgttacgcacagacatgagaaataatacaattaggattgttgagatatagtttagcagtattcaacaacatagtataggaactaaagaacagattttcaaggccaacctctgtgttggtagatccatccacccattttctgcatatggtagtaactctaatcctcatttgaccttctgggtgttggtaactacagagaaaacaaaagcacaattataacatcaagccattcttacactggaggcaacagaataaaaatgaaaggtaccttgttacaaattgtatatacagatcgggattctgatgtcctggttggcttgaccgctcactcggtgagacatcaaaaaatactgttaatgaagtattcctgtcaagaccacacattttccatgctgttgtatttccttgaccaacaactgtgtcggcacatagagctcctttctacaaatgccatgatgtattaaaccaagtctcaaaataggcctttccaatttgaaatatcttagagcattgactagatggaacagatacccctaccttttccaaagatgtgcatggtccaataataccttgaaccttaatgtccttcgaacagtttatttcaagcgtgccactttaacaaaatgaacaagacaaaggatcagtcactgatgaaacaaagtatatgaaacatatacaacagtaagccatgcacatcaaaccaagctgttacagtacaaaatatatcttttgttcgcacaattggtcaacagaaagatcaaatattcagggaattttcgtctactgatatatttattgtacgaagaattaaaatgttggcaccacctccataccccagtaccagtttataaacagagcaattcttatcaagataatgatagggaaaacctattgtagtcataattcagcatttatgcttcatgaagcagaaagctcaataccacaatgcagcccaacagggggaataagcatcaaacttacttgaatgaaaggtcgagagactgttcccctccctcaaaaatacgtttaaaagaatccttaaatactgaatgcccaaagctttcagataagacaacaaggccacctgttctctcaatagcgaccttcatctcggcaaggccaacctgtaggtgttccaaccattttttgtagaaaaaacagaaaatgagttcaggtcatgtgtatcacaatcagcagttatgaaatgcctaatgattgagaattgaagtatgcaatgtatcaagtgataactgtgaactagcaagcagagtcattacgactcaattggcactaacaatttcactagaagtgaaacaaaaaatagtcatgcccgtttatcaaatattaatctactttcatgatcactggattggtatgcagacaacttgatcctcacaaaatgaactatcaataaatattttcatggactatgttgtatcaagttctacagttgacaacaatacatatatttgtatgaattgaattttagttttgctccaatgaaacgaaagctcatatcagaaaaggaaaagccaaaaaatatgtctggttatgctgttatataaagcatggtggtttcactagggtttccacctctttaacaaatgtagcttggatattcccagaattaaaatatttgaatattcattctacagtatcttgaaaggacaggcaatagtattcggaacatatgttgtgagcatagctccaaaacaacagtctggatacaaacaatgtacagttgtgagattccagcaacatgcaaactctgctgagcatagaagctttaatttaagtatgaccacaagctgctggctaaagagaatactatacatacctgatcaagagcagatgcaaaaacatctaagacatggccttgactgaccaattgtttggcaaggccatcgtaaaatttgacagctttctggaagtgaggagctgcatccttatcaagatccttatgtgatctaactggctctgacaaatctttcgacacaatctgcattgcccagtaaagtattaaattgggacttcaaagcatcatgaaaaatgaacagaagcatggagaaaatattagagggggacaaagaataacaaacagaagtttttggagttctgcaattctgaaaggtgcaattgatgttctaggggtaacgaattactttctaacaaatagcacaatctgaactatgcactttcatttttagagtttatttgcatcgtgctcgggttaattcaggggggagcatcaccaacattatccatctcaacattgataagcaggtaaaagtaaaacttgcatagtgataatgtttaagttgtatatgctttaatcaagaaactgattgaacgtataatgagatatcaaattaactgatatagtattatgcattttgaagaaaggaggaaaaacattcaatagaactgtgcctaaagtatacaaatgaaacatgctttggatacttcataagccttagtcataactcccaaccaggatattatcacacaaaaatttctaatttttagctacctaacatcaagtactttaagaactatccacaacattatcgcaaaatcaagtcaaaatgcataggtgcacaacaaagtgggatctttaccattccaggaccctcggtgcatggaccaccaagaagcgcaatgatccttgcgccagtcccaggcatacaagccccgagcaagccagccgccacactcaacgcaacacccgtgcaccggatcgcacggttcccggtctccaccggccactggtcaggctgcaactcgtccagcagctgcaaaagaacaaaaacttatgcttccttgtactgaaaaccccgaaatcaaatggccatgaacacaatttctcaccgtgctgagcgtgcattcgcagtctgacaccgggagcaagaacctagtcaccccggccgttgccgggggatgcatcccgttgatctgaggcccccctggctgctgaggcatcttggggaaacccggacgccccgcacccgccaacccaagctgatccaaaatctgctccttggagatctccttggtgccccggaagacgtagatcttgctgagatcggagaacccgagctcgtgcagatgcacctgcgtcccgaacgtgacgaggccgacgagcgcgtgctccggcaggagcgcgacggccttccgcatggacatcttgacgtactcgagctcctcctcgatgacgcaggtgtcgatcacgaagaggaataccgggggcggcggcgcgggcgggccgccctggtggaggggcacgccggcggccggggcggcgccggcgaggaggtactcgacggtggagcactgcgggaagagctcggcggggacgttggactcggagatggcggcgtagtggggcgggaagtggttgcgggagaagcagagcgggcagatccagatcttggcagcgaagtcgacgcgggcgaaggggttgaggagggccgagcaggggggcttgcagcggagcggcgggtaagggagcggcggcgaggcgagcgactcgggcgagcggaccggggagatcgcggcggcgagcggcacgacgcagcggctcgcctccaccttggagcgcggccaggcgttccaggtgaggcggacggcgtcggggccgtccgggtccggggcggccgccgcggccgcggagggatcggccgccatggagggtgggcgcggtggcgcggcgagcggcggtcggagaggtggtggggatggggagcgagcagatcggaggaggtgcgcgtggtgtctgtctctcgtcgcgctcgcgtcgcgtcgcggcttttgccttgttggaggcttggctcgtttcgtttcgtttcgtttttatttttcttttcgagtgtgcgttcgactcggacggacgtggtggcgagcccgccaagctggcgtgcgatggttggatgcgtttcgtggcgacttgccgacttggcgaggtctctccgagacggatgatgtgttcggtttccgtatcagattgcggctcctacacgatgtgatttcggtaaaaacttatacgtgattttatttaacaaaaatgttttatttatttaaaattgtaactttataatatttaatgggtattgctatatttcaaacgcatgaagatctgtgacattttagtgacttcaaaattacacatttttcggactaaaattgcaacactatggaatatgagattttgcttttttttaatatggttttactttatttttgtctgattttgaataatttttacatgtaattttgcgactctttaagtttaaatttatttcacgtggttcggtatttttttttggcaaatttttgctacagtacatacaccgtaagaagttatttttgggggaagacgctctcaaaatattgttatttgctaatggacaccgcatacaataaaaatattaatttctggttcaatgggagagataaatagtgtaaaaaggtaaaaaaaaaatgcccctgggcccacttgtcatattcttcccccacaactaactttctctcacactctggccatagcaccacctctagttgctaccggcgaccaccccgaacctccctccttgcctcctctacctccaccggctacgacatcctctccccacacacggccacgagcgacgagctcggcgttgggcaaaacggccccgacgcggagtcatcgagctcgtctccggcaagcgtcgagcagagctacggtcgggcggggcaacctcaagcagcaacagcgacgacgtcttatcccctcccatggccacgagatcggcggtagccaccggatcttgccaggcgtggggcggtgggggcaggttgtccacctacccggcggcagcgcggagcgggagttgcagccgcggtcgagcaatcgagctctttggcggcggtcaagaaggcctcctccaccgctcagatttggcggcttcattcatgttttcctcctcctcgtcacctcttccgatccggtggccttggtaaaggatgtgctcagggcgacgtcctcaatggcgatgaccccgacgacgaagcagctgcgtgtggcgtcgtcttcttgctcattcgctccgtcaccaagagtcaccgccttcgagcagcaccggcccagagttgccttcgagcggaggtggaaagagagaacgacgccagcagtgggagggtggggaggaagagcagcgctaaatggggggtaggaggaaggcaaggagggaggtccggggtggtcgcttgcggtgaccggaggtggtgctatggccaaagtgtgagagggagttagttgtgtgggtacaatatgacaagtaggcccaagggcatttttgaccttttacactgtttatctctcctattgaaccagaaattaatattttattgtctgcggtgtccattagcaaataaccatattttgatagtgtcttccccaaaagtgacttcgtgcggtgtctcacagctaaaaccacgaagtcgcgatgtcctatagcaaaatttgtctttttaaaaaaaaaacttggcatactctctcgccttacaatatatcaataatatattattttatccagccaaaaaaataatatattattttatgaaaatactttaagacaaagtttttaaagtttgataatagtcttatccaaaacaacaagtattattaacgtgaagaaaatagatttaaccttctatctaataaagagagaggagtgatgagaaaagtgactgaaattttcgaaaattttagtcacctgaaacgtaaacactcccatatttatttcattctaaaagtaaacatacgcatgctaaatcatcattctcaaatcattttcataatatttcaatccaaatcatttcatcatttctccagtatctacatatatctcgcagcaaagcgcggacgtcatctagtaattatcgttaccaataactattggactattctgcacaaagaaccataggagcctggacaatactcctactaattctaatattgcatctaatatgaagggagaataacgtccctgaaattcgctttgagataatatgatccttagcatttcattatgtataaacttgtccccaaagtttgtcttgtggtctaatatggtccttggactcactaacaacatgtggtgtcatggacttgtgctggggcggacatctagggtgggttgtggtctgttaggctcaacgtgctacatcaagcagctactataaaggagtcagacactacttgtgacataatttggctagttcttgatgaaagtgacttgttgaggaaggccatagccattgtagtgtctctccaccatagaccgcagtgtaaagattcatgggttgtaaagatctttgatatgggttttttttatagcccttcagttgaagaacaaaaaatgaagaaataagtcatattagaacaggtgaagagatagatggccaatggagttttgactagcaatgcccttcaagcttgtatagtttttcgcgttgagcttggttatcatgcttccatgtatggcttggccgggcagtttaggatagttggttgtgagtccttgtagctatgattttcagtcggttttccttaattaatatctcatcacattgctgcgggaaattaagttgcataatatgtataaatcaaatacaatatgattattaaaactaaaacaaattgatacttatgaattttaagtccaaaaataattgatattgcatgttttatgagagaagaaaaaagagatgatttgaaccaaagatctatcacccaaaaactataaataattggggtgatgtggcttagtgagaaaagagagaaataacattaactaattcttagtggggatgaacatataggattctgcatcatttctccttgaagcacaatattatatattatataaaaaaataagcttgcaatggtcggctgtcattaaaaaaaatcagatcagaactatttttttaaagtatttatcataagtggaacatgtttatgtttgataattaatttttagaaattcatgtagtttgacaacatgtaggttattatgaaagtattttttttatggtgaatctaattgatattacatagttcataaaattaatagttaaaatataacaatgtgtgtttagtataagtaattttgagacgtaggggctacaatcatcgaagaaacctaatccaacaatagtgattacatctccatctgaataggctcaaagaaacagctgaccgagttgatctgaaaaggaaagagactggcgtacgtacatgctagtcactggaagagaagatcgaggtaatagaggtagtgcaaccacgtataatatataatagaaacctaaaaactaatatagcatttaaaaagaggcgtatgatatatttatccatatcatcatgagtgtaacttttactcccatatttaaccataagtaaaagttttacttctactctgaatcatatgtattttcgctacatatttggtttgtactataagtttggtttgtgaccaatgttggccttaccaaaatttggcatgctaatttttggtaacgccaacatgtgtttagattgaagccaaattaaactaatttggctattgaaatggcctatgttatataggtatgctaaaatttggtttcaatccaaacatacacaattattgttgaggttgccaaaaaattggcaagcctaatttaggcctcaaaccaaactgcccataattttttctgggaagagataacagtggtgagtggaagccaactgatgggagcggtagctgaccaaagtaggtttcaccattttggaataaaatttttaaatgctccaaaaattgatgcaaaatgttatatcgaagcacatattttggtttttactcttatgttctaaaatttaagcatatgtactccctccattctaaaatatagtattttttgggtggatgagacatatcctaacactatgaatatggatagaaatatattccatccaacaaaaaattgttatattttgggacgaaagtagtatttctatatagaaatgttagtaatatttgttagtaagtgttggcagtgtgtatacctgaaagtttatgtgttcacccctcatcctaacttaaaaaatgcatatctgaacatagcacagagccaagagcccatttgaacaatcaagctagactcacaaaaacaggaaaacatagttttgcgaaccacaattgagagaaacttttttgtcattatactctccacgttataataaacgaatacgaaaactaccaacagtttctagtattaataacttataaatcatacctccagcatatgtaacgaatacgaaaactaccaacagtttctagtattaataacttataaatcatacctccagcatatatttaattccaagataccaatggaaacctatattatttgagatttactccggttcaaaaaaaaatatatattgagataccggtatctcattataccaaatcatttccgatcgttgaatctaacaatgcacattatacgtagctagatccaacaatcagaaataattttataccgtgaggtgaggtatcgatatctcgagatattttttattaaccggagcaaatctcatattatgttatattatgttatgtgtcttgtctacttcaagacctgcgcgaagagctccttgataacggaagggcaagtggtggtgagcagacggaagtcatcgtccagcctcgtcacctgcctcagcttcctcttgcacgagaggaagtccaggcacgccgccttgagcacgcggcatccgtgcttctccgcgaacaccagcgtcgacgccaccgtgaggacgctcaggctcctgcacagcgcgtcctcgcacatcagctgcagcctctccatcccgtacctcgccgccgccgcgtgcagccgcctcgccgcctcggccgccgccgcctcgtcctccttctccttcgtgtcgcgggcgcggggctggggcggcggcggcagcgcgtcggtgtagatgaagtggagcagcgccctgaacgtctcggcgtccatgtcgtcgtcgacgcgcagcgtcatcattgtgttcttggtggcgtcggcgtcggtgtaggccgcgtcgtcggagtcggatgacgagagctcggccgccatgaccggcgatctcgccgcgagcatccaccggtgcgccgtgaacgtcttcccctggacctcgatgaagacgtcgccgctggattggttcttccagaggagatcggcgaggtggcggtgcaggttgggcggtggcaccttgatcccctccttgatctgaacccctctgcggccgtcgccgtcgccggcgctgttgacgaatccgagttcgcagcggacgaggaagccgtcgtccttgagaaaccccgacgtctcgagctccgccctcttgatgttcatcccgaagtcgttcccggagaagtcgacggcgggcatgccctggacgaacgacggcggcgccggcctcccgtcgcggtccacgaggctgaacctggcgtcggcgatgaccggcttggcgtcgccgccgccgcggcggtaggcgcccgcgatgccgacgtagacggagacgacgccgacatcgcgggggccgtggccgttggggtagaaccggatgaaccagcggtggccgccgacggtgaagttcatggcctcgatgaaccttcccctgcggaggttcttggtgcgggagtagccgtcgatcctgacgaggtgggacaccgtcgccggcgcggcggttatggagtacatggccggagggtggctgggggggaagaggaggtcgacgagcgacactagcaagtccatgatgatggaggaggaggaggcggctacggcgacgcagctcgcgggatcgcgcgagatggatcggctcaggcggtgggcgatcgaactcgcgaggagacggggaggggagatcgagtagggtacgggagggtaagggtagttatcgatgtggggtttatatttgaagttctgaacgccctacgttctcggctgaaacagagtaatgataatttgtgttctttacggaactgagtaaactgtagtgttataaacatctcttctctacttctgcacaaaatttttggtacgacatcctattcctattccgatagaatatcagtgtacgagtacgtggtttttatttctatatctgtacttaaaaaattacggaaggcttcggtggatttttctttatgaaactctggtccggccagcatcacctgagcacgctgccaactcgcgcttgcgaaccaatcctcacggatgctcccaatgcccatctgttcctccgtggttgctgccaagatttgcctccacttttgcctaggccgtcgccgacacaggacaagcttcggcatggctaccaccaggggcatcggttcctccacctcaacttcctctgcttaagtcatcttcaccaagatcctcacgctgacctctcctaccatgttgccgccacctagcactagcgcctgtctaccccgccaccccgacaccttctccaccgccggcgcactgagggactcatcctactaggaccttgctcttccccaacctctacgcaggccgagagtcgccgttaggccgctggtgctgccctgcagccatccccaagccttgccgatgggaccctgccccttgcacgccgccccaactcctcttctacatcatccgcatctttggtgtcctcccccgacctctgtgctcaggacgccaccatccaacctccgctgcctaaggggaaggggcgtcctcctgtatccgtagtccctcgatagcttcgccgctctacgcgggtcaccaccagctgcttccttcccctgagcgtgtcgttgtcgcctgctcaaggttgggtgagggacacccatttatccggcctggtctgatctgtaacctctgctcctcttagctcccacgcttatctcttcttgtgttctttaaactgaagagagaacatagaataatctttctgcagacatctggaatttagatctttactgcacgcaaatagaatatgaaccattttagtgctctttatctccccttgcatggtgtccgcgcggtacgacaccaacgttgttcgtgtgtgaacctctcggatcatacgggatggcagaagctaccgacttctcgaagtatgtttgttgcaagcccggtcactctatttggcagtattataccggcatgtcagtgtggtatcatcacaaggttcaaaactaaagacattattacactggtttattttcaaattatcacaggctccaaacctgatatgaagctaaacttgtgaagctggaaaaaggtactccctccgtcccaaaatatagcaacctagtactggatgggacatatcctagtataacgaatgtggacatactaggttgctatattttaggacagagagtatgtattttatagggcagatccacccactccggctccaggctccagctcctcggacaagatagcggttggagccatgtcaaacatgcccataatatataaaaaataacttccagctgctccttgtctacagacaagaaaagaaatggtagaggcacggatatagactgtatagtgaatatgcttattttaaaaaataaaaataaagagcaacacttatgttagtacaatgcagcactgaatagtactacattactaaaactatatactgcaggtaagcaaatcacattgcatctaacttttcttgcaaaaagtaaactgtgtacatttctgatattgttccaggagatccactgggcaattagtatctcaattgtccgcagattcttctatggttcgtcgactaaattttctgtttgacttctaccataattccatagatcatgaagttcacctctaaaccaaccaagtataacaataagccctggaacgagaaatacatgggagtcgtcacttgcaatgacttaagagtcatatggaaagaaaagaataaaaacaatccatgattgtgtgctaaaggaacgatgcatatacttacctaatgtacatggaacaaggtacagcagcgcaggttgaccatgcccgtccatcaggaagagcgcaagataggtaaggaaaaggcctacatgaaaaaaaaaatgtaatcccattacgacatatccaaggtctccacaaacatgtgttcatgccataacacaatgacatgcatgtacacatgaatccattttgcaaaaaaaaaaaaaatcaaaatcaaaataaaaaacattcaaaataaacaagttagccattgtcaatttcattctaaaaagaaggggaagaaaacaaagataattcctgcaatggaacagtaacattctccctcgttgattggtactccctccatccacaaaagttagacatacttcacatttgagtttttccaaataagttgttcttatttgtagtctttatgcattcaagacttaaatgaagagataaattaaatgtttgattagaaccaaaggagtcatctagatgttagaacttcaatggttactctcattgagaagaggatggcactcagagtggggcaattttctggttttcttcattcacaaactcaaaagccatacctacccgagggaggttggatacatatatatagccatagctggctgctagcctattgctgcaccctcctagtctaaaattcaaaatttgaatgggatgctgtcctagagggcatccaaactgaataaagcataaaggaggcataaaggagatgctaactgctgctgtcctactaaccgcagctatcctagcaactgaaaaatatgctaaaggggtagatgctgtcctgaaaaggtgaaactacccaaaagcaaaaagaagaatcacgaccaaggaccacaaagacttatccaacactaaatactcattggttgtatgcttacattcaatccttgattttgtaatatccaagatgatttaatttcttcttggtcttgatgataaaagtaataggtgtaacttttgtggatggagggagtatagttttacagctggaaacgatgctaccagtaacatatggcttcaactagtcctaagatggtgtgaaaaccatgaccattaattaatactttctatgtttgttcagacttatgtagttcatagtcaagtaactattaggcaaactgcacaaggaaaaaaaattcaatgtcacagtacacacgatatagagcatagaacataggtaaaatataaaagtgtaaaaaaaaaagaatgaacagcttaccaacagcatatcccaccgtcagccatagaaaatacccattgaagaggccccttttgcttgctctatcaaatctacacggtatcaaattgatgtatgggggtaaacatgattgaatatatataattgaaatagtcataagtaaacacaacagatatggaaagggctaattaaacctcacagagaaataatgaaaccatcaaacaaacgccggcatatataataagatgcctggccccaattttctatgttaacaagagtgaaatccattatgcaaggatgaaaataaaaacaggtaaaatcaattacaacatgaatcgattaccacataaaaacaggtatttctaacttcggaatcctaaacagttaattatattctgcttgacaagtcaaattatagcatgatgaattgattacaacagaacatactttatttccaacataccaaataaaggactaaattagccaacagtacgaaaccattgggagaggtttttatgccttaaagttgagtttcaacattaacaaaaaaaaaatggtgatataaggtgtatttgttgtcctaccaacaagaataccaccaatgtgttggcgaaatcaaaattttggtaaggttgtataggtaatgtataactctgataatccaaatagactctgattccattggcaagaccagtggtactattggcattaccaatatttttggtaaggcaaattttggaatcaaccactggctcattgcctttatgttccttgatgacagaacagtgtaaaatcaaaggtcattaattcaaacagaaacatggtgtttgatcctcttttccaccacgtaacatcttggtaccatggtacactaacttaattagcaatcaaacaaatcatgaaacgtgataggaactttcaggagccaattagcatattgctttcatatggtgattggtgaattccattttctgctaacattctcagtatcatttgattttaaataaaactacaccctacggtaagtgttcctaaagttttcagatggtttacaacttcactgttttgatttgggattatgttttcctcatcaacagtatatttaccaacctaccgacactttagcgtccagtgaaaccaaggcatcaaaagagaagttacaacttatattgcagcaatatatatagtataatacctgtagctgaatgcaactagcaatccagggaaaataatgtcaccaaagcctatcatgtcatagccaccccatggatcaaagaaacgaggtattcttaagagcatcggaattgcttccccagagttatcaccacgagcaacctgtgcagtatggatagaatcatatctaacactataacacttcataatagataaaaggtatatcttacaggacagatctaactgaagatacacatatcaaacttatatgaattgtcttatcaccaaattttctaacctccaagtgaatgctttcgaattagattgaaacatagaacaaactaacaaaatagtacgctattactattagtaagcatgtgctactatctggttttgaaaataacatggaaactagtagattcatgagccacgtatgcagcatattatggtactattatcaccactggataaatccacagtactaaacagtaagtaataaaaagattgttgcaaaaaaataaaaatcatgcacttactgcaatcatgacactttcatggaatataagaggtgaaatgaacacccagaaaacatcatacacaaatgcagcactaagaagagctgatgcaacctgcaaagttatagtcatgatgaataattctgatacacatatgaaacatataggttttgcacgactacattaaacttaaagacatggcaataccctgatatttggtaagcgtgccatttgaagcacagttatcatcaggcagattccctgaggacaataaacaaaccccatggttaataatatctaattgattttgcaaaggctctgctcacatgtctcaaaacacagaaggcaagaaatttaacatctcacgtatgaattattacaaatgtgcaactaaaacatagatttgttataagactattccacacttcaaaataaaatcatctcaaaaataaaaataaaatggaacaaccagacaacataaattttgacacatgcatgaaatgttgatacaatatccaacttggaaactgtggtatacaatatccagcttagaaactatggtatacaatatccagctatggtatcttatccaaaaccagtcagaatagtgtgaaacgagcatagtggtgtctacattttgcaaggaaccaaacaatcaggctaatatatattttttttttgtaaaagcaatgttaattattggatatttatgcaaaaaaaatcttcaaaccaaatatttttgaaaggaacaaaccacgttacagtgcgcaaattttacaaggagacatgttagctgacccactggaaatatacaacttggatccagattgatttcagaagtaacactatgttagcctttacagtatattgtaatatacttatattatgtgaatccagacttgcttgctggtacctctgaaggcatgtacagttagttgcatacttttgaatggtactgaagcaaaatatagaaaaaaaaatgcacctcctagtgagaagcacaccatacaaggtcatatataaaatatagaaagaccacacaagaatgaagataaattagtcttacaaggatgtcttggcctatccaagcaaaagaagcatgccgatagacagcccaaagaattgcaaagatagtgcaaaatggtacaatcagaacagaaagggtcaacacctccccaaaaaaggggagttgtacagtcttctgtccacaatccttgcaaatcctgttaggtgaagtacatcaaataagaaaagaaaggcaaataaagtgaacagcggtgaccaaattcctatatccaaattagttcatttgttacctagtgagaagtgtgaccaagcaaacatgcataccctgtaaaattcatagtcagtctcatagctgaatctctcaacaaaggaaaatgaaaaaaaaaaaaaaggtatacttcaacattcaatgaaaacaaaagggaaagaagtgttaagatggtaccaataagaaatagcacaatgcacataacaaatgtatgagaaaatacctcaataccaccaatgcagaataatacaattagcagccagacgaaccaagaagacatgaagtagaagaggaggaggaggaaaactgaagctactaaaataaaaacaatagcccccttggcactgatctcgaagatttctttatcttctctgttggttgttccagaattaggcccatcctgtttagcacgaaaaggaacaaatctgtcagtaaaacataatccagtgacgaactacaaaaatatgatataacagaacctagatatgttctaagcagcaaggacgttcttggcaaggcaacaagataagttgttgtattttgaaatgctgaaaggcaggttacataaaaacaacatccaatgattgaaaagaatatacttggaagacatgtgattttattttttaaaagaatacatgaaaaccaaaattgaacacaaggcatattgtaacatgattccattaaatagtgaactcacagcaaaattttccgaagacatcatagagttgaaattggtctttatatgcttcaattatatattgcatgttttatcaataacttatctattttctatatgtgatgcattgtttagtggcactgcagtctgcatcacatattttgccacttgtgcaaagtattcaagccatttcacttaaggacttaaggtggtaaaaaaaactattcacatcgtaagaataaaaattgtagagtggtaccaagagaaaatgggtatgaatgtgctaccatatgtgtgtgaaaatataaaattaaaatgacataatttggatagaaaggtaaagcacaaaagtcaaaaccttccgtgtcaactgattataacgctcatcaacttgctcgcatgcaacaaattcagtccagagtgaagcacaaactatggttcctatagccattatccacaagaagcatgctgaaaggtctacaactggtcgatttggtgaatatagctgcacctccactgcagcaaaagaacattcttgttagcatgcatactttgtattaccataaactactaattcaaaagtacaatttcacttcaactagtcaacatttatgcaatcacagcacccaacacaaagatttccaatttatacagggagtcaactgagcgactttgcttgtgtgagcgtgcatgcatgtgtccacacaggtccaggtgggaagcttgcccattttgttatctcaaaaggtagcgtgcaggatttctggagagcaaataaggcaccaggacttctagagaggaagctgcaccgtcaccagcttggagatctagcatagccatgagtttctccaccaccagctctgcctgccagtccaccatattgttggaatgctgattattctgcttcaagcaggtcgctctatttcaagccagctgctgctttgcttcaagatccctccacattgctccttccgtgtttgctactcgcctacctagatactaggtgtcaacctttactagcaataaattagactgcagaaattgttcactccattggtatggataaaggttttaaaacccagaaccaaatgcaaaacaggatgcacacagttttagttatcagtgaaaagctgtcatatcagcaatttgtctttctttttcatatgatctttgtttagaaaatgttggttttgacatatttgaagtttgggatataagttagatgacattaaaagtagaacttcaaagaaagatccagggtcaggattcacgaacctgatgagcgaatatctctagactcctttaaaagtactccaatggtgatggcagtgaatatgctaccccacctactcccattgtagtttttacataatacaccttgaacttcttaatattatatgacaactaaatctaaatggatacccaaaattaaggtgagtatcccaaaagcaaaagggtgggcaacatatttaataaaaaatatgtttttatttattttaggcaatattatgattttttttccttttatacatagtaaagcacaggcatttaactagtatgccaaaattcttccatttataatctgcaaaatggtcccagcaaactctacttaaagccgatttcttcctttccttttttttttccaatacacctgaagatcagctcatctgcaggcactaactcgctcaagagagcacgggacggcatgctcgagagattaaaacttcaacagtcaacacagataattgccttgtacagttgataacttagtacaatattggaatattaagcgctcagtactctaattgatgtattgccaagaggattttcttacaatatggtttattgcatcatgtttctttgccatactggataaatataaaaatataagttagaatgaattcaaaccaacattaattctgtttttagtcagacaacatatacctgatgaaaaatgcaattggccatcacagtagatggaaccatggaagtaaaaggcttgagatgtttaagtaactaaaccctaccaattggcaacataagcaggaaaaaagaaatatgaatgaagcttagcattactgaggataattaagaatgtgtaactaactgacttacgccttgctccctgatccaagaggcccttcatcttttttccagctgactgtggtatcattacaacaggtattgtaacattaatggaagtatcgttgtcactgcaaaccatcttgtaaagttctgaaagaatgaagtttaacagataaatacgactatattaacaggatatatataataatatatttcatattaaccttttcataccttcattatcattgataactagtaaaccaactgcacctccagtctgtgcaatctttgctttagcagtgaaagcgcattctccacgttgtgctatagcaatataatttgttagctgcaaaagcgagaattagtttagaaaatatttacagcagtcattcaaagaaccaaacttgctaataagtttattatagttgatgttaaaatcaaacctttgatgtcgaattggaacaacaatcaagtggatttgcaaggacagcaaatgttttctgagcttcatgaatatctcgaggcacggaggctccaaatcttgcactcaacccaacaacaattgtaccttcagttccatttacccaattcttcaccttaacctggataaaatctcaaggatgagaacccttgtggaaaaacttaaggacccctttgaatcacaggaatggaaaaacagaggaatagaaaaaacacatgaatgaccgtttgattgaaccacaagaaaaacgtaggaatcagatgagagagttagactcaaaggattttttttccaagaggttggacctcttgctaactttcctccaaaatctctataggactacccattccataaaaaatttaaaggataggataggattcaatcctttacttcaaaggctttcataggatttttttttcccataggattggagtcctctaaaattcctacattttccgttcaaataaaaggggccctaaaagtataggtaattttctttgtaacttttattgcgcaccaacagggtacatgcaagtatatgagtctcatgcaaaatgactaccatagacatcactagaaggaaaaagattgtttaactccctcaacattgttggttgtctgtctacttaaacccccaaaacaatgagatggcctaaatggcacccttgaactatccaagcctatcaaaattccattactagaaagagattggcatgtgcacttggtagccttatatgacagaacggcatcaacagtaaataagaactatattgttagtttttaaattcaatattttacttgggtctttgtttgcaaacaccaggaatagaactgagagcttgacccatggtgaaatttcacaagtacgctgtggaacatttaaatgaaaagggtgaaaggttaaagggtaagccctacacagttcaatccaccgggacaagataactactatggtgacaaaaattgttcaagaaaatatcttgttttatcttcttggttcatggttcacgactagtcatgtgaagatgtctatatgcagcagttgcccctgcttctgtgtaccacatgtagtcactgtgttgcctccagacaatgccactgcattactctgtaccaatgccacctgaagtgagaagtgaccatgcaactgaaaaatacattttagttgggataatcgatcatatgccactgttcagagattgcactctaggatttgccattctctggaggccaattgttttcttaccacttcttagttggtttaacacattgccacttttcaccgaaaatccgaaatacatcattttgcccccttttctttgctaagctaagcaccaggtggtgcatccgttatcctcttgcagtcttgctagacacaatgcatcatatgcttgtccggctcaaaccatcaagcagctgagcccatctcatctctctaatctacaaggcgattcagtggcagcaccatgtcaacgaagcaggaccgcctggaggaccagagcgaggacaagtacacaccactgcagcccagcccaacgcttgttatttctgtactgcctccttgtatccttcgccaccataaccgttgttgccatgggtcatgccactgtccgcctggtaacatgttctgttactatcttccttgcttcttgtaaaatctattcgtttttttctcatcatttgagaaagttgttcaatggttcctgcaggaggggaacgggttcagctgttcgatggttcaagccggaccaagtacatgatacgtcatggacagcaggcgcaaaacaggtacatcgtttggtgcttttccaaaaatataaaatgaaaaaaaagaaatagaccaattcggtctaaagtggctatttctagagataatcagctaagtcaaccaaaaagtggcaagaaatcaatgctatctctacagggcacatgatcaactatcatttttagttcaagctatcagaaatgaactaaatggaactccataatgaaacgaaatcacagtccaactggatccataattccagtacacaactaaagcgtgcagctcggaaattcctcctctccttacccagcatcacaatccatctgggaacaactcaaccaaattctcaaggtcctctgccattactaaccagcactcacggaggcagcagatccacaaatccccccctccacaaccaaagagagatccccatcccttccccactaggtcacccccataagccaaccagcaggctaagcaccctaccaccaccaaccaccaaaccctgaccaaaatcaggaagagaaaaacgggaacggattgggggcggcggggggggggggtgtggggcgcgcgttaccagctggaacttgttggagcagccgggcgacggcgggacgcccgcgtcgtcgtcgctggaggcgtcgtcggccgcggagccgccggcgaggaggacgagcaggaggacggcggcggcggcggggaggcggcgggcgtggtgggtcgccatagggcgtcgccgcgtcgcgccgctcgcctttccgtggctcggacggcagtggcagagaggaatgaggagaacaccgacgcggtgggcccgggctggcagtggaacatggatgggggatgggatggggcggcgcccgggagagagtgatgtttcgtcaatccaatattcgtaaagatcggtttattagcgaaagaaaaatataatgtgtgcttatattggttttaaaataaaaatactgtacattaaactagtatgaaaaaaaataaaaattcgaatttgaaattaaaattttggtttataacataagcaaaaggttgtatgctttataactggtacccactaactgatgagggagttaggtcccgatcttccgataggtattgataaacagttaatttgggcggagttgcgatacaactcgatccggcttctgaacgaacacgctactgagccccgcaatcgcagcaccacgtctcctctggttatcaaccgtgccgaaacccggttgacctcgccgagaaggctaatccctgcatgcgaatcgaagaacacaagaaagaacaagatagattgcaaccaaattacatatgaatgattaagcactcggatttggggtttcacaaatcgatctagcggcgaaactgttcttgataaaataatttaagcaaaacccgactctaaacgatgacggctaatgaataaatatgattaaggacgtcctagggttgccctagggcgcacacccccttgggctaagcccacgacacagttacaaggcccaaaacgcaaatcagattcggactggatgagatacgtggcttgttttgcagtttcccggcagcttggtaggaattttgatgtgggaccaaatccatctgaaagtagactccataagctttccaacaagtactcatgggccccgaaattccttctagaacagcggctagatctatttgaagttgatgctgtcaggagacccgaatctaaattcaaaacgtgtataactttatctcttgtcttctatggaccaaaagtgacgtggtgagatgaaataagacttgaagaaggtcttggtttggttcccaatcaacttcttcaatcatctatgcattccttacgctcggtctcttttctttcgcccaagcaagtacctctgcaaacaaaaacacatgaaactcattgtgtagcaatgtttgttcaaatatataacaagtaaatctaatgtagaacatatgcacctttggttgattaatacataaggtagtcatggttatatccgagctagttgtgtcctcatcactaatgatgattaagcttagtatgtatattaaaacagctttgaaaggagacaccatattcgctgtggggactagaaattcccacattaatcgaagaaaaatagaaaaatctgaaccgttaaatcatgatgagcctgtattataacggtcgagattgattagatatctatagtaaaggaaactatctagagaaattaatcctactagactaggtaaaaaacaattgctactctacacaacaaaacaaaaatcatgttggaattatgtccaaccacccaatcagacaaggtctcactactactccatgtatttctttctatagcatacgttttccttaataatatatataatacacgtatacggacaccatggatacaatagtaacacaaggcctcatatgcatacacgtttatggataaatatatatatggtggactgagaatatatattattaatttagttgattgatgattgataaaagggcatcaaagttggaacgtacatgcggcctgttactgcctaccctagacagcaacaaaataattccgaaaataaaataaattttgaaaaacaaataaaataaatttagaaaaacagaaaaataattataggagttcaagtaagaaaataatttataaatagaaaatatcataatgaaaaattaagtaacatgcctgtaaaggagtagagtggtgatggttgatacgacgtataaaaactgttaataaaacaccaaatagaatcctaatgactattaaaaagagggaagacaggcaggccatgaagcaaacaggcaaggcggttgccgagacttctagaaagtaaaaaaaacatcgataataatattcgatttttaaaatctcaatgacaataaaaaggagaagcagcaggcggggtgtatagaagtatagttgcagagctgccgacggttggcgggacgtctagaaaataaaaaattgaattccaacaatagttatgttcgatttttagaatcccaatgacaataaagagtaggtggcagatgggccgtagaggagtatagtggtattgtttgacgggacttctaaaaattataaaaaaagaaacccaacaagacaataaactctaaaaactaaaaggtccaatttttaaaggttcgaaacttctaaaaagtaaaaaaaaaaaccgatgataatcatatttgattttaaaatcttaatgacaataaagaagggaggcagcgggcatgccataaaggagtacaatggtaaagccgctgacggtttggcgggacttctagaaagtaaaaaagaacccgaacgataattatgttcgatttttaaaatcccaatgacaataaagagaaacgacagtggacgggccgtagagaagtataatggcagcgtttgacataacttctagaaattataaaaacaaaacccaacgagacaataaactctaaaactataagatctaatttttaaaggttctaaggagaatgaataatagtagtagatcgagcaaagcaaataaagaaggatatgacagaagtaagatatgacataagtaaggggtagtaactgatgtgacttttaaaaactatttaattagaaatatgaggatgataagatttggcctttcaaagtcttaggacaacaatatatctatttaataaattttaagtaaaattatactgaaaaatatatgattttgtttgggtgctagctgcgcaattacgcgggccacccaactagttgattataactaaagctacttttcccttgtaccacgctatcttaatttgcggaggacgcgcgttaatcttaattcaatcatagagaaatgcccaggggttttccggctagctccataaggtggtgggctagacgacctaggttcgaaatctcgccccttctaattatttgatattaggtcctttcctaatattcacttttttttatcttaattcaatcatatatattttaaacaagtcctggtaagtaacgggctagtttgattttgataatttattgttgagcaagttattaccacaaatcactcaattatagtgataaatttaaaattataagaaataatctttaagaaaaaagtttttcaaagtgtggaattatctattttaataatccgatgaataagttgaaaagataggcccagctttgtataagtttcaagcttacttatacaacctcatgatagatggatgacgcaacctctctcaaaactactgtttttcaccgtatcttctatagcaaccgatggtatttaccgtagtatcttatatagctatggatgcgatgggtaagaagcaaagagtccgaaaaaccataatggcaaataacgtgggttgccatgaattactatgtaatctctatattttattttatattataagatattttgactttttcttgatcatatttataggaatacgtagcaatatctataacacaaactagtttcattatatctaaccgagtatattatactatatattttttttaaaatattgctatgttttctataaatttgattaaaattaaataaatttcacttaaaaataaatcaaaacgtctcattattataatatgaaatgaaatggaggggtagcatgtgttggttagttgttagataaacatgcttttctcagctaaacaggcttatattaccaccaactttgtagacaaggtgttatattcatccctggcacatttggaagcagatggtgtcatatttttttttacgaaacccaacatggtgtatttgtgttaagtagggggaaaactgtacaatagcctcaggctaggaggttacaaaaggagcaataaattgaaaggcgagaggagggggggggggggttgggggtacatgtcaagatggtgtcatgtttgaagaccatacagccacgatgactactttagacatctttttaaggtggatctccaaccactcctgtgtatagctgtgttcggatgccccctttcccaacccctcctattcgttttccgtgcgcacgcttttcaaaccgttaaacggtatattttttaaaaaagtttctatacgaaagttgcttaaaaaaatcaaattaatccatttttgaaattttttagcaaatacttaattaatcacgtgctaatggatcgctccgttttccgtgcacggtgtttgggttagagattgcctcctgcgaacacagcctaaaagacttaagagacatcaactcaagtgttgactttccttgtaatctaagggcccctttgaattgcagggttgaaaaaacggaggaataggaaaaatacaggattctgataggaattgaagtgtaaaacagataattgaaaaacacaagaatgatcgtttgattagtccacaggaaaaacacatgaatcgtgaaagagtcagtgagcaactggtggctatggcctaattgcatcatgcaaaagagctgcatgactagctgataaggaagtcagaaaaatgatggaaaatgatggattttaacgcaaagcaatcactcgatccatgggtagcgtacatggagtcgggcagttgcccgcgctggctgggcggtataactgccactgtacggaacggaagagtggatggtacgtgaaggatgaaggcgaaacttagcggctatgttaccggtaagaatactctcatagaagatgctggaagaccattccaaccgctcttacatgcactagtgatttatggagccatctgattgtactgtctgactaacgtttccaattcttcaaggatataattttgcaaaattacaattaatgtaattttgcatgaatatactgtggcgataaaacccagcctgattctgtagcaacacgtattatatttttactgaaacagtaactgtgacaaacactttatcgagtagcaggggaaaacattttctcgcatatccctattttattcatgaccttgggtcccaacaggtgccattgtttttgggagtaatttccttgacaccaaggaaaaaaatatctggtgagtacagcattaccggcgccatttccttgtggtcattactcattacccgttccagagaacaaactgaaaaaggaatacttacaagatttcaggattattatgattccggcctttccgtgaaaaataacagctgcatactttggacatgtcaatatggacagaattaagcacatttaacttgaaaatcttaacaaaaaaatcatagctatacttgtttcgtcttacatttttttgcattttttttcatatacaagtgtgacatgtctttggacttattatccaccattttggtctgtatagtagcatagggacaaccatataggttaggaaccacactatagtatataaaattaacatccaacaaaatgaaatacaatcacttaggagttaataggaggtagaggactcatatatttttaactactgctagaaaaatcgtcttgattctccaggaacagataaagggaaagcgaccacagaaaacatgcagcttaatcttgtacaacttgtgtaagcccatttgattcttcatgaacagatcaaggaaaactgataacataaaccataaccttaatcttatgcaacttgtataagcccaaaaaataattattttttcctacgtccatattctaaatccatgcaaagaaatgaaatcacctgaatctcagatcctccaataagatggcaaaatatatttcttaacagaataatgatcagtaaagaaagagaaaaaagctaaccttgagttgagatgtccaattggtatactgagtttagcccccagaaacacttcgaaattaccctatggcaaaaatcatcagtttctactttctaatgtcctccattcgcataccacccccgaactggaatgccaagaatataaaggaatcaactaagccatttgagatctggataaatgcactagtcaccattgcactcctctttcatgttgggtctcaccatgatccagccttaggtttccctccatggcacagctcattgccgcgttgagaataacatattttaattcaaagagcacaacacctgctgctgtgcagattttcaatggtggcggagtcctggagcacatggcttccaaagtcgtaaaactaaaatgatccgactttcctgcacatgcacgttgcccatgaaagacaaaattttaataaatcagcatacaaaagcagtcatgcattcgaaatctaccatacagaaataattgatgactccttaagagcaataaacaaattcatgacctattaacaagtcaaggataatcatgcttataaatacagatacatgtagatgatccatgtaccataatacctgatagagaaaatcccttgtatacctccgaaattttagctaatcccttctatgcctctaaattttgcttactttcttgtataccctaaaatttgatttttgatccctaccatgtccctcctgtcagttaaccgtctaatttctataaaaatgttcattttaccatttggatgaacataaaagtttacgaattacattattaaaaatgtaaatgtttgccacatgagattactatagttatgagtttactgtgcgatacattatttatgacaatttatttttagataatgaaataaaaaatatttatttatttatttttaaaaaaaacataaaaaatgaggagcattcatacagagatatgactaccaatgctcacgatattgtttttatgaatactcccgatcaaaaaaaatccattatcctattaaaatttcaaacacaatttttaatttattacatttgttttattttcaaaattttttgctctaataatatagtctcattagtttcataaaattcacatactgtgcactcaaacaaaaactttaatcgtttttcaagcttatattcaaatctaaattaatcatcaagggcacaacagacatttgcaaccaaacataacaatgaaaagaaggaaaatgtaacagcaggggcatggaagagatcaagctaaaatttcaggggcatagaatggatcgggtaaatttcaggggtatgaaagggattaagtgagttttcatgggtacatagggaatttactctatctgatacatattgattatccatgtatcgtagaatttctccatcagaaatgttatttttgacaatttctcacttgatatctataaacaatacattgccttaatcttgttttgattcacacaatgaaaatgattgattgccatttatattagttcagtggccaatttaaagaatctagttgcagttacagttttaaatatgaaggatccttaaaaaaaagaagttaattctgcgattgaaccattcgtccaagcagtaatgggaaaggagcaggatagacaaaacttagacttatgaaataattctaaacaaagaaacagaatagatgatattacaggagtaaactttcaattggtattctggtaaataacatacttgggaaagcaggtgctgtcagacaacaaaaaacagctaccactgaatcagcaaagtagaatccaagaattatgtcacgccggaatatagaccactatattccgtttgtgagtgcattattccttgtcccagaggtaaggtacacataacaaattggtaaggttaaggcttctgcaaagacctacctcacatatatcacccagattgatgaataaccagaacagagcacatgcgcatgctgctaagaatgcaaataaaggattgggctgtgctaggggaggtgtcaaggtaccactgtccgcacaggtccaaactcctctaaaagctatgctaattcttgtgctggaaaattaatcggacattcatcattttatttacttttaaatccccactagctccacatcaataagcatatggtccctgggaacagtaccagccattctcataatgcgatgaatatcctgcagcagatcattgatcaagtcagattcactgtgggatttatcacgggaaacaaatacatgaaccttatttgccacctcgatccaactacaccctggctgtttctttagccctcgaacattcatctctgacctaatttctgctgcttctttccatttaccagctgaagcataaatgttacacaagagagtataagttccagcattatcaggttctgcttccaagagatgtttagccgctaaatcaccaatactttcatttccatgtgaattgcatccacctagaagggcactccaaacggtacttgatgtaggtttaatcttgaaccagctaattaatcttttagcatcctcaagccgtccagctcggctacaaagatcaaccaagcaagtgtaatgttcatcacgcactacaatggagttatcctttaccatggattcaaagatcttaagcccttcatccactaaaccggcgtggctacatgctgagagcaatcccacataggtagcatcattaggcttataaccattttcttgcatatttttgtacaaatgcattgcttctatgccaaacccatgatgtgcatatgctgcgattatcccattccatgagattaagtccttctccattgagaaatcaaacacatttcttgccagcctaatttcaccacacttggcatataagttcattagagtggattccacaaaagtatcaaactgagatggtgttttgcatatcatctgatgaacctgctgcccttcacagagtgcagcaaggttgctgcacgcatcaagagaacctagaaatgtcacttgatttggttggattccttgaacaagcatacagttaaataattttagtgccatttcactctgcatgcattgtaagtaaccattcatcatggtggtccaagtgatcacattccttttaggcatctcatcaaaaagttgccgtgcactcttcaagtctttgttctggataaagccagtgatcataatgttccaagaagcaacatccctaataggcatcttcgtgaacaaatcaagtgcttcctcaatcctgtggtttcgtgcatacccagagatcatggcattccaagaaacaacattcctctctggcatggcatcaaacagaacccaagcgtcgtcaacgcttccattccgtgcaaggccagaaatcattgtggtccatgacatgacatccctcactggcattctctcaaacatcttacgagccctctccaaactccctgaccgcacaagtccacacagaagaatgttccaagagccagcatccctcaccggcatgcgattgaaaagggcagacgcatcctcgacgcggccaactgcggtatacgcctccagcatcgtgttccaagagacgacgttcctctccgccatgccctcgaagagggcctcggcctcgtcaacgcggcgtgcgcgcgcgtagccggagagcagcgccgtccaggtgaccacgttccggcgcgcatcagggcggtcgaacagcacccgcgcctcctggagcatgccccggcgcgcgtacgcggcgaccatcgccgtccacgacaccacgtcccggtcgggcattccgtcgaacagcctgcgggcgtccgagactcgcccggccgcggccagctccgcgacgcgccagttcgagtcctgcacatggttgaccccagcggatgcggccggggcggcattgttgctgatgcaattgaccgtggcggcaaggcagagccgcggcgagcggagacggcgcagcgcgggcgcagccaaagctgccattagagaaccaggagattctgcaagtctgcaacctgagagctcctgattgagtcctgaatccttataccctgcgcggctgtgccctgcggtgctcgtcgccgctaggggcgcgcttagaatttttaggttgggtattcaaaatgggaagggataaaaaaaaaaaaaacaacacctccccgcgatggcgattggcggcgcggccgcggtgtttcagcggggcgaagttgggaccaggaggtggtctagggtgacttaattttggggccttcttggctactgggcctgcataatgaggagaggaggccaggctttcttattgggcttttctttcgattaataggcctcttttctatatttttcatattcatatgagacatatatctcatacaaatatatttttttttcaaaaatcttagatattcacctgaatacccttaaattgagctgcgcccgcagcaacgggcatgcccgcggggatgtgcgacaaggagtgcggaggctatgaaacacgagagcgagggcggcgcgtcgtcctttggagtgatttgggtggagttgtttggagcactggaaacctgggctgagaactagaggggctagtagttattagtaattatctactattaagcttgttcacgcttaagaaaattcttggatccgcggactgacggtgtgaggctgataaggtgaagatccctggcgctgtcatgtcgcagctcgagtggttgaaccacgcgcaggaggaggaaggcgtggcagtgttattttaccatgtcattttggctgacgtggtagtattgtcttaccatgtcatttgtactagtgtgacaagataaaactggcacgataaaaccgtgacatgaattactaatgacgtgacaatgttgttcgccacacatcaggcggagtgaaatagaaaaaaaatgtttagatctaaaaataaaaataagtattgagatgatcgatttttaaaattaaaagtttaaaaaagttagtgggtttgttggcttggatatgggccctgctgaagggtagtaggtagagttgggccttcaaatgagaaaccagaactgctagaggtgtttttgttagagtatattgttgaaaatttggtcataattcggtatattttaatccaaaatattatgacaataaatatggcatacacaatgagaaacgatctggtgatgagatgtttaaggtaaaataagtatagacatcgttgatattcacataggattgaaatcctatggataacattgtgaacatgtaaataataagaagaaaatcaaataaagttacaatcttatacccagagaacggtgcagaagatgttgaggaattcgtattgcctctgttgatgttgtctcctttgttctctccagtagaagctatggtgaagcagaagcagaggaagatgcaacgttgtcgtcgaagaaccggagcagtcgcgcttgaagtgctacccaaaaacttgatcgcccgcctacccgtacaggttctcaagcggacggaattccggaggcacctgctcatcccgtacacctgtgcgcgcaggtgaacagaaccagggaaggattctgcagcgcaagaacagaggaggaggaactcgaagcacaagagacgtcgggaagaacttctccatatccttctggtcgctgccgagtatatatatgtgatcgcgagagtaacattcggagtcatcaaccgcggtgtttaattttgtaaccgacgcgctcgttaatacggaatcaattcacggcgtttaattccgtaaccgacgcgctcattaatacgaaatcaattctccatgtttattacggtccgttacatcaaccgtggtgtttaattttgtaaccgatgcgctcgttaatacggaatcaattcacggcgtttaattatgtaaccgacgcgctcattaatacgaaatcaattctccgtgtttattacggtccgttacatcaaccgcggtgtttaattttgtaaccgacgcgctcgttaatatggaatcaattcacggcgtttaattccgtaaccgacgcactcattaatacgaaatcaattctccgtgtttattacggtccgttacaaaatgagagagagagagagagagagagcagctacctgcctcgcctcgccctgcctgctgtccgcgcaccatctcaatcgatcaacagagactctccactagctccgtatttaagttgaggcctcttcacatagatttccaaggtggtattattacccatagcatttaatgtgggccaatggaatttattaggatttaattgggcctagcccattaatctaacatatatgatagttagaaatgtattaggatacgattgatttgtgtgaactccttccttatctttgatctttctttatctctaccaaagtattattctatatataccggcccctgagccttaatacaacgtgtctaatattcagaatatctcctttcttgtactattcaacttggtattagagtgggcgatctagcgcctctctcacacttccactgccatcatccctaggagggttctgatctcctggggcggtgatccttttttttctctgccgttgtcgttgttgtcctagagagatcaatctccgagcattctaagcattctatgtcgttgtcttcgtgtcgttgaatcagtagcaacaacgccaactacctccacgccgccaccctcttcgacctccacccacaccggccagcccctttgtggacatcgccacgcagaaagtaaagaactgcaaaaacttacttcctctcctactcatgtggttggtgaagatcttaatacaagctagtatttgtgcatgattgcgtgagcgaggctaccatggctgatggtgtagcgcacgggttgggagggtgcgaacagagtgaaacttgccagaggacggctagcggcttggcgatgcccaagcttgactcagcggaggtgcttgggggacgtcaggttgggttagccaaagtggaacatgtcatagacaaccgatggcatggcaatgcccgcctgggttctcactggatatactgcatgggtgtgttcggggagagcagtggcggcgcatcagcgcccaccgtagggatggaaggcaacgcacaaagagaattttcctcccccgcgcaccaaaaaaataagccgaagcggaacatgtcataggacaaccgacaacatggcaatgcctacctggttctcactggatttgctgtgtgggtgtgttcggggagagaagcggcggcacaacgcccacggtaggatggaaggcaacgcacgaagagaattttcctcccgcgcgcaccaaaaaaatgtagatggatgttgtgggtagagcctctaggactgggactctatggagagggatttgaggtccttcctattttgaggtcttaaatgagatctctgctgaatctagatttttggcctcaacccttataaaattgtttgggggcttggtttagggttcatgctggaaatgctcttttatatatatatatatatatatatatatatatatatatatatatatatatccaacaagagctccaaccgatgttaaaatttaaaattaggatttgagagctggtgttctaccatactataaaatcttcatcagtcgggttttatcttcaactattacgccaccttctcaccaactctcagatgtatggtcaggggcggagctaaaacgaaatggagggtggtgccacttgattaatttactctactttaatcaagtttaagctgatgcgagtatctaagtttgtattgaaaaatatatatatatatgatgaaaataaataaaatatagctaaaatttttttaccctctaatatcctctacctccaccccctgtgtatggtcatctcgccaccgcgcgccgccctggccttgtccttgtcgatcgccgtcaggcttcgacgatatcacaacgacacaaccccatcgccttgtaacaatgcctgatgtgagcgtgccaacgtcgagtacgtccgtccatcgctcctgccatgtctttgtccatgcacagttgctaaagccgtcgcagccacgcatccctctcgtccacacccaccacccaagtgcccaagcggtggccgcatatatgcatgcattgcatagagtacgccgcggcgcggtggcacgcatgcacagcatatatcccccttgactctcgaatccaagtcctggggtgactccaatccaagttctggggcctcgcgttgttcggcgctgtgctaggctgctagcttctgaaaatatcatgaaaaataaaaagcaaacaaaggccattttcagttctcacgcaaaaacttttcatcatatcacatcgaattatttggacacatacatagagtattaaatatagaaaaaaaactaattacacagattacgtgtaaattacgagacgaatcttttaagtctaattgctccatgatttgacaatgtggtgttacagtaaatatttactaatgatggattaattaggtttaataaattcatctcgctgtttacagtcggaatatgcaatttttttggttattagactacgtttaatacttcaaatatgtgtctgtagtccgatgttacacgctaaaacttttttttttaacagtcagactgttgccgatgatttatattaaaagaagatattctgtttaaagaagaacataccgaaacttttcaaccctgtaacaaaaccgggccaaagaagatagcttctgaaaagatgagcatcgttcatgtgcacacagtgcaaacgcacgcctagtttggtagtggtagcgcaacgaataaatgacggacatgtattttcatcgtcgattggacgtcaccacttttttatatatcatctaaataagaatttttttaaataataaattttatatactttatccgtttcatattaaaaatcgtttgacttttatcctcatcaaatttctttaggtttgatcaaatttatagaaaaacataatattattttcaacataaaacaaacatattatcaaaatatatcgaatattagatttaatgaaactaatttaatattttagatgttattaaattttctataagaaatattatgaaaaactgagggaatatcatctaaataagaatattttaaaataataaaataaattaatagatatatcccttcacatatatatataaggttaaacttaacttgttttatagtgaatttaactaaatttataaaaaatagcaatattttcaatttaaaacaaatgtataatcgaatatgttaaatgttacattatgaaactaatttattgttgtaaatgatacaattatttttgataaatttaactaaacttaaaaaagtttaactagaaaaaaagcaacttataatatgaaaatgatggagtaatttttttttcatatttaatagctaacgctacgacaacgcttgaatggctagctatcaaaacgctatcaaaaccagaaattgataagcagtaattcatgtgacatagcaggtaaagaaatcaaccaaattggtagtaggaaaatcatatcgatattgtgtcaaaatgcatgtaaagatcattacaaaatttcgtcattgacatcgtactacatttcatcaaagttaccgaagaaaaataatgttatgtgggtataaagacaaggcaaccaaaataataaacggatgaattcttataattgaaaataagaccttgttttgcccaagtcattgaagatggtaattgatggctttgctgcgttctttcgcctcccttccaagatcaagtcctaagcaaccatcataaatttggaaatttggatggcacatgaattaaaatctgggtaagcaatttgaaaggatttaaaaaaaatggtgattatggcccgagtcctagtaaaatgtaaccaagagatccttctgcccgatacaccgtagaatatatctttcaacactaaacgcatatcagagtgacaattacaaaaaaaaaaaatgtagtagcagaccactgaaacttgaaactcatctgactcacccaaccaccacaatagaataacaaacttctttaagaaaactgcatcgtggaataacataatgatgaggccctgtgcgttccctaagctttactccctccgtcccaaaataactcaattcctgcgtttccgtgtccaacgtttcaccgtctgtctcatataaaatttttttatgattactattttcattgttgttagataataaaacatgaataatactttatgcgtgacttatcattttaaattttttcataattttttttaaataagacggacagtcaaacgttggacacagaaactcaggaattgagttattttgggacggagggagtaggtgacaccaaaactggagagtgctgcttttttagttcttcaccaaataaaagtcttgcgtatgcaaaatcataatatgaacataccaagcaatagacttagaaatctataaaatttagttctaatttgaaatattttaaaaggttccttaaacaatcaaaacatgtgacatctagattagttaaatatgtaccaaccgtacttgttcacctaatccaaaagtttcatgcctgagatgttatgttacgtgtctatccaaaaggattatattataactctactcagtgcagaataaatcaaaaagcagagatacctcaggattatattattataactctatttcgttttacattataagtcgtttgattttttttaagtttaactaaatttatagtaaaatttaccaatatctaaaataaaatctaacattgaatatatattgataatatgtttgttttatgttcaaaatactaatatatttttatataaacttgatcaaattcagctagaaaaaaaagttaaacaacttataatgaaatggagggagtagaaattaaacacggagcgggcccataaaaagcagaggaccgacgaggagcttcttgtgcggtagcgcacctgcagagtgcagacagagacaaaggcgacgtctatcatgtccctgcgactgcgtctcgccttccgtctcctcttctgctactgcctcctcctcgccgccgctcatccgtcgtcccgccgcctcctccccctcctcgtcgtctccgccgccgaacgcacgaacgtcgccagcctccctggcctcgatggcgcgctcccttcccgcttcgaaaccgggtaaaaaaaatcgaccaaatctaagcttcgattcttttcttgtcctgctctgcatcagccgaagctgagactgagagaggattgtgctcgatcgatcgatcaggtacgtgaccgtcgacgaggagaacggcggcgagctgttctactacttcatcgagtcggagggcgaccccggcgccgaccccgtcctcctctggatcaacggcggcaaccgctgctccgtcctcagcgcgctcttcttcgagatcggtgagaacctcaaccaccaccgctcaccggccggcgcgccaccgctcacccgcctctgtgctgcaggtccggtgaagctggcgatagagccgtacgacggcggcgtgccgcggctgcggtacaacccctacacgtggaccaaggtcgccagcgtcctctttgtcgactcgccggtcggcgccggcttctccttctcccgggaccccagggggtacgacgtcggcgacgtctcctccacgctgcagctcaccaaatttgtcaacaaggtgctcgatcacaaacactaacaacagatcatctcctagttaatttacaccaagtgtgtgtgtgtccgctctaattaaataactgtactgttctttctgcttgtcaaatcaagtggttctctcaacatcgcgaattcctctcgaatccgttgtacgttggtggagaatcctacgctggaaagcttgtcccatttctcctgcagaaaatctcagaaggtaatagtgttctagcccctgcttgtatggctatgattcatcagatgtgcattttatagcttatgaattgatgctctgtatttaaaccagatgttgaggctggagtcaagcctgtgcttaatctcaaggtaaatcatttgcaccatgtacctataaaggatcagtgttcaagagattggctctgctaatgaaaaagttcagggctatctggttggcaacccgggtaccggcgaaagcatcgattacgagtcgaaagtgccttatgctcacggagttggaatcatttcagatcaactatatgaggtactacttcaatttatttacaaacagtagcaactagcagttaactagatgtggaatgccaatagaacgggcttaattctttgtgtctccattggcatgcacttaatcgatattaagactatactggagcattgcggaagagaggattatgccaatcccaagaatgcaacctgcgctcaagctttgaacaggttcagtgaggtaagcaggcttgaacttatgctctgtttttgaggaatactctgcagttattcaggagttttgtcagatattctttatttaccatgaaataaattctagtgcccctaacgcaccattctctaattctcttgtgtaaagatttgtttttcccgggtgtcgctgcacattttcctcagtttgcagtttgtgcactaaaattcaaaaagaacaagaatatctaaacagagaacatgaagtataatggtatgagtattgtgaaaaaagaagaagaaacgaacatcttgaaaacgagataaaatacttaattcaaccgtttaaagtcaaaaagggagtagctacatcccacagcaccagccggtctttgtttaaaggaaggaagaaaattccttgcgtaccttgagtattttcactcaaacccttacatgtgcttaagttttgtgttatcccttaaatgttagtccctactatactcactccattaactaacattacgtttaagttgtttgttagctttttatgaaatgactatattatccctccctggagtatgagtactaacttgttattatcttcatcggttataaaaaatgaagacaacaaagttgcttgaaccaaattttgaaaactgaaatttaaatttcccactgaattgtaattaaatttgatgaaatttcagatgtagaaattacacaagtcaccattttgtctttcatttcaaatcaacttcaaacaatttcgaagaaatctcgcgagagagagagggagggagggagggagggagaggtgaaattacaattttaaattttgtcaaacttaattaaaggttgtttcaaaatataaattttggttttcaaatttgggttaaataatgatgtcccttttgatgttttagagctacattgttttcgttatgtgaaatatgctttaattaagctagcatttctataaaaacaaggggtaatatagtttatccaactaatggaatcaacacaaaggggcttaaacgaaaatttaggagaatgtaaggcaaaacttggtatagttatgtttaggtaaataagaaagctgtctattatatactaaaagtttattaaacctcttacaaacgctctcaaaccatcatgtgagactactacaaatgctgttaaaccacaagtctaataatttagagaaaatcttaaaaatctgaggaaaaaaaatggaaaacttccttcttttaattttcacatttaatttgtgagtccaatattctaaaccgttggattagattagattgatttaaacaaaccacaatattaagccccaaccagcactcggtaaatcttaaatatctatagatgttgcacgtctggtcagggaagattgcgctgggaaggatgtggaggttcactgctagggtgggatatcgatgatactatgctcagttgatcagctctacaatagatttgcagtcaatgtaatgtaaataatttgttcgtggacgcgtatagtggatgtgtaattaaaaagtgccatcaaaactaaaacaaggctaaatgaagagtgccgaactaactaggagaactaaagatttccacaacacatatgcataaaaacacagaaagaatcatctatagcatcaacaacatgagcaatcacatcggtgttcccatgttacagtgctaaaaataatatagcatgtgggacctccatatattatagactacatgttcaacccttcaattccaaacccattatagcagacaattcaatatataaaatataattaaacaatatttcataaagaatcacctaaaattaaaatttcaaatttttacggtaaataagtttatgaaatctaaatcttgattgagagttgtttcattttggatcaccttttaataaatgttttaacttaaaacctgttaaatttacctttatggcactttggaccaccctcgacttttttatctgtctacattaacttgtcatatgcgaaagcaatagtctaaatatagctatgggagtccattaaagagtagaagccgatgcaacttgtaatcattcatatgcttaagaagagagtcagggttgtccaaagtggaatagaggtaaaattactcagttcatagtgaaatattatctaaagggtggttcaaagtgaaacatcgctaacaaaaggtagcccaaagtgaaactttcaaaaagatgcacttcatttcttgcaaaacagatgatggcttcaatccttatcctatggctcaaaaaattacaaaacacattttcccccaaaaataattaactaatctgagataccaggtcacgtgtgcttcaaatatggccgtaccgcagcaccaaccggcagcaagccgcctccccgcaatttcatgtcatatgcacaattctaaatacgaggactccagatctctgacactgccgccacttcggcttgtttagttcgcgaaaagaaaatttttgggtgtcatatcggacgtttgaccagatgtcggaaggggttttcggacacgaataaaaaaactaatttcataactcgtttggaaaccgcgagaagaatcttttgagcctaattaatccgtcattagcacatgtgggttactgtagcacttatggctaatcatggactaattaggctcaaaagatttgtctcgcgatttcacccctaactgtgcaattagtttttttttaaaaaatcaatatttaatggttcatgcatgtgttcaaagattcgatttaatgtttttggaaaaaactttttgggaactaaacaggcccttatattggccttttccgctcggacaccactcaagtcacttcctgtcctatgagctcctaaattgtgaaagcctatgaaaaacctaaatgtctgtaaagttcatccccactaaaaaaatgttaatactaattctctatcatatcataaaaccacattatctaaattgtttttagcctttagatgattcatcaagggtgcgaattatatctcttctcccccaaaatccataccatgcaattgaatcatttataacctttggataattgatgaaggcacaaaatatataagcatatgaacaaaaatcgtatagcaattaagaaagaaaattttacaactcacatatactattttaaagcacatgtaatcttaaaacctatactacaaattacataaatacatgctcagcctttataaatttcacaccctatagtacacagttagatatatcaaatataattaaatgatattttaattaaaagtcaacgaaaattaaatatttaaattttgatggtaacagatttatgacacttcaaataaagtgcttgcacagatgcgcgggttacctttgtagttttcttaaatgactatgggacctggtatagttatgctttattttttcttagaaaatgattatgctttaataaagtgactagaattgatgcttcgctgcagctcatgggagaagtttcagaggcacatattttgtataaaaaatgcatctatgtatctcccaaaccagatgatggtactattggaagaaagattctggaggagattgtagtgggaaaccatcggccaccacgtcctccaatggattgtagtgtaagttgatcttaatgaacagcacacaattttcctgtgatataattacctttttccactcaaggtgctataatccatgctatcaaacattcattcatttgcatcggttggtaatgttaaagataattctctagctaatatttatttaaaataagtttaattaactggcatttgttagggactattaattcaaagttttttttacggagtcaaattattattatttaaattcagaaagaaccaatttagttataccaatttaattaattaaaaatatactcttgctttccaaattatatataatccatccaaatactttggaatgctttgattcaaactgccatcttgctctattttttcctttagagagaaggctcctaatatttatgttaaatgaagataggtgacaaacatatagagagcattattggttagttaacgagataccttacattcaaaaagatattgtttacattatatatatataccttatttgtggataacccccagtaccaaaaatagaacgtagtatatactatactaggtgaaactccgtacgttgctgtggaagtttagtataataacaataagtaagtaatgtgtaagatagctagataacataagcttacataagttgatgtagtctatggtaatttaaatttaaatagtatatatagaatgatgattcaaatgtaaaagatgatgtggcttcgtgagagaagaaaaggagagagataatttggaccatagattaatcatctaagggcaaaaacaattgatatgatatagctaaatgagaggagagaaataatattaactaagtgaggatgaactatataggtgtatgggatgatgatttaacattcgttcattttaaagctctaaagttcaataattataaaataaaattatagataatatagcatgcttgtacgatgtttatatgtaataattattagtgaaagatgatgtgtcatcattgcatgtagagttttagaatttagtgggttatagctttatagtaagataagaattatgcgggatgatgatttaacattcttgcattttaaagaactaaaattcaataattataaaattatagataatatagcatgcttgcatgatgtttaaatgtaataattattagtgaaggatgatgtggcatatataagatcttgctacgccatcaaaacttttgcctgaatcaatacattacttcttctatcaacagacctatcccaactatttgtcatatttctgggctaacagcaacaacacacgggaaaatcttggaataaaaaaggtatttaaattaatattatttttccatatcgactggtagtgtttcacttttgcagtttacatcacacttttcttgtttctcctgatgttcataacatatatagggaactgtggatgagtgggtgaggtgccatgacgatggactaccttattctcaggacatagagagcagtattaagtaccatcaaaatcttacatctagaggctatcgtgtcttggtatacaggtaaccaagttcttgtatgttcacatctcaaaagttttatgattatgaaacgcctagagattatgtgcatgtctcttaacaacaattaataattaagaaccgatctcttattattggtgcttccgctaatacagacagaagcaccaatagtagtagattaaaaggtccaactgttgggaaggatttctcagctcatttctcggcttataacgttatagaccctctaacgtataaccattcgaatttatactattggttgttttcttttctttttttctatgtgttgtcaacttcttatttttgtctttcatatagtggcgaccatgattccgtggttccatttttgggtacacaagcctgggtaagatcactcaactacccaattgtggatgactggagagcctggcatatcgatgggcagtctgcagggtgagaatttataacttgcagatatatagtttgttactgtaacaaaaggcataggaaataattatctgagtatgcaaacttttttccacaattacactttcattttaaagtattattgatttgcagattcacaatcacatatgcaaatgacttgaccttcgctacggtaaaggtaacaacataactacaagttacttctccctctctctcaaaactaagaaagagaaacatgcaattttttttcaacaagaaacaaataccctcatccctaactacatgcaagaaaagaaaatgcatgttgggtatttgatgcttttaaggtgggctctactgctctagtgttatttccagtatgaggcgttgaaacttcacaacaaataactttttttaaaaaaacagaggaactttagttgagctggcagggaaaatttgtcaatttactgctctctgggactttctgataagactgaattgtcttaattatagtgtccttgttaattactggacaaacgtactaatgtgacataacgcacaagaatagatgattatgcattacgtatacaattgcaaataactcggctgtaacgctatttaacccagggtggtggacacactgcaccagagtaccagccggagaggtgtcttgcaatgtttgggagatggatttcagagaaatcactttgacgattgtgtatatcagttatgatgagagctgctttgattattatctaatgaatgatacatcccttggccagttcattgggcaaggaggtagctcaggtgaggcgcattatggtagaacatgccacagaggaccagaacaagctttagatgattactaaagtgaatatgaaaggatacaaataatcctgagatctctcagtgatactctcttcgtttttttaatagatgacaccattaacttttaaacacatgcttgatcattcgtcttttttttaaaaaaaatatgtaaatgtataagatataaatcatgcttaaagtattttgagtaataaaacaagttataataaaataaactataattaaatagttttttttgagaaaggcaaatgattaaactagtaataaaaagtcaacaacatcattcattgaaaaacagaggtagtatatatttgaacatgacctctcgataccctgtggttaagccacgtgacagtttaattgtcagccgttagatctaatctgaacgttcgcacaagcgtgaagcccagcccacatttctttcctggtttctccccatccgcatcgctcacagccgctgccgccgccggacgcggtcgcttcccctcccccgcccgcatgcgtgcgtgccagctgcgcagcgggcccgctagccggcgcactcgcttctccttctcccctgcgcatgtgctcgcttctcctccccgcgtcgcactgccttcctcatcccgcacgcaccagccacgccgcggagccgcgcgtctgtagcgtcggctgcaggtatcgcgagatggagatatgcgccgggagccctagcgccatgctggcctcaaccgcccctacaatggccttcgctgcctcccctcccctctcctccctcgccgctgccgccgccgtgatctcctcctcctccccatcaaaacccctctcacgagcaaagacccctccaccagctctcctccaggctattctccccactgccccccccaaacaccattccctctcctgctctgggtcacaagccccacgtgccaccacaggcgaaggatcggccgtgggggaccgcgggagcggctccggaggaaacaacggcaagggtggcggcggcgacggcgatggcggcgacaacgactatgaggaggccgagttcgggcccctgctcgggttcgatgaggtgctgcgcctcaccgcggcatgcggtgtctcgctcccggccgacatgatgggggcggccaaggatgctagcatccgggaagtcatgttgctccaccacttcgatctgcaggtaatccgaattgcagaagaattgtttgtgacaaggtaaaaaaaaatgtttgtgagaaggtattttcagtccccttttcatctcttaggcagcaccatggcctctagccgcgatgatccgggcattcttgatgctccgcaactgaatgttagcggacccatcattcctcttcaaatttggaaccaaggtgcgtgcatgattgatttgttgtttaagctgaggagttcagattgtcgtcctacggagttttgaggattttgcattcgatgcaggttgtgattgactcgtgctgcgctacgtttgcggaggtgtttgagctgtacgatccatggacagatatgcacgctacggtttgctcgctggcccatgttccttcatcagttatacttcatggagtagatccctaatgcatgaagcactgcttttgtcttatctctgagactctaactaatacttcggccaatccttttttttttgaagcatgctttaatttcgtctaatcgctcgaagtttctttcacattgttaggatgttttgttatcactgtgtgcagaaattaactttgcactggctaagtgaatttgtttgatctgctttgtagggattcatggatacagccatcacccccagtttccattctcttatcctgcacagttcattggatgacatatttgtgattccaaaagagtaatagagggtttgtgtttaggtgttccagcaattgatgcgaatgtcaaaatttatctgctttgcgtccacttaactcttacttcagttctttcttttacatgtaaatattggttgcataaaatctatttttggttgtttacgagtttaccgacattctgaaatcgtaaactgtagggatttttcattttgttcttaccattgtgacttatcttatcaatcttttgtctcagccttttaggtctgaattaaacgcagagagttggaacagtcaagacatcaagtagtagcagattatcactacgtttcaaggtgttccagaaatcctgacacaagatcaaatttataattctgattaagcactgtagcacatcatcaccattagttgtttggcacatcgtcttatctattactgaaggttgcatatattctgatcctgtattacctgattattcttttctgcgaatttctaaataatatttattgtgttcgtggttatacttagatcagtcaaacacccatcacaagagctatatatatataacatgtggatagttggatgagaagacgatgaaatgaattggctacctttgatagaacaatataaattgtcactggatacattgcaaccttctatatgtaagctacatcgtgacagcatttgatgaataatacactaatgaattgtatgttaactcatgacctaagtatgtagtatccttttgaagttttggctcaaatgttgatcaaaaagtccatttatttatctctttaattttctaacttgaggatggatgcacatcctatccaattgcataatattgagtatgtcctgcagcaacgcacgggtttcctctagtttccaaacgaatatttctcggcaaggcaaacactgcagcttgtccatttcttccctttgcgggagtagttttcaatgattgcgatggtaatggaaagagaaccgtttccatcgttgtcattgccgttgccgttgttgttcccattctcgctgccaaccatgatgaagaggaaatagtgattagtgaatgtagtcgttcacgaacaacagccaacagtcgcacaatgtattttctaaaaacttgactcgccttatcttctcggtgcaagatcagggaggtggggggagggggttccgaaccgctgtcccaacatccatggacgcagacgtcgggatgggaaaaccatatagtaatagcgtggaaaatagagagttgtgtgttgtcacgtgctcttatatgggagatatttagtgccttctattggactcaagtaagaggaagagaaaaaaaatagccatgaataataagtaaccgacattggctttccattttgaattaagtagacgttttaataatcaatccgttggagagttatatgtgttgtaggattgaaacaagaactaggcctaccagagaggggtgaatggtaggaacacaaaaatctgaaaacttctaacaaaattaaaagttaccctcaaaccagttggagataggtcttactggtgtagatgcgccggtctgatcacctgactgccatcgatctgaccgattggagttgctctagtccgaccaccctacacatcgttgtcaccaatcgctacacaggttcctccacttctcgtcacaacttttggatctgagtctactatgtacccttgggttcagcttgggcatagctctaccatgtctgaacatgggcctagggaggtgcaggttctgattcactcattggatggctctgatttctccgataacaatactatctatagctccgacgactctaccccactccgtgaggtgttcatggctttgaaaggagccaaggatgaacaagctcgaatctagagagaagcggaagaggaataccttcgtaaggaggtagaagatcgtctgcgtcatgattggcattgtgatctaacaacctgaggatgcacggctcacgacaatatcatccaaatgggccacgacgaccacaatgttcgtcgccccacggcacaatgttgttgcgatagtcatgctgttggaccttgtacttgaagccatacccgaccaccaggtgactccgaccctcaacaaagacaaagccatgatgaccacgacgtcttcctagcaagtaggaggatcaagttgcaattttcgccgtccaagccaattacattccaatccgtcgctgagttacctaaaactctagctggcaatcaccctaaccaagagctgtctgggcgtccctctgcgaaaaaccactcggtggcaggcaacaaaggacataccgcttcatccctaaggtgacgtcaaaatggaaaccgtcgaccagctccttcagtagcggacaggcttttaatcgtcaggatggaggatatcgcattggtaaccaccacgacgatggacgccattgtgaagaaatacgcgatcataggaacaatgaggacctcagagatgagctcaactgatggcactgggagcgtgaaaatcatgaccaccatggctatcataattccccactcactatgagggatcacaggatatgatgccgatgaagggattcctgcgttcactcctaaccttcaccgagtggattggcaaccggattcaagcctacaagtatcgagaaatatgatggtaagaccaagccagaatccttgttgacagtatacactttagcaatcagagcagctggaggagatagcaaggccatggtaaactacttaccggcaacattcaccgactcatagaggaactggctttggggattccatggggatctaatgattcctggtgcgagcttcaggagcaattcattgcaaatttcaagggtacttacgagaggcctggtactcagttcgatctatagcacatccattagaagaaaaattaatccctaaaagattacatcacgcggttccctgaaacaaaaaaaaagacccaatggtcatggatgacattattatcgctacctttcaaaagcgactccatgatgagaaccttattggcaagtttctgaccaccgtgacgaagctatttgagacatacaatccatatgccaagtcagcagatgcaaccaatgatgctcacgacgataagccaccggatgctccatgcccaaaggagagaagagataacagagaatttaatcggagagagatcggaagcgtaggccagaataattggcagcgactattgggaactaccagccgcagcaccctcctcacaacaattatgatatgatctaaatgggctctacaagaaattcgctgaagatcatgccaaacaactccaggcgccagccggtgagggtagctccggcaaggataaggccaaggacaaaccggaccacatggacccgagtggattccaggatcaccgagtcgagctaaaccatatttttggaggccccttggcatgagtagaaggggaagcaaaagctaaccgactgtgaaattaatatggttcagccgaatgtaccccaatacatacgagggtcgatgttcgcaatcatgtttgaccactcggatcattctgaccaagtggctcgcccggggcggtatcccttagtccttgacccggttatcaagaaaatcaaattcagagggtcctcattggtggaggcagtgcgctttatattttgtttgcaaaaacactggatgagatgaagattctggatgagatgaagattccaaggtcagagttgaagccaagcactgctccatttcacgggttattcccgggctgtcttcaacaccactcgtccaaattactctagagtaatctctatccccacagattacaccactagacaatggtttatatcatcgccctcttcatctttgtcaagtgaacacacctctactaataaaaggctatggacaattctgctagtgcttcgcttgctcatgcagttatggtatactccctccgttctgaaacataagacattttggctggatgggatatatcgtaacactacgaatctagacaggtaaccaaaatcccttatattttagaacgaagggagtattatcttcactctggcatcaaaagctattgcttgttcttgcaaatgagatagacctgccagtttctcatgtcagtttctcctatttttagatgttgtgtgactaatttgtctatggcagttgctatgagtagcttcatactcctcctatccaaaataagtgcagttgtcactagtatagatccgggcatccttgatgagccaccagtgtcgggctagtgcgactcgtttactttagtgctttacctaatgccttcactcggatgagtcattcctaacagttcaaaaagtatcccgtttaagatatgactatcggggatgacccctcaccgatataaggtcatctttattggcttgtagttctaacacgtcatatatgacttataacgggtctcaattatatcccatcacggataaaatgtcatccgtgacgagtgtaatgggatgacccattaaagatgagagcactcatccgtgatgggtcttaattaccatccttcacggataacattatttgtaaaggatggtagttactaaccatcatggatgaagaaaaatttaaatttttgaaattttcaaataaccttagatagagacataccatatataaaagttatagatctcgatgagatctataactttaaagcggacaatattttaatatgagatagtttatatgcccaagaatgcattataagtggcaagatatatttttaaaagacataattttgaatttttaccttgatctcggatggagacgtttcctatatcaaagtcaaagggtttgatgaaatataattgacaatattttcatttaagattgttttcatccccgaatatgtttataagtgatgtgatctatttccaaaatattttttgaattttccaaacaaccttggatggagacatatcctacattaaagagttgaaagcgttctcgtttgaactcatctagggtttcaaatttttgtttcagatttggataagaatagttaaaaaaaatagcatcgatccctgatcaacatgtggtctataggtgagatggcacgattgattttcattcgttaagaggtcttgggtttgaatcccacttaagacatgcatgcatatcatttgaaaaatcatgaatttttatctagtgatgtgtgaccatggttggaatatcctaatgatatttttaggggtttctatgcatttaaaattcaaaaaacataaattcttatccgtgaaggtttgtaattatgaactgtcacgaataactctcatccacgacaggtcgtaactaccacccattacggatgagagttatccatgatggtcttttatttacacccgacaaagatgactgttatcggtgacggctgccagcccgacacaaatgagttttcacatcactaaccaatgatctatgaccaagccactcaccgacactgatgtggatttccacctgacgcagatgaccaaatccacactagggcgtgtgggatggagggaatactaagattcatcatcatattttacattgtttatttctcgattacactgaatggaaaagtactaataattccaactcgcacaaaccaataaaaaatagtgctagaggtgcaaacaaaaccactacccaaagttcaaaacaaacactaaatgccattccattatattcagcacataactcatcgaagtatatactactacccaaatcccagattgatgtatatactattttgttcgaatagattaacacacacttcacaaaaccaacatttatggcagtttaactgaatccatgatcgctctcaccaagcagaaccttcatctgatttctcttccggattccaacctggagacgccatagattcagaacagaatctggcagtagagatgcaaagaaccactggatcgagtggcgccagtaggggacacatcttggctcataaccgatgcagcggacagcagccttggcgtactcctcgggtgatggtataaacggcgagttaccctggacaggtgacatctttgtggcgacatataatggtatctgcacaaaaaattggttagggcaccacttgagatgacaatggagaaatatgtgatgtacatatgggtagtggattttttattttacgtgatggggtaatgagaggcacatattttctggtgttaatttgtagtgcatttcgatgtcttctgaagaagagtaaaacactcaatccattatgtaatatatgtttggaaacaagatataagttttctagaagttaaaagaaattaagaatatcggtaggttaattttatactttttataatattgtagcaattttagtattttattttacaatatgttaaaaatgagctatgcaatattttcaaagcctaaataatgtgctcataactgccttttattttcacctcgctctagaaatgatctttataaatgtcgaaaacccatttttgcaaaggcctcccactattgtatgaaaaaaaatcagtatcttttcaaccgtgcgacacaaccgcacgttagaacccattttcataggccgcctgtaaaaaattatttttaagcgaccaaattaggacgttcaactaaaagaaaacaaaacgaatctagacaccccagttagggccgctgtcaccgccactaccgggcaccactgtcatcatcacgcagttgatgtcaaggtcgtcgtcatgccgttaaggctatggtcttcgtctacttggctcctccacctccactctcagtagccgcagacggcaaatccacccgtccgaggccgctaccgatggatccaccgccgcctacaccaccacacgtgccgggaggtagagagctaagaggaggggaaagtgacagtagtgatagatccacatcacccatggccacgaccgtcgtcgtcttcgtgtatccgccgctaacagccccacactgctccaagctaccggatccgactggtggtgccaaatccgccccttctcacctcgccagatgtaatgcctttggccccacccctccctacccttttgctgccgccactaggtctagccgacacaaggtcgttggggccggatctgcccatcaaggtgccaggcgatagcggatccacccgttgttgcagtggctcccaccgctgtccaccgaccccgcactcctctgcagacctcttgtggcaaaccgccccttctgttagggcctgctggctgctccttttgtcggtcatcaaggagagcagatagagggaggaggggagaacagaagagggacgagagcactaaggagaggagtagacatgacagaaaaggacttagcgcaaggaggagaatataggagagggagccggcatgtgagaaaattcatacgtaggccgtttaacagtcctgtctataaaaataaaccttttattttgcatgcaggcctcttccagatctgcctatgagaatgaattttcgcacatagttctttacaaggcaccttcgaaatacatagcttcttttagcccgtccaaaaagaaaataaaggggtgttttattaaactttgaagctgaaataaatgttcaggcaataaacattgtaaaaagataacaaatgttacctggcattgcacatccactccgtgatgcttgtattcaacatgtagacttcgagacaattggtcaacatacctaaaaaaagggtattagaaaaatggtatcagagcaggtacaataacagactattagctagctacaaacatattttaatgagataaaagatgagagagaagagcagcgggctacagatctgtagtcagctatagtacggactccaagacgcaatgtgtgtatgacatgtgggaccatatattaatagtatagtaagcaatattgtataaattagctattaaatcggctacagatgaattggagctagtagtggactatactattaaacttgctctcataagaaatttaagttagagcagtcatattaattacctagagattagtacgtacctaaacttatattatcttgtttgcccctatgtattgagtaacattcccaaattgttacggtccctcttatgtgacgctcatttggtatgtgacatgcacattaaagtggcataccacacggatatttcggtcccaaatttttttctttgttttttccacacgaacagaagggaagaagagaagaaaattagaagaaaaaaagataaaatagaatgactcaacaccgatgttccaaatgagcatcatatcggtgttccaaatgagcatcatgtaggatctcgaggcgtcatgacaattttaaaaatatattttaaaagttcatagatctggatgatatacttagacaaatcttatctcatatatatagtgaaagaagtgaatcagctttcttgcacaatgatgtggcacaacatcaaaacatattggctaagcatgcattaatacaaatagagcatatgggaattaataaaaaaacacaaactgactaagcatatgggaatttatggatgtttctggtgattcatcttggacacatgatacaaatagagagagggggcaaaagacaacgaagaaaaaaaaaatccagaagactttctagtgattcctcatgtgaacatatagtataacttagctaaatctataattagttaggccaatgaatattttgtaaataaattaacttatgttaaaaccttctagaagctaagataaactaataaagcatatataaaagttcttaaacatgatcaaaatttgtgcaaagcgcgactatatggttagtcattgatgatatatatagacaaacaagtttaaaggccgacaatacactttacccaatatgatatttaagttactttgagatgtgcttttcttcaattgtttgttttcagcattatattcaaatgattattgttttctctgaaatatcaatgagaatataccatctggatatatgcatgattgctatattaatttattatttatgtcgtttctcaatatataattattggccggtcctccatgttattcgccgggggaacaaagcatgaacttttccgtcatatacgaacggacattaacgagcattcatatgccatgtgcatttggacggtgatcaatcgttggcttgcacttataatgggaagtttggttcaacgttgaaatatgccataccacggccatatcttagacatgacgagactaaataatacgaggtacttttttatctcaaaataacttcatctcttccttcaccaatttaactcataaagactttatttttaaataatcaaaatattaggacttgttaaagttggcgataaacgtggtgggcttggacttgataaagttaaagacaaaagtactgaaaattaataaagtaaaagatattttaatcttctaaatcttatattggtaattgtaacatagattaaaaaataaagttaatttaaaacagaaatagcatgagaatagccagtagaatttgtggcttaaaaaactatatacgacgacatacatgtgacacctaaacaaacaactgcatcaaaatgttgcaccaaaccgctcaacaaatcttctcactgtagattttgcctttttttaagagtgaattgcacttagtttcatgttagaccatccctagttcaatctttctactttccactagctaaatttatgatggttttactttgtaccgcctaaaccacttcggttctagtacgctagcgaaatccttcacctatgaacagaacatatcatgttatttgtctgagtataggatggacataactaagaaaagattcgggaggtctgaagcactactagaaaaacgatttttagcaacattggccttttatttttccaagcgggtatgaccatcggacccaaatatccgcctagaaaaatataaactgaggtgaattttcgtcatccgcctacgaaaatcgatttatccaggcggaccacttaagcgatccggctgcgaaaatacctttaattttacaggcggaatgcttaagtggcccgcttggaaaaatcgattttcacaagcggaaccttacgtggtccgcctgagaaaatcatacctccaccgaaaaatatctaagtcacagactcaagtactcaatcttatcttcaactcaaccccgccccaccactcaccctctcctctccatctcgcatattatcttcaactcaactcagcaaggccgcggcagggcgtcagcagcagcgtcggcgtcggcgttggcgtcgccgtcgacaccaacgagcggtggcggctccgagaaggagcggtgtgtgcgcgacgagcggcggcgtaggctcgtctcctcaccacctccgctggccgcttccctcctcgccccctccgctgccggccactaggagcgacgacaacggctctcctcctccgctgccggcttccctcctcgccgcctccgccggccgcttccgctcctcgccccctccgctgccggccacgacgaacgacgacgacggctcgcctcctccaccgctggcttccctcctcgccggctccgccaccgatcacgacgggtgatgatgacggctcgcatccggccgctggctcccctcctcgttgacgcgatgacgacactgacggtgttgatgcgacgatgatgatgacgtcgcctgtggaggccggcggacggaggagacacggcggctcggctcctccctctcctatgtggaggcaatggcggacggaggagagccgtggccggaaggtgaggccggtggcggcgccagtggttaggttggtggtttttttaaaaaaatttttctaagatgattttcgttggcgggccacgggcccgcctgcgaaaatggtctattttcgcaggcgatagggtagcggcggtccttccccccacctgcgacacatgttttgggccgcctgaaaaaaccttttttctagtagtgaagtgcaacaaccctaaattcaactataaccagtccaaagtaaaactacaacaataaaagatcatgcaaatataattcactttttttgttgtttaagatcgaaacttcctattaattaattgcttatatgcatgcacccatatgatgcagtctttttaagcattgattcttctcacataaaaaattaaatcaaattggcattaacatttaattttctgagaatcaatcacttggcttttcaaaagtataaatttgctacaattttgcatcggtatctcacagaactaagagaatagcaaagcaattttatcacagagccacagctacgtacctttagccctcttgatctatatgatatatgggtcttgcatacaccaacataaatattgcgtgtgtgtaagataagtaggcccaaaagttgtcaaacaaataaaatttatagctttcagatataaccgtacattattgttgtatttctccaaatatttgtaaaatgtatatataaaattattgtaaattggtaatttttaataaaaatatagttgcaatcatctgaaatttacttttttgaaaacaactgataaagaaaaaagtaaatcaatttaaccttttattgcatgcagtgaagtttgggatgtatactctctctctctttcaaaataattaaacctaggataggtgtgcatttaactatttgctacttttaaaatgtgacaattaagaatttatcattggcagtttatgacacgtaggttcagtgacatatttaattgccacttgtaagagtggcacataattaaatatctctagtacaaagtatgatatattctagtgctcttatatatatttatagtaatacgaaccatcacatatcgtattaggttattattttggttattattttagacgaaggaagtactccacatattgcatgaatagtgatagcactgcaacgtgccttttggcgcctgccaccactagatgatacacttgtgttgacttaaggtggtgtcatgccatcctgccaattgatgggctattaatgtagaactgtactccatacatgccagtagatggttgtttctagatgtcaaattgcacaatttgttccgatgatagaaaaacatttaattagagtcaagtttctgcatggatcaacaaagtcaaattacgttgggagtatcttaaaaaactgctacaagtttttttttgactgaaaagtcgaaaaactttgaaaggtaactatattataattgtaactacactgtaactttttttaatcaagctatatataactatgatataacttatatttagttggctagcaccatgatcttacacgtgacgtgtgaaaagaaatttgtagctacttttttccttcatgcatatataaatctcgaggcaatccaatagttacaaatatgaaagttcttggagcaaagaaacgtgcgaaagttttgtaacacttttccttcttttaattactcgtcgtttgttgtaagtaagacatatatctttcactatcacttttttcaaatccaggccatgtagtttaccaataattgaattatatatttaaagtattttcataaatcttattacattaaattatatttgtttataggagtagatgggttaaagatttaaaatgtttgacttagaacaaacgtgaaacgatcagtaattttctaagacttgttttaagaaggttagttgttaagttgcgctaattttggtcagctttagaaataaatttaggattaaactagaaaaaaatacttatgagcatgacacgatagctttgaagattggaaggatggattgacttacgctttggtcgctgcgtacacggcgtagagcgggaacgccggcacgacgacggaggagccggagccgacgttgacgacggcacccctccccttcgccgccatggccggcacgagggcgcgcgcgatcctcgtcgccgccaccacgttcacccgcagcaccgcctcccagaccgcgtcgggcacctcgtggaagtacgccgcgcacgggtacgtcgcgccggcgttgttcacgagcagccccacgtcgagcccctccacggccgccgccaccctcgccacgccgcgggacagctcgccgcccccgacgtcgtcgtcccctggggcggcgaggtcgaacaccacggtcctcaccttgcacgccggcgccgctgcgcggacctccttgcagacgcccgacagcttcccggggttccgccccacgagcacgaggtggagcccgcggcgagccagctccagcgccaccgcgcgtccgatgccgtcggtggcgccggtgaccaccgcccactcgccgtaccgccggcacaggcccttcccgggccggaggaacgcgcggcggagccacgcgaggaacgtccccgcccacacgaccgccgcgtgcaggccgacggcgaccagcgccacgaaccacatcggcgtcgccggcgccggtgcagcggccagatctccggccaccaccacggactccatgttcttcgcgccggcggccgaacagcttgctatatcagggcattcgcaacgttagcagcggttcttttttatgagcatgagcggaagccaagtgcaagcatttgagaactgcaacagtggagtggtgcttgcgcctacgccctacagttggtaggtccgtcagtaatggcgagtgaatgcaagcaaaggtggtggatggctagctttgccgtgtggagagaaatctctctacatatgcaagcgcaagcatatgacatcgcatatggcagattggcagcatgggtgatgatgatggctactctggtccatgggtaatcaacacgcaacagagtactactattgttgcatgatcagtactttgtacaatgtgtcctatttaatgggagagtttgttctatcgtttttatcttcgatcactactccattatgtttgtaatatgatacagtaatttaatagagtaatgtctcgatctacgaatatataggggtttttttagctttaatagtataattctatcataattgtctttggctgtgtttagttccatgccgaaattggaagtttgaataaaaaaattagaagtttgtgtgtaggaaagttttgatgtgatggaaaagttgaaagtttgaagaaaaagttaggaactaaaccaagctttttttccctaatagcttgtttgatttgaaagggattgagagggaataatttcacaccaaaataggtgtggaataaggtggtgtttggatcagtgacaaaactttagtccttgtcatataggatatttggacactaatttagagctttaaatatagactacttacaaaactaattatataaatgagagctaattcacgagatattttttaagcctaattaatccataattagagaatgtttaatgtaacatcacatatgctaatcatggattaattaaactcaatagattcgtcgtccagggttatgtaatgagttttttttattagtctacatttaatacttctaattagtgtacaaacatccgatgtgatagggactaaaattttttacccccatccaaacaccccctaaatcccttccaattaatccctccctcaaggggattaaccgaacaaggtctaagcgtgaagaaattcaagatgatacattacacatagatgcaatactaaaggtacatgtaccaaaaagatttataattttcgatgatatttttagtggatgtataacgtgtgtacatgcacaggtttatgtgcatagtatatatcccaagttagatatattaaacattatagtacacttccagaagatataacggtgtgatgattaatcatccgtcttactacacaatataaatgatcaacttttttttgacataaaactttataaaaatgatcagcttactacaagagtaatcgcgtgatcacactggtcctaggtgaagcaaggactagctgtgaatttatagctgagctatagcatatatacgaaaacagtacctacattattttgtggtcctccttaacccagatgtgcactatgaccacaccctccattggttattggagaataaatactggttgtttacggagactaataaaatgacagcgtactaaacggtaatatatagtcttaccataaaaacatatgtagaattaatttgaaaatgcattctttacttcatttttttctttatttaatttggtattcaagtcgaagaagaaatacaagaattctataattacttttttctttttttgcgggttataattacttttttcaatgaaacatcctagcgtttactcaaagagttacacacaattattacataagtcacacagaaaagttcacaatagcagaaacgaagctaagcaaacacaaactaatagacaccaatagaagaaaaagatcccctaactactaaagaattctataattactaaataattttttcattgcaatattttattcagttaatatatagttattttgttatggaaaaatagatagctaatctaatatattaattaatttttttgggaggttgatagttcatttgttggagaagagtcgattattctctttatcatttcatttatcatttcaccattgatcatctagagtactccgttggggatagaaattccataatgaagtacaagtcataagcaaagcaattatatttcattactatgatagaatatgagtttaaataaattgtatctgtgcagaatcttttcaaatagatactaaactccttttattcatatttgttcatggatagcaaagcaatttaaattagtacagaaaaccagactaattgttacggctaaaagtaaacactaccaaggatctcccctggtagatgatgattcttggtagaaaccatcattgctgtaaaatcaacatggaactaattatctgacctaaaattagagtgacatggtcgctcatactatctccatcctataaaaatctggatacacatatgttcagattcattgtaataatttattgtactataatgtgttacatcccgtcccaaattcttttttttgaaacggagggagtacgtggaaatatgtggaatgtaccgacatgccaatgtccaccatgtaagggccaggttgtagttgggttagaggatcttattccgaatcaccaatccaaatgctattggatgaggagtctttatcggatggcggcgaagaatttatttcttcggcggttgatatagtgcacggtgagttcaacaatggtgaagttcaaaaggtggtggatatgttttaggtcatacagtaattaatcaggaaaatttgactggtcattggagattgtataatgattatttttccaaggaacctacataccttgatgttcagtttagacgcaggtttgtagccgtgccttttgttttgtcaatctttgtttgcaaaattgatatagacgagaattattattgttaattactgtgcaggtttagaatgagacaacctctctttttacgcataatgaatgctattgaagcacataatgaatattttgtgcagaagagaaatgcgactggtatccttggactgtcatgtttacaaaaggtaacaacagtatcacgcatgttatgttatggaatagcaacagatgcaattgatgagtatgttcgtattggaggtagtaccgttattgagagttttaaaaggtttgtggtggctgttgatgaagtttatggagaggagtatatgagaacaccaaacgagaatgacaaagctagattacttgctcaggggggagaaagagggctcccaggaaagttgggttctttagattgtttgcattggtagtggaagaactactagaccgcatggcaaggctagtatataaagagaaagagtaagttcctactttagttttagaagccgttgcctcacatgactgatggatttggtatgcgttcttcggttcacctaattctcacaatgatattaatgtccttccacggttgccattgtttgcaaagctagcttaagagcacgctcctaaagttaattttagtatcaaagggcatgactatgggttactatcttacatatggtatttatccttcatgggcaacacttgtgaagagcatgaagctaccacaaggaaataagaggaaatattttaccaaagcacaagaagctgctaagaaggacattgaacaaccatttggagtgcttcaagctcactttgctattacccgtggaccccctcgtttttggaggagggggtgattgttggacccaatttttattttggtattcctaattcagatttttggggaatcaaatattgggtggttgatgggcatgctctaattgcccccaattaatttggaatttgggcatcggattgggggggatttggtcgggaaagaagctaggttttcgggagagagaggaggccggcggctggaggtcggggacgatcagcgtgtgggtcccacctaccagcgcacacgctgccgcgcgcgtgcatgcagcgcccgtgaggggcacgtgaggcacgcatgtgtcacgcctggaaattcccgaatagaatttcaagcagaatgtgaccggccagggtacacaaatgacaatgttgtcatcaatggttgcagtctatcagcaaaaactttacaaataatttttacaaagaaattcatgagggagatcagcctgaagtcattaggggattgaggactaggcttctttgggaccaaagttttgtaagaatatttgattgcagataagttaacggtacttccccagaaatcagtacaaagtctacagaagtcttgagcaattattccctagcaagatttaaaaaaacacccatcgaagccatctggttcaagagctttgtcaccaggcatttttttcacagtctcatcaatctccttagtggttatctgtgcacataaagaagagagatcccctttgtcttctatcaactcagagacatcaaaaaccatttcaggattatcagtaagccccattctatccttgaaactttccaaaagatggcaccctttccttcatgatcactcacttgattgccatttgaatcttgaagaaaggagatgtcattatttctaaatctttcagtggccatggcatgaaagaactaagtgttttcccctccaagaagaaccagtttctgtttaaatatttgcttccaatattgttactgccaacttagaagagaagcaacttggcttttaacaatcattttgaatcttagctctggaacattcaataagcggaattcatccagtttatcaagaaacaagatcaccttgttacaattctctgtagtcctggagagtttagccaaacaagaactccactttttaagagagcttcttaatcttttgaaattggccgaaattatgtttgcctgatcttgagtaactctgaagccctccaacacatttctgacttgatcatgaaaacctgcctaattcagccaaaagttttcaaagcgaaatacatttgatttggggattgtagtagcaatttggactttaatcgaagcatgatcagaggcacttctagccatcaccaaagcatgagtattaggtaaaaacctactcaagttgctcaagaagaggatcaacttgcatgttgctccatgtataagaacggccttgcaaaggaatttctagaagcccttgagagctaatgacttcattaaatataaaattatcgttcatattacctcctggcttatttctgttctcgactgatcagtagaaattaaagtccccaaggacaatccaatagtcattatcaatctgtagatcttgcaaccaatttacaaagtcatctctaccaggaccatgggaaggaccatagacatttactaaaacccaagttaacccattcatctttcaggtaaaacttatcactagggcatgttgagtttgctccacaagagaacccgaaaagacataactacaccaaccaactaggacacccctgaagcacccactgagggggagaaaagatagctatcaaatctttttagggctaaagatctaatgaagctgtggtcaaagagatccttctttgtctcttgcaggcaaaaaattgaacatgcgctttcatctattttctgcttaacagcatgacagctagctagagaatttaacccccttacattccaacaaagaacattccaggattaaagaacagaactaaaggtccatgcatagcataacacccacagtgaccatgtctgacacaaaaaaatccaaatatccaggcagacacaagagaggagctggtactgaataagaaaagtatgacagcaaccccacaggctttaattacaagtctagtcccacaaaaataaacagcaattcaacccattaagcaaatcatggagaagcatcaacatgtttcccagctctagtctgggaagtcaaggcctcagctgacacctcctccttgccaagaccacaaagatcaacccctatctgctgtagaagctgaatagaacaatcaaagggggcagcgtcagtgtcatcaccagaattaggaggatcagtgaattccaggggcaatggattaagggagaataaaataccactctcttcagccaaagctttaagcttcttagaactcttggcctttgtttttctccttaggcttacccacaccctgattgggatcaggggacatgaagccatatgtcaacttgttgattcttgcactccttcttctaccagagtcaataagaaccacttttcccaaatttcttttacccctgctaggcttgggaagcagggttggagatatgtcctgttgaaaaggattagctgggagctccaagggggtaggatcagcatgagggtaaacagcttgaatgggctgaactgtcaaagcctattgagcagtccaattatccttggcccagatcaaagaagaggccagcagagcaaactggaccatctgatgaactgccagctgatagtgggctaaagcattggtctggcccagaatacatccactagcagcattcagccttggcccacccagaacaaacctatagatactgagcaatttccagaattgggggtaaactagcaaggataaaatagttccagatacatcctgcactttattgacaatggatctaccaggaattgaaacaataggtgcatgactttgcaaaactagaattatttgccaatcccctaagtattgttgagaaacaacacttatgttatgagactgctcttcatgggcttcattattgctgttctcccccatatcttcatcagcattttccaaattagcatttccttgttgatcaacttgttgtggctccagaattggaatatggtttactagggcaggtcttcatcagccggctgagcattagcaaagtccccattcaggacaaaaatagaaatagtccaggatcgcccaactcccccaaaactagtgtactttttaatcactatcttggaggggacttcttctaccatggagaagatgactttagccagaactctgcctctgaacctcgggtcgttagaccatctaagcaatcgaccaaatgtgcctactgccttgtctataatgcggtcagtttgaagatccaaaggaaaatccagaaacatcacccaactttgactaattggaggagaattacgacaagtagaagtgttgtcatggtaggagaaccttagtacaaactgataattgaccaaataggcccccctaagaactagggcatctcttaaaacaacagaagctaagtgaacataagcaaactccgaagcatgcctactagtatccaaaacatggaatccaagagtattctgaacataatctactatcatctggatgaactgggcatagagttcaagcagcgaagggggcaagaagcatcttcatgcctcttcgggggatcatctgtgataatcaaatccgcacgagggaggcgatgcatccaagcatcattgatggctattgcaggggcacgaacagggttgggtctggattaacattcgccattggagaatcttaggcactgtagattggactgggagcaagaagcaaggaagaagaagcggtggacggaaactgcctagaatcgaggcaagtaatcggacaagagctgattaaaatatttttatttacggccacatgagataacttcggagccactgagacaatctccaaaaaactgggctgcgaactgggttgggccttgtggacccaagattggctcttattctttttattccaacagaccaaagcctggtgatccagtttgtagcaagaggcacaacgcactctactaatacattcagactccaagtggcccaattttaaacacttgggacaaggaggcccagtggggtttgctttctttttagaggaaggcggattcaacacttttgaatttgaattatcaacagagtcagcaaaaaccacgcccttacctttagacttatccgaagaaccagcatcaatcactcccttgaaattagactttgaaattgaaatacttgatgatcctgcattaaccccgcctgcatgaatcacgccgtcgacagcagaatgattgagacccttaccaccgacggtgatcgccggaaaagaagaagaaagccaatcaaaaacaaacttaaccggaataagagaattgcccattcgaacactagagtgagctctaagaaaatccttcggtcatgcggggaccagcacctactacacctacaatgggtggcaatatttcatcttattttttttatgatttttctactttgattttactttgattatcttttcaaacatcgctcagagctcacgaaactttactttgatttgatttgaaaaaaaaaatttgctactagaatgctgctgagtacacagattcctgatttgtggttaaaaacctgtgacatcttttttttctttcattggactacggtccactctgcctccaaatcagttgaccaaatctcatactctttgcgccaatttggatcactgtctctccaaaggaaaaactgagcttcataatctttgcaggagaaagattggagggtgtaaacccaaagcccaactttctttgaacacaataagaaactataacatgaagatcacccggagaaccaccaatgcaagcacgcaaagcaagagcagcagatgaagaacataaacggaatgaagaacgagggaaatccaccactaggatgaacggacgacgagagaaaaaccgggaaaaatgcaccggagaatgtaacctggagaggacctcatccccaatgtgatcatccagggagaagtcccaccctcccggcggccctgggctcaccatcaccggagaggagcccgatcaccaagatcgcctcacaatcacctcaccacccttccggaaaacgcggagctccagtcttcattaattgggtaatattgacggtagaaattattcaagtaaaatttgagggctctttttagatcatggagaatttaagaaaaatactctggaccacattcgcatttttcttgtacgcattttaatgttgccaatttcttttaggattttaataaattatattattacttttaaaaaatgatttttaatttggaatgaatttatcaggacgtgacaatgaccatgcattttcgaagtctataaaatcgaggggcttagaagatgtatctcccattaactaaaagggaaatcccatctcatttattcacatcccactacatacttcatgaaaaaccctaactaccaattacggagtgcatttggtagccccaaagtgacttactttgagctacaaggattctacaccaaaactacttgagatcaaccgatgacaatttataatccttagaatgtcttatgttctgtgtatccaataatatggtctacaacttgtggacgatttggcatctctatattatacacatgagacaagattatcaattaatacctatgctgatgttggaatcatatttttccatatatgatagacactcgttgatcttatgaaaataacaagtaatatcacataaagattctcaggaataagtcacacactcattggtcaacaatgaattatctatttcaaggaacactttattattaatttataaacataatacatggtacaatcatatctatgagtaactaaaccagtgtagctcgactaatagagctccataggttgtctggttgtgaggtttaggccatgcaccaagtattatccgcgatcacatcccacaaggttctgtttattcgtttggatattgcatatgcttgcggcatggcatcttttggtcatagcccattcatcccgactaaatcccagaatcgggttgtggacccatccccaatggtaatgaaaggccaccataggttgttggcgagcatgttcttttccatttgatttgcattttccacccgttatgttgcccatacccacccagaggaagctctttctctgcttgtcaagcacttctagagattccttagtgacctctattgatgtcaaaaggtaaacgggctgcgaggagagcattgacttgaccaacgtagtgcgtccggttagcctcatgtttctcccgcgccaagttgccattctacccaaggttttttcgaaaagaggttgtaagtacaacttacgcaacgaccgacagcaagaggtagccctaggtatgtcattggcagggatgctctcaagactagtgttttctgtagcacgttattcagatctatgctctcacatctgattacttttacctgggatttctgaatgttggtggagagaccagttgcttggccgagtttgcatagcaggttgaagaaagcttgcacttcacttttgacaggtttgatgaaaactgttgcaccgtctgcataaagcaagattcgaaggcgtgcagatcgacctcccagcttactaagcagcttcaaatccgtggcgttgtcaagcagccgttgcaacgggacgatcgcaaggatgaagaggagtggcgagagcgggtctccttgccgcaaccctcatccatgtgatttgttaagttttaggtaattcacgtacctaaaagtaaaatgatatgatgatttagggggcgcttggaaatggaaatagcacaaaatttatggatgtgggtggctgaaccgaatggaattctcagatagcacctaaatgtaatacctaacacaatagatgggttgcgttaagctttcatgggcatataaggtccatggtgaattggagaataaacctacatatgtggagacaaagaacgaccgatcatatcaaatcacaaatgattatattttgtaaggatttactgctatattcatgcttcctttcagtgcacgacagaacaaaaaacaaaatcaagcaactctctctctctctctctctctctctctctctctctcaacaaaactaaagaaaagattagataaagcaacgtaataacagtgtcaaacaaatggcaaaccagtaatcaacattcaacaacgtattgttctcatggtacttggtagtcgtgttaaactgataacagtatgtaagcccaaaatttaccaagaaatgatccaaagaacaataaatgaggtgatcatttggtgtcaatggctcaaagcaccaaggaagcatataggctaaagattttgtttatcagaagcaattgctcgactatgtacacctggactgttgttatgtcttaggtaaggacagcatgaccgaaccaaccagctcttagaggcctaaacgcttctcgagcttctggatctcatttaggaatatccaagtcatctgcacaaaagatgtcattagttaagaatggtagaacatgcagatgtgatgttttctgctaagcaaggaagaaatgtgtgataattgcattaccatggcatgtggtgcaatcctgacacagtacacaggaaagccagtgtagaacttaaatgggcctccactcttcaaggtcttcatggcacaatcaagagacccagtgtatggatacttcccggaggcatcaggctgcatcttttgaatctgtgtcttcacataatcaaagggtaaactgcaagcagacgcacataaccctgaaacagcactggcccctgcaatcaaaatataaaatcaattttgacatgcaaataatatttaggttggcactactcaacacatttgttgcacacactaagcacatgataggagacttttagcaggcctactatcatgtgcttattttcaacaggtaagtagagtttaagtccaaagagcataacaaaggtagagatcatgaacaaaatataaaaatattagtggaactatatgaagacatctgaaatttttaattgatcaactttgttcttttgtgcccacaagttgatatatatgtctggaagtcgacctatagaaagttgcaagcattaagtcactctggatccacatcctcaaacgcttgagaaatgtttgatagagaacaggtaaatcagaaagattgcatgaaaccgaaattcaaatgagtattatcttaccaagtacagtagtgacttctccagcaccaagtgtgtctctaaataactccacactctgatcataggaggcaagcatgcccatatttagcgacatagctctcactacagttggacctgcgcccttccaaagtgctagaacaccttcatcagcagcaatacgataaagtgcatgaaaagcattcttataattgcgactttgggctgctggcaacgttgaatcagcctgcatcctaatgagtgccaaatccgcaggactaccaacacaggctccaattgctcctgcggtgagaccaataccagctttctggactagaggcagtggcttcccatcatttgcttcaaccgctttgtttgttagaaccctgagggaatacagtgtgaagaaactcaaccaaataacacaaccaaagtataggaagggaagatcagatcaaaacagctgaaaacattgcataagtgactttccagattgatattcatggttatggtaaagcctaacagttaacctttcctgcttggcatagagcaatgtcagaaaacttgactattgcagcattctttcttgaaaatttgccaaaggttacttctattattcacaacaagagttgatgggcaccgacacttgtactaggacattgaatccagctgggtaggaggttaaacacctcccgacaacaggacagaaggttctattattgattctctcaagaatccaacagttatattttgctgcaacttacggaattaaggcaatgtaactttatctacattagtgaccctgcttgacaaactgttcaacatgacataatcctgaaacaaaaccatcgatagattaaatggttactacaagaggagtccttcagaggtgcactacacttggtttgtttgatactctttagctgaatacctgctagtaggggtatcgggcggtaatgcacttaggctgagtttgctaggtatgaagtgtcattgcttcaaaaacaaatatatgcatctacaggacagttataagatccaagatagtattgcactttgctgttgtattttatcaaccaaaaccacaggttttcatttcaatacaagataatattgcatactgctgatttattattcagctgaaaagaacaggatgtcaagtcaaagctgttaattatttgacagtcactttaacttactagcaaaagatattatgggctaagtagtacgtacaaacctaaaggatccgagacgagcggttgtgtatgttgcttgcctgagcaaaccagcagacaagccctggacacaaagaatttaagcaataacagtttgagtgacaagaaagctgatgatttagaataatttagaactatgttacaatagatattagcagtcaaaggacaattatggagaccatgtaatagtcaagtggtacaagactacggggttccatccagatgatgtaactgcaggttccgtacgtgtgtaacatgctacagtactgggttagtgcacaacgcaaatactggaatttttaaaccacggcctcaagacaacgaaccttgtagaaggcactaattccctcatttgcaagcattttcttggtgacagaagccgccgagccctcacccaactggatcctcacctgcacaagcatcaacaaatcagtaactgcttggatcataaaacagaaaaacattgtcccacaaacgtgagctcagctgcaaacccagattcaactgctaattcagagcaagaaggtctcaacgaaagcaaccgatgaaggttagaaggtcttggcagtaataatagtaccccctccggccacggaataatgctgttttagaggccgtgtagtccacataaattgactttgaccataaaatttgtttataacataagtttgaaaaaatgacatggtcaagtttgttatgaggaaacattataatattacactagcgtaactattttagatttatgaaaaagaattaagcagccaaagctatgtcttactgaatttaaaaactccaaaatgacattcttatccgaatcgaggcctcgagggagtaaggaatctcccacgagatgtacaactacaagggacctcctttccaactgtgctaactcctcagccatgaaaaatattacaagacatcatcttctcgatgttgagctaaacagtcgaactagcattcggggccagcactaaaatcttgaagagggaaaaccttctatactaacgaatgcaaaaactgaacccaaacgataaaattcctcaaatcgacagccattcgtcgcgggtacatcaggaacaaatagaaaatacctcagagacaatcagtaactcaatatcacactcccgattccagtacgaaaatcgttaagaatcctgtctctaaccaagcaatgaaacaaaaatgttcaacagatggagacgtcggcaatgcatcaaacagctcatccgcacaccgctcatgtttcccttagaagccattccgcacaagcctagcgcaccaactagccccgcgcgcgaaccctcacaccaaacctccagcggaggcagggagccccagcccgtggggcggcgttcgtaccttgaccatgtcgatgggctggatgacgcaggtggcgagcatcccggaggcgccgccgttggcgaagggcttcaccgtcttccacaccccgctcgccgccgccgccgtcgccgcctgcggctgctgctgctgctgcttcgcctccgccatctcctcctcctcctcgctctcctgtgccgcgcgctgctgcagtttgggactcccggagaagaggaagaggcagtggtggtggtgggagtgggaaggaggcgagagagacgcgtgtccaatccatgggcgctcgcaatgccgaggagagccacgaataatattaaagtattcttctctttttttttaatctttttccgcgacgtttttctcgtctctcatttttcttggtaggatcattctctgcatggtctgtatcatccgcgtgctgcgtgcagccgtccacacaccattgaatgtttcgtcatcttaggaagaaagtttgtgttttattgttcaaataaaagtttgatgttggtacgtgtgttcgtacttacggttaatgttttgtctctacattatatccacaactaaatacaccattcacgtcagtcaaaatgtctctcctaatatttagtaaaagagatggctgtgatataaaaaaagaaatataaaatattctcaaacattatgagaagaaaataaaaagaaaaaggagaaaaggagtgtatgttcaccaatgttcttatgcagcatgagagaaatatagtttgaacaaaaatagtcatatgtccaattaggaataaaaagaatctatggcaaagtagtaccagtgggcgttcggtttttatagttttcttagttcggtgttttttgtttgaaaaaggtcggttttcgatacgtaaaatctaaatcgatagcgctctcgtttttttttcctatcgagtaacaccgatcatatgtgagagaactagtactatacatctataatttgctatcaggtcatacatgtcttttttacttcttatagaattttctgttaaaatacttatccgatttcctatctggttggactgttgtattcattgcaacaaaatctttataacaagatctcaaatgattatattctaataaaaaatatgtatgcattttaaaattactttttagacatttatgaaagaaaattcaataaaacataaaagtaatttacataagtcataaaagtaatttagcacaaatggaattaagttgtcacgatattagaagtaaatccgttctaggggtaaaaacatgagtcaatctagactttggagagtgaggtcacttgttatgacaatcgagcgcgcactctcctcgtagtcatggtctcctttttggtagttgcgaaccgaaattttcaaatataagagcaagtttagtagtatagtcaattactagttccaaatcgtttatagccaatttagtagctaattcatacaatagttacctataaatatgtactacactattaatatccggtcccacctatcattcacacattatgtcttatagcccgtgctgcagctggctacaaatttgtatcccgctgcttatctgttttatttcatctactcgatatgtgtttatagctggcttatagtgtgttattgtacctacctaacaaacaaaccgaccaaaacaagccaaaccacttcggctcagttctcggtaaaaccgagcgaagggctgatgggtgcagggcgctcctaatgagcgactggtcgcgcaggagcgtgggcgcgcgaccagttcgctcaggggcagagcccaatgaaccagggggtgcccaggaacccggcccaatatttaaaataccttgttaccctcatatctacagcatggaggcaccaccctagcccaacacagggaacccctctccttgaaagacccaaccggaagaaagccccaaaaccaaaaattacgcagtgggagacactaaaacgcctagcgcacaggagtggccgatgcggcgacgcttcccatcgaagcctcacgtgatatcaaagcggtagtttcgattttctcgcctgagtcgcctcaacgctcaatctctctcctcgctctcgtctgacctgtcgcctctccctggaggtcgcccttgcctcgccggggacctagcccggcagccccaatcggggaaatttctcatgtgtaaagcctctccctggtaggttgcctcttttttccaattttttgcactgatcaggctagggcttgcaactatagaggcatatagaggtagatgacaggggcaggaggaggaggactggaggaggacgacggcaagctgcaagctagcaacggccaatagctggagcttgccggctgccggctcgccctagcttaccgatctactctgagccccacaaaaattgcagccagcagcactagctgagggcaagtgttatggtagatatgactactacaattaaatttatccacatcattcactcataaattaagaggcaacctatacactatgtctcctctagtacacaaataccaatgtctcttatactctcacacccctcttgaaatttgtgttgaggttgccttttcatttaggggtggttcaccatctctctcctcacttctctcctccacctcatcactcaatccaatgtggcacatttaggggcagcatatggagcattatagtacttgccctgagagcaactgaataagtgaactctttctctcaatttttcttatccttagtttgtagttttgtgccaaaataaacttgaaaatttttatttggtcttaatagattgctatatagcaccggatagtacgaacaatatgaagaaatttgttttattttgtaccaaatcatttcataacttattttctgttgagaattaaactatattttcaaagtcattgtcctatggaggaatgaagacgttgacattcgcatgatatattcataagattttgttaatggaggtctttgtcaatggttgaaccattatcaactttacaaatattattagttgatttctttattagggtacgtattttttaactcttttttatgtatttcttgtggtatattatcttcaaatgaagaaataatgcttatatttattggtatgcaactatttagtataatatcgctctataactgtagttgtcattattacgtaaagaaaagtagaaacccctcgtcttttctctagctccgcccctgagttcgctcctactaccgctggtgctatactgctcttctagtagtactactactcctcctcctactgctcctaccgctgctcctaccgctagtgctgctctgctcctgctactactactggcgtgcgctgctgctactagtctactacagtagtagtactactactataacaatactatacgtgtatatatacatatgtatatactttatataaactttatattgataaaatataaattttttacatgtgtatacaaagtatatataatttttatgtgtaccaaaatattaacgtataaaaaatatacatatatacaaactttgcatatgtgtatataaactttacatatgcatatacaaactttgtatatgtatatattaaaaaccgagagaaaaaaaacacgaatacaaactttgtatgcgtacaaatacaaaatttggtatacgtacaaatacaaaacttggtatacgtacatcttaaaaaaccgaaaaaaggaagagaaaaaaaccggaaaaaccaaaacagaaaggaagagaaacgaaaaaaaactaaaacagaaaaaccaaaacaaaaatcactcgcacgggcgccgacagcgccctccgcgcgcgacacatgtctagtcacgcgggcgacacgtgtccagtcacgcggggagggtgcgcgctactggtcgccaattagctctttctgtgcagaggggagcgtgctagagttggatcgcgatggcctgggcgcaatggcttcagcgactgcggctagatgggctagcagccgtggacttcctatatgtgggctgtgaaaaattgtagtagatgggccttaatagtggtgtgggcttgaattagaaagagaacaaggaagattgcagcctagtttggattaggattatacggtatgttcaggttccaccttctaaacaccgagccgaacaccgaactccgatctatgtaaaaaacaacacctaaaaaagaacgataccccccaaaaaaccattatctccgtttggctcggctcggttcggtttccaggaaatttgtgctcacgctaaccacataccaccttccaccatatagccacacttgtacatcttaataagtgaaagggtcaattaagcctagaggggggtgaataggctaatttaaaactttatgcggaagctaaaactgagttagggtcggaaagtctgatccacagtcagactatccgaaaatatcagatagtctgatgttggatcagactgtctgatccactaaaggaagactacaagtagatctagtgcacaaacaagagtatggcgcaaacagcgactagatctaaagtggcacaaaagcaaagctaaataataggagaagagatatcaccaacaataaagttcaccgagttgttcccggagttcaaatccttgaggggattctactctccgttgaggagctcactaagagccgggtctttgctaaccctttccttaagaggtggcactaagcactcctccttccactaaggggtatctctttccttgtggagacgagatccggccttcacaaacttctcccggccaaccacacgtagatcggtggctcgggagtgacacctagccgtctaggagtcctcaacctccaagagtaacaaacaccacacaactcttggtcaaaccctagtgctcaagatcgagtgaaacacacactaggccctcaaacaccaaatccacaaccaccaagatccactacacaaagaacaaagagggatttgagagagggagagagagctcaaagatccaaagcactttagcaccaagctcaacccaaagtgaatgtgaatgaatgagttgggtaaccctagaaaagggttaggtggggggtatttatagaagcccccaaaatgtggccgttgggagagaatcttttcatcccacctcggaaagtccgaggtgacatcggatagtccgatgtttttgactcccaagcaggccagagatagagaatgaaattctggagaatttcggacaatccgatcgatcgggtagtccgatgtcatatcggatattccgttatttttgaaccaagaatttcatcctctcacagagactcaagttccattgaatttcggagtctctggatcatcggatactccgatcacatcggatagtctgatttaaaactcactcaaaaggaataaaaagcatttcaaaacagagagtgaagttctgagaaatttcagatagtccgacgtatcagatagtccgaccttatatcggatagtccgatatttttttagccaacactcagaccgaagacagtgagcaaagttctgtgaaatttcggatagtctgagcatcggatagtctgatcaacatcggatagtccgacagacataaaacaggaatacttcaaataaatgattttgagcactagtgttctaccaattatatgcatatgacatccctcttaatagtacggcatcctaatactcaagaacacaagatatacatggattagaagacaattaccataaaagatgccgcaatacttattgtgttgacatccactcctttttcatccttgcatacatctcaacaaaaagcattagttaccctctaattgtgttgtcattaacaccaaaataaatgaggggtcctagatgcactttcaataagattgtataatttgttttctcattagatcctatttttgattttgcaatatatgtaatacaagtattgtctcgttattttctcccaccttgagctccacgtataaacattttagagatagaataaaaaaaagaaggcaatactatgccttggtaaggaattatacgcattgaacgatatgcgagaatcatttgagaaactttgggttttatttgcataattcgtgaaaccctccggaaagaaagttgaataaagagtaagacaaggagaaggtaaaagccccatgggaaataaggtaagagaggtaaaagtactattatcaacttattcaaattatatatagaaagacatattctactcatggcaacattgtgacataaaacaaggtagaaactcctgatcaacaacctagtttatctttactcgagtacgagcaaaggtttagtttgggggtattgttgacggtcattaagtaccgatttcgaccatcaactacttcaataaataaaaggagaactaacacttcatccacgtatattagttataaataatgtagtttcatttgtcctggcgaattactatgtatgcaaagattatacactaaagtgaaggagaaaagagccaacatggaaataaacacacctctggcgaatcatgtgcgagtacacagatcgatgggcccacaagtcatatgaaactgatctaaagtggagccaaaccatcctcaatcgctacagagacgcacctagcagcctttggtgaaaggcagtggagaaaggtggcgcccaggggttggccggaccccttgttcggctgaaccgccatcagctccccacatctccaccttccaaccaccatacaaccatcattacaggactatttaatgatgagagtttctcacttcacaatacacacatcaaagagccattctctcattccatatattgtattctctcgagtaatagtggagttagccttagagtagtcttcggtactctagtcctctcggagattcgggtatgtgtttagtactttactcttctgtaagacaatagttgaaataaaggaattattttgtttacttattagtgttcatagttcatatacttcttactggttatgtgttttataaatagttcatactttatttatatgcttcacctgattttcttggagattcgggtatgtctttagtacttcactcttcttgtaagactatagttgaaataaaggaattattttgtttacttattagtgttcatagctcatatacttcctattggttatgtgttttataaatagttcatactttatttatatgcttcacctaattaggctagtcaatttatgctacagtaatggtccaattatcataacgggttgcagtagttcaaacttattcatttgaagggttggagttccaggggaattagtgatattatttattaatataagcatggtgctcaggttagttaaatatcattggatgcggtatgccccacggaaagtgagataggtggcaggtgatgaaagccctatccatcctttgtattcctccacatccaagtatgacgtaaccatgctagtagactaccaatggtctctcggtagtacctaggtaacttagaactaaattctaaccttgtaagcatgtatgtgttaagtgtaaataaatattagtaataacgaagtacgtatgaatcttaggtctctttagtccttctccactgtctagtgtatctttatttgagatgaatctcctacgtgtcacactacctaaactaccattatcatcttaacccctgtttagactatgataaagtaattatagcataattacgaatatatgaaaaatatgatactcccggaatactcctaagtaaaatgctaaagcagtatccgttcgtttgtggatttatctatgaccataagaaataccagcaacaagcatgatttatatagaagaaatagagagcccccagtattagaccatagttagcctaatacacgaaacgctcgcacaatagatatttgtatgaaatatgctttaggtaaatttaataattaagttactgctccgttaaattgtatttaatatgttgtgtaactttattgatatatgccggatatagattaattaatttaaaaacctaatacgaaatggacgtaactatacagctaaccactccatctataagaggcaccatccaactatacttcaaatataatttttctcttaaactactcatccgatctacgattcgattacaccgttgtgttcgtaaaaattaaatctttacaacaagatctcacatgattatattttgatgaaaaatcataaattacttttatgatatgtctaaactacttttagatttcactaagttacttcttagatatataaaagtaaattcagtaaaacgtaaaattaatttacatatattatagaagtaacttagaacaaaacgaaggtaactttagcatgtcatttgaagtaaatccgttgtagagataaaaacacgactttatctagaaattaaattaatcagcacaaattatggaattaactaaaaaaataataaaagtaatcacctcagagcatttatgaatgtataggaagtattttaatcaaatctaaaaataactcatatatatatatatatatatgataatttgttcaatggaaaaaggcattaattaaagttactttcttttgttataagttacttctataatatatgtacattacttttatattttactaaatttacttttatatgtctaagaaaaagtaatttgtgatttttcatcaaaatataatcatgtgagatcttgttgtaaagatttaattattacgaacacaacggtgtaattggattgtaaatcggatgagtaatttaagagaaaattttatttgaagcatagatgataggattatttttcctacttgctcaatagattaatagcaaccaaaacttctaaaacactagcacgtgaatatatctggttagaactaattagggagatctctccaattagatttaccgatacgaaatacatctgttgatttgtatgtgacattggaaattgatgtactccgaatgtagtcctctctagcttggtgcatggctgtgtgtgcacgtgtctgtccaagcttcatgcatagtagagacgtgttgattattctgttattactgatacagactcggagcagtaccgtgcccgtgcgtaagagcaagggcaataatatagcctgctgttaactctaaaaaaattaaaaaaattagacatgtcatatctagtgtagctaatatgtacataaatattttattattgtagtgggacccatcattttctccaaccttttgctttctccttcctttccccttccttgcctgtcttcacttctttacatggctgactccggtagagtgaaggtgatgctcggcggcggtgtggacgcaggaaatggcggcggccatgcggcggatgcggttgacaccggcggccgtgcatgacgaggaagcccatgcgcagacacaagatatggcggtggtcgcctggtcgggccggacgtcgggcgtgcagataacacgggagacaagcgagacgaaggcggcggccgcgttggcggacgcagaagacgacggcggccgattcgagcgacggttgacgaggaagacggagacggccgaggcggacgacggtggccgtgcgacggacgcggaagacgggggcggcccagccggacgacagcagtggctgattcgggcgacggcggacgacggtggccgtgcggcggacgcggaagacgggtgcggccgattcaggcgacggctaacgaggaaggcggaggcggccgaggcagacgacggtggctgtgcaacggacgcggaagccggtggccgtgtggcggacgcggaagacggcggcggtcgatctggacgacggtgaacgccgaagacagggcggccaagccggaagatagcgacggtcgattcggacgcggaagacggcgacgaccccgacggcagccgcaggcgacgacctcgccgatgagggcggacggactcatgtgatgagggcatgtgggcgccatggctgcgagcagcgggcccacgacctcgagtcgcgcgtggagccgggcgcccgctagttctctctcttcaactatctctcctccacgtcacaaaaaaaatcttacgtggtgttgttatcgctggttattatacccgctctaagccagcatgcttatatgtatctggtacttgatttgttaaggatgtcatacgcgatgacaaccccgatccgtatcgtgctgctgggcccatcgttatgcgggaatcatgattctctgcactgtagcgcaacgaactcggatgtctttcccggcaacaatccgtccactccggttatcgttagagaattttgggagaggggtctaggcgtcgggcgccagatggagtggaaaaatcgagcgctgatgtcatgctgatatcagcatatcagcatgatgcatacgtgaaaaatcacttcaaactattttttctcttaaattatttatctaaatcatgatccgattacaccattaaattcgctacaattaaatttttaaaacaaaaccacacatggacatattccgatgaatttttttagcttattattgaattatttttaaatattgcacgctgtttcaccaagtatatcgaaattgttttactaaataaatcgaaaatgtttcaatcctttaaaccggtcattgttttaccttttataaaaacaatgtttcagtaaatagcaaaagaatgtttcagttcactgtaacgttagatctatacatagtgaaacattgtgagtacacaaggtgaaatatttttttgttgaacaaaaaataaaacaaattcccttaataacgggtttccaaaatatatcggtgatttgttgcaaaagaatgtttcagttcactgcaacatttgacctatacatagtaaaaaattgtgagtacactaggtgaaatattattggtggaacaaaaaatgaaacgaattcccttagtggagggtttccaaaatatgtggatgatttgttgcaacggagtatgtggtggggacacatagcaggtagatagggacacatcgtggggcccagggcgcacatgcgcgcgcgtcgggggggggggggagcgaccgatttttcccctcccccggcgaacgaggcgtagaataatcggatttttggcagtgatatctcgaagctatgtgaatcctaaaagattaatttattggatgacgatggttctgatcgggtcgggttatattgtcacacctggagttttttcattttccgtagtttctaaatcattgctaaatcgtctatagaaaatactctgttaaccaagaggaaactctaaataataatgtggttaataattggaattgttagggagaattttttttgaattctctttactttaaatcactaacaagatgttcagcggaatatttagagtataggaagtactaatgttaatttgaaatgttaggagttgaattaataattctttcatctctctcctttggtcgtgaaccgtccccggttcactctccctgttcacagtactttgtatccgccaacccctttgctaccgcagttctattttgtatgacgagccaagtcatattctttttccggtccgttttcttttctttcccgaaacggcaccgcattggttttcctttccttttctttctggtccctcctatccgtatcctaatccctctccccatcaccctacccgtgcgcttccgcctcctccctgccgtgcgcgccacccctcccgctctcgcccggctgccgccccttcctctcccctcacgcgcccgaccccacctaacctagacctactctaattccgcctcctcctatttaagtccctataccccctccttttttctatttttcctccgcgcaaagccttagccacctcccctagccgcgccgctgccggccgccgtcgttgtcgcgtcgccggtgagctgcctcctctcccgccagtatggttcaccatcatgttttctccctagggtttaatctaacctatatcctcgtttgtatagcatcgcgtcgtctccgtgtgttgccgccgatcgtcatcgccgcctcctcctctccgatcgtcttggtttggtgaggaatccatctatgttcactcaatttaggtttaaatttcctagtcacattgtcgtcgtaaccttaatcgcgtcgccgtcgccaaaccctagctttgctgcagccgtgcgccgttgccaccgttgccgtgcacgccgccgccaccgctgtgcaccatcgccgccgctgccgagcgccactgccgctgctgtgcagctgtcgccgcgccgcccctgctgccgccgccgccgccgtcgctgtgccgcgccgccgcagccgctagccacagccgcttgttgccgagcgatgccgtcgcttaccgccggtcatgccgccgattgctgcggctgtgcagtttctaaatcgtgtcaccgtcacggcctagccgctgttcgtcgctcggtagccactttgcctagccacagccatacttccgagttgctaccgacctaccgattgccgtacctatccgttgctgcaaacagagtcaagtctaccggttgtgccacagtcgttcgctagccgttaaccattcgttcacacgtagtatagctgaagtcccgttcagttagtagttcggagtcgttctaagccaccggttcgttcgccggttcggttgaccgtttgagtggtcccgtgtcacagtggattgactcgttgagttgctatcctgtgaggcttgtttaccggtgatacatttccattgatctttttggctaaatgtgtaataattgactaaggttttatggtgaatagtaattacacagctcatattctaaaattcatatctaattcatctgagttccgttttaatccattcaagttgcagtgaattcgttaaaatatttagaatcaattaaaattggtttcttttgctgtttcagtagagttattggatgtattattgtatgctttgtttgtcgtttagattctggcagttccgacactctagtttatttcgaaatggttgctgaggttccgtcagctcaagagcaaggcaagtaatacatacaacattgatcatgttgaacctattttataaaatcccctgctttctattaaattgcattgttttagaatatcatgtgggattgagaactatcgtagtcagccttttgttaccttatgccattgataacttcggatataattgactagatgattgatttaggaatgcttagccatacttagatcaattagatcacaatgagattcactataataaaatcccctgctttctattaaattgcattgttttagaatatcatgtgggattgagaactatcgtagtcagccttttgttaccttatgccattgataacttcggatataattgactagatgattgatttaggaatgcttagccatacttagatcaattagatcacaatgagattcactataatttagtccttaattatattgatgatgtaccaccatggttatggtttaattaaactaaaatatgctttaatggtgggttgttggtgcatggttttgcaagtcgtgcccatgataattaaggacctgttctcgagaattcctagaagataaactcatacttaccacaagccagcttgggttccaggctaaatctagagtataacttaatctagtcgatatactgtggcaagggtagaggcgatggtgtagttcggaactagctttggtctctgctgtttccggatttacctaggcacgagagggggctgtccactgcctgttgaggagtgggggtgaaacctgaggtggttatgtttggttagggagggttacatgaaaggttttgtcacaattttctcgttgttcttgcgccctcactgcaccgtcactgccactgcccttctcctttgttgctccgctgaccatggtctgaccaccgtcttcatagcacagtccaacgctgcccaccctgacgtcgcccgtcaacctgaggtggttatgtttggttagggagggttatatgaaaggtgttgtcatgattttctcattgttcttgcgccctcactgcaccgtcattgtccttctcctttgttgctccgctgaccatggtctgaccaccgtcttcctaggacagtacaacgctgctcaccctgacgtcgcctgtcaacctacgtaatctccatgctgccacaccgctggtcgcgacctcggcacagaaagtccggtgacatctagcgctagctgccagttatccagatcgaaccattcatcattgtagaatatgttattttatagaaaaagattatataatgcttgtgaacttgcatatgtgtgttactgtgggaattaaattttattatgcattttgaaatggtgaaaatcttaaatttaaatttgaattatggtcttcaaaattgtaaattagggtccccattgtttcgcttattcgaggaataagctaaatgtcatatttgcaaatgaaaaataatttgtgaataaaacttttatatatatgttcttaaagttctaaaagcaaaggctgaaaaataaatttcgatgaaaaaaaaccccaagatcaactctaaatttaaggttgaaaatttaaattttggctgataagtataagtataagtgaaaagatgagactgtagatatggttgaataattctacgtgtttgaattattctagtgttaaactaggcataaatatatagtgtgtatattaaaatagaacagaaatagaaatgggaccaaagaaataggggttgttgggttgttgctgaagttctaagttaatttttatacccaaaagatgggagcgatcccatcaagtcattaagtgctttagaataggggctattgctaaaaatgttcgagttagagccatttcttgtcataggccagctatcatttttgcctttaggggcttgaggtatttattccctccgccacatagtacaagggatcttaggtggatgtgttgattcattgtactaggatgtgtcacatctatccaaaatctcttatactatgggacggatggagtattacgatggaagtaatacgaagctaacttactttaaaaatttcttcctccatttgaaaaattttaggaagacaaaataacattattggatttgttacgaacttttatctttatattgagtatattctaagaaagacaaagttgttaagggtaagcaaagtgaacgtagttcaactggttaggtttcttgtggcggaactagcccacacgggtacctagatttgacatgggtgctcgcatttgtaactaattattctgccagtggtatatgacgtacctatccacagcgaggtacccgtggtaacttcgtcaatctcaatatatgttgggccagttttttaaaggttattataaggttatgtgtgcacacgttagcgcctacatttgttgtattttgtttctaagaaaatatgctgttaaagctaggttagaatgaacaattggcatgagttttttgacggcataagtaacgaagcgagttgttagggtacgacagctgactgagtattaattattgtaaacttaaaatgaatttatttgtttgttaaaaacatagatatagaaggtttttcttaaataaaaagaacgtatagcatgttagtaaacatgctaatatatgagggagttgttcaccccttaggctgcgttcggacccctcctcaccggcacgtaaaacgaaatacgtattattacatgattaattatgtattaactattttttttaaaaagattaatataattttttaaataactttgatttaaatttttttaaaaaaatacaccgtttagcagtttgaaaagtgtgcgcgtgaaaaagggaagaggtgagttgggaaatctcaggggaagaacacagccttaacacacaaatgaatggagccgtactagtgtccagtttacttgggttactcggaccatatgccatggcttatatgccatagaaaataaaaatgtcagccaataaactaatgtacttttatgttgataacaaatacatgagatagcaaagcagtttggatgaattatttcaggtataaatttgctgattagcagtacatatctgacgaaggaaacttgatattgatacagcattactaaatgaatataaatcacaaaataacttgagtttcgcaaagactccctcgaaagagtggctgattaatgggcttctgctcagggttcatcggcttgcccaagaggcctactaggtgatgccatccgagagaaaacaagttcattttacctccctaatctatagccaagtatgattttgtccctctgtcacaaaaccagatatagatactctttcaactatcaaaactgggttaatttggtttattaacagttttatctgatgtggcactttcatagcattaaaagctagcgcaagtggatcaccctgcgaacccacttataggtcaaataagtagggttcgtgggtcgatccatttgcactcttgcgtggcatttaacctagtcttcattatacatggcatggcattatagtaagcaaacagaaaaaataaaaatactttctctctacacccttttctctatgtcattcgaggtcaacctaccagagcatcttgttgcaggagacgacattgttgcggtatacattacatcaatttggttttccacgccgtttccgttctcagtcttggctttcgcagacacatgatcgtattctcagttccaatcagggataggcggggcagaaagacacattgttcggatatcgattgaagtttttaagtgttgtaggggtgaaggttgagcctataggcacatcaggaaacactttattgacggtcgttaagtactgatttcaactgataattagagaactagcatttcttatatgcatattagtttcaaataatgtagttccacttgttcttgtaaaatactatggatgcaaggaattgctacaaaatgaaggagaaaatgagccggaatgcaaagaacacctccggccaatcatgagagagcacatggactgaagggcccaaaagtgagactaaaccgatatatcttagaccaatccatcatgcattatccctgggacctacacgtcagcctccaggagaaggtcggtggagaaaggtggtggctctggtttggcttcactaggctttgccactcccatccccacctttcacgtggcgcttcctcagccattcctaacgaaggtttcagagtcttctatatagcttcactaatctagagagtaataaaaatgagaaatagatagattgcttcttaagcgtgtgctttgagagcaagataatcaagcataactgtcatttggggagaccagaggaagcgtcacatggatggtggagatgagaggggccgtgtttggtttgacaagccgaaccctagttcggcagaaacaaagccaccacctctctccaccaattttctcctagaggctgacatgtgggcccctaggacagtgcacggtgaattggccttagatatgtcagtttgcttttatttgtgggttcttccatccgtgtgcatgcaacagtaatatacatcacctgactattcattgatcaagtccaaaccaagaagatccaagaccagactaaccttcaaaagcactaagaagttgtatttgtcaggtaactttgcaagtgaagcattacctgtggtagattaaatcgaactgatttctttgaggtgggaagtaggaggcacagtcgagaacacgcttggcgggagcatgcactggtcttccctcccggtggatctccatcgcaccgcttcaatccctgctgtcaggtctcctctcccttgcaggccctcgccgaagaccacgatcaagtgcagatgtgataatcgaagacgtggcagcctggatctgggcaaaggactatggcagggagtcctggattggagcacacctggggagggaggagtggagaatggttcccggcggtggacgggagtaccaccaggggcgtggcggatgaggggtggcgatgccggcagatgacgcaggagagcgatgaaagcggccggcgaggttgtctggcagtgatggagactaccaacaaggtggagatggggaggaggccgagcaattttgtggatggcaaaatcgagtgtaggtggtgcgtcatcgatggcgagatcaagggggaggagccgaggaagctatcggcagcgtgattgagggagggggaagcgacgatgcggtgacggagtgcggggaagagatgcgagtgggcatcgggtttagaggggaggaatttgcggaggcggcgcgaagaccctgcgcatggccctaagattctcatgatttggccgcttgattgcacagtgcaaactcctcctatttatattagtatagatgatgtgtatatgtgttttctagtttcatattgtacctgctgagtattttcgtacttactcttgtgtttatttggttttaggtacacattgagatcagcatgcatgggcgggaagtagcacccttatatacacatctatctgcacactatcaaactatatcgcttaggtccaaaatgacacttaaactatattctgggttggtcttgtaataatcttttacatacctattagtttctttcaatggatgtatatggatggatagcactgtgggaatagaattataactatctatcatgaatgtccatatttataggggacactgtcgaaattctcaatgaatttaggacttcatggtttttgtttcgtattgggtagcatccgatttttttacatgtaagcacatgcatcagtttaattccaaatataagcaagccaaacccaaatttcaatccatagacaagatgctcaggtgcaggcgttgttccataacataatgtccaagcgttgtttcataacataatgtccaacaaaataataggccattgaattgagttttgttactttgtattaatgtttgacatatttattaagtatggttcaaaaatatgttattttgcttttacaaaatattgttacactttttttaagtataattatatagcaagttaatagacctaaaaaattgctactattttacaaataaatgagtttacattaccgggctgctaacttgtggatgttatcgctagaaacgaggttgcaaaaggtccatttattttgtttggcattagattgagggattgacgtggtcatgtacacatgtttacaaatggaattacgaatatggtgtgctcagatacgtagtaaaagagctgcacgtgcttagattaaaaaaatcggcgatatgcttcgataggcctcctggtcgactggattcacagtgctcacgtgggcatgttgcctaaaattagaattccaaacaaatttgtttggattaattacattagtaattactggattgcatgtgtcactactaaaaaaccctaggaccggctttataggtgatggttcatttaaaaccgacacctatgagccttttcctaccttcgcacgttgaaaaaatatacaaccggtacctttaagaatgataggtgtcggtttattaggaaaaaccggtaccgatttttagaaagatccgacacacctataatatattatatattatagatgctggttaattaaaaaaccgacacccatacaaaactgagccaaaccaggatagctgagccggccttagctttatccgctccacgctatccttatccgtgcgaagtgagacgcggacgccttgtaacgccccgatttttgttcgggactaaaaatcattaaataaagcattttctagaaattaaataaaagttaaagcaatttaatcaagtgaaataatgggagaattaaaaattttcctttaaaaatcattggccgtgaatattttgtaatattctttgtgccctaattattctctgaaattttcccatgaatttttggagctcaagaagtaattataataatacaaagttcattaactcaattaaaataaaaagaaaacgaattaatccttccctcttcttccttttaggctcggcccagctccctccctcctccttcccggccaggccggcctccccttcccctccttcagcccactcggcccactcctttcctccctcactcggccttctctctccctggctgacaggtgggtccgtgggccctacctgtcattcccttcctccggctccccaagtccaaccgctatggccaccgttcttccccacgtcgccgccccatccggcttcctcacgcctccctcgtgcaggccacgtcgccgcccatcccttccacctcgtgcctgcaaccgcccccacttcccctctatccccgcacgaatcggcgccgtgtgccgtcgcctctctcctcccccatgatgccgccccttccccgccggttgccaccccaatcgaccacggattccctcccccgagcccataaaaacgatccccgtgctctcctctcacatttccccaatttttcccgagctccccgcgccctctcccactctcccctcgccaagccgagccgccgccgctcgccggagctgtctagccgcgggccggtgcgcgcgtggactcggtccaccgtgcacccgcctcctttgagccaccgataggtagggcccgcttgccggtgccacctatcctctcggtgacgtcataaatagtgttaataattataggaattcatttaatggctcaaaaaattcataactaattcattcgaactccaaattgggccattcaactagcaaaattcatctaaaatcgagctctacatgtttgtttacttttcatgtactgcttacttggtttttattagagtttttccttgttttgcgtgccagcgcgtagattccgccgtttcggaagttcgcgatcgcgaggaaaagtgttcggaagattctttcaaagaagcaaggcaagtcacaaattcccctcgagcatattgagcctactttacaaatgttttactgtttgcaaataaatatgcatgttttgctaattaattgggatcatagtttacctatctgctcgcttgtgccatgtttacttgatatatgtcctttgtgaaccttgggtgataattcgactagcttgtgttatgttgacctagctagaactatatgcttagccatgcttaattaccactagctcagttgatgggataattacagtattagactttctagtatcatgacgagctgcgtgctcgagacatccggccatgtttcattggtcgtagttatccaactaaaatgcgacttgatggtgggctgtgggtgcatggttttgctagccgcacccatggcaattaaggagtggttcgcgggacaccctggaagacatacaacgcttgccacaagcgggaatgggtaactgcctgacttgaagtatagctttcctttgggtgacgcatccaggcaagggtgagcatgatggagttcggatgggcactgcgatgacctatgtggctttctgattcgcctaggcatgagaggggattgcccgctgcctgttgaggagtgggggtgaaacctgaggtgtggtctgcttggtcagaaggggttatatgaagggtcttgtcacaatcactcgacatggtgacgtgtcaggcctggcgcggtgacatgccggtggattgtgtcttgtgggtacagttgtgcacctctggctagagtaaaactattcgaatagccatgcccgcggttatgcgcgatcaaccagattcaccatgattagtctcaccttagtaaatcgactcaatgcactggttagttcaggtgggttggttgggcctgttcaacgtggtgtagcattgatcagtggagatttaatgtcaccttaattactcaacagttttactgttttgctcaataaaatgttttacaaccgcctttatgcaaatagccgcaagccatccttgtatccccttgcacgtctgtatcattggtgtggcttgttgagtacggtggttgtactcagccttactattattccccctttttcagaagtatagtgtttctgagctaaagacgaagttggaggatcaaggctcagaccccagttgagttttgcctgtggagtgaagctgaagccccgctaggatcgccttttccgctgctgctgctttcgcttcggtgcgaggactaagtgcctcttctgtaagtattttatgctttatttacgtttggaactatatattacttgttgttttgtgtaccctggctggtcttggacagggatttaatacacaaaatagtctggaaatttgggttaaatttctgggcgtgacacgcttcgactcgttcgtctcgcctgtatcctcctccgccgcccttccctccccttctccctctagcacctgcagcctccccttcgctcccctctcccagccggccggctggccgcttccctccccctgcgtccccctctcctagctggccagccagccgcttccctccccttgcgtccccctctcccggacggccaaactgtgagcagcggcacctgtgaccggcgccctcaccacgggcgacggggatgtgcaaatcaggtcccctcctcttcttcttctccctctccgtcggcctcaccggagttagccatatctagggaggaggtggtcgggctggtgggttggtggcggcgacgtgcagcggcggtggtggccaagggaggtggtgggcggcctccccataggtgacggggtgcagatccggccggtctccctcctctccctcttcgtcggcctcccaccaatggcgcgcagatccggttggtgggttggcggcggcggtggtggccaagggaagcggcgacagcagcagcgggtggccaagggatcccagctacgactggcagcggcggactgacgatgacggagtgagttcgtgcatcttaattacttatgttattgatctgtgatttgtgatggattggattgttgctgacctgggactttgtgattgtcgttgttgatctgtgatggattttgttgttcataggagatatgtgatggattgtatctgtgattgttgttgttgaccgtaaaattatttttattgatttgtgatggattgcatctgcttcgcttgaatggtgtggctcacaagcatctgcttggcttggagccagcttctctattttttttaatcagggagagagcaaaggtgtcggttctacgaccggcaccaatgacctagtgtcattactgccgagcaataggtgccggcagggaaaccggcacctattgctagttcccaaccggcacctatcagtttctgtactagtgtgtttaggtataaaaaatttgggtgttacataaagtctacctctattttaccacaaagatatttactttttattgttagataatctgccgtctcttatggtgtatatagtgatatatgattttttttagcattctttttttctgaacaacaaataaataagatatctgtgtatttgcgcaggctttctttccagttgttcataaaaaataatcaaatcattgatttcacaaataattgaatgtaacccgtgaaaaaggtcgttcacaaatatacattcgcgggtggtatgtcttgaaggtatgcatgcatccaattattcttcaaggagaaaccaacagactaatcttaacaaagtgaaaagtgaaatccaaagttaaacgggaatgagccacatcatttgacaaatattagccgttggatttactacaagacaaaagagagtgaatgaatcttggaccattggattatggatggtaataaaacacattccggaggtaactactagaagtagaaagaaagaaaggaattgaagggaaaaaaaaccctcgtcctttaactaaagattcattagtcaagattgagctattcagggcatattcaaaatgtatgtttatgtgattacttttgtttgtagcaattattgttaatgtattagagaaaaaattgctacagagacatgtacattccttccaataaagaggtcatcctcacctgaatatatgtttagtgactttcacataaaattaaaaatgaatctaaaattaaaatattttcttaaaaaggtacaaaacctatgaccatgaaaaataagtggaggagaaaaaaaatcatacaatggtaaagacacatataaagacgatgaatcatacctattaaagtttacaataaatattaagccacactagtataggaatgatttttctgaatgggagtcatttttgattgcagacgaactgtaagtggtcgcgtctgtaaaaaaaatatgctccattttcacgtgcggctcattaaaatgaccgcatagaaaaatcaatattcgcaggtgggccacttattttcgcgtgcggacctattaagtgacccgcacacgaaaattgccacccacctttttaatccctccgtcgctgccccatacccactcctcccatctccctctcaaatcccatcgccctctccgccccacacccactcctccctctctccctatcgcccgcctcctcccactccttcctctccctatccccctcctcctcccactcctcccatctcccggtgacggcgacggtctcggctagggcgatggcagcatcggccatggtggcggcggcggagcggatccgtcgctggccggggaggccggatccttcgcctgccaccgcggggaggccggatccatcgccgcgtccgtggggatgatggtggcaggcctcaggcaaggcgatgacgacgacgatggcggtgacggcgacgacgacggctggattagggttccaggcggcttttgatttttttatttcgattttttattttcccgaaaatctcgcagacacctcgttccagatgggtgaaagatccgcacgcaaaaaccgattccgaccgtacggaaaaatcgttattctactgccatttactgtatcagggtaataccatcactcattttaaccaatttttttcgtagtaataagaaacataagaaaaacaaattgtcactctcacatatcacatgacggaatgtgtagagtcatgcaaatatgcgaatcatgggctagttaaaatatgacacagaaatttgaccctattgaaagatcttcatatattatttttccgggactatggttttataatcttgtgcacttcaccacagagacgtgcgtgttattgattcctccgtggggccagaccgacagtgcgtggtaaaaatactgttagaaccatgattattttcttcccagtaacccttccaattacacgcaacctgacaccaacctaaaaacggcgaacatatgttttattttgatctgatcatatcgttgtatatcgttgttattaaaatttttaataaaaattatataattatattttgataaaagaaaaatatatgtttcaaaccgttaagtttcatactcccttcatcccataatataaaagattttagagggatatgacacatattaagacaatgaatctggacaggagctcccataatataagagattttggaggaatataagagattttggggggatgtgacacaaaatccttccaaaatcacttatattatgggacggagggagtacgtgatatcgacatatttcaatgtgtatcttcactgtgtttcataatttttttaaatgtttcagttgctatttttttcgtttcactatatataagttaattttcatttgttggtcaactgcaatatttgatagtccgactcctttttttttttttttttttagaaatcaggcacccaaggtgtagtttctctctgtctttctccatagttgtactttcgaaatctaggatttgaaattttgtatatcaagccactagtctagtaggctattgatgagtcagagctatttcctccatcgtataagattttatttagatttatagtattaaaatatgttatcttttatcaggtttaattttttattgacatacttcctatatcctaaaaaaaagacaaaccctgatttccgtgtccaacatttaaccgtccgtcttatttaaaaaaattatgaaaaaaattaaaaagataagtcacgcataaaatattaattatattttatcatttaacaataatgaaaatactaattataaaaaaattttatataagagggagtactgctatagcctatagcgctgtgccatgccgtgcagcagctacatgcctcctgtctctgtgcgtcatgccgtcatcggtgagatttgaacacatacataatatattgtgtgctccgcgaggaaaacgcggggtgaccagatagccgggccaccacgtctgaaagcccatgtgccgagggcagttgcaacctcgctagctgctaccgcttgccagttgccgttctcccgtgcgaggacaaggcagtacagtacaatggctgtgcggctctgctgctgctgcttcctcctcttcgtcaccatcgctgccgccggtggctccctgacgcggacgaacgtcgcgacgctgccggggttcgacggcgcgctgccttcacgcctcgagaccgggtgagacaactcaagaatcattcccccatctgctctgacgattttccatgctccctgcatcagtataggtgagaggtcctgtggtgtcactctgtacaggtacgtgacggtcgacgaggagaacggcgccgagctgttctactacttcatcgagtcggagggcgaccccagcaccgaccccgtcctcctctggatcaccggcggcgaccgctgctccgtcctcagcgccctcttcttcgagattggtcagcaacccaacaacaacaagcctccttgtctagagtgtcaggcgtggttcatcccgttgcaattattaccacgcagggccgttgaagctggtcatcgagccctacaacggcagcttgccgcggctgcactaccacccttactcgtggacaaaggtcgccagcatcctcttcgtcgactcgccggtcggcgccggcttctccttctcaagggaccctaaggggtacgacgtcggcgacgtctctgcttcgatgcagctcatcaagcttctcagggaggtaattcattactacctggttttttttggtccattggttccaggttttcagcgtacttggttcttgctagctcttggtttaatatctcgtttgactctgattcagtggttcactgagtatccgcactacctctcaaatccgttctacgttggaggagactcctatgccggaaagatcgtcccgtttatcgtgcagaagatctcggaaggtgctgcaataatgttaccttggttactctttaaatctcaaaggaatatgctcttgttttcttatgtgtgatctaaatagttatataaaaaaatcattttataccactgaatttattcaacgatttattattgacttcatctccatctatggtatatatatctccaactttactttttctataatatatcattggggctgatacttttcaaaaatgatgcttaaaatgccttaagacttacaagagtgactattgattaagcaacatgaagatatatatacatatatatatatatatatatatatatatatatatatatatatatatatatatatatttacttacatagtcttcttacataatataatatagaagtttttttataactaatatagaagtgatatattatagagaaagacaaattcgatgaccaactgttgaactataataaatttaatggcatagaatagattttctctgaaaaaaaaactattttgacaagttagattaatgtcataaaattttaaatttgattttacaaattagcgaaacaaatatgacgtgagcacacgtatacgtaatccattctttttggtatgagttactgatactgaatttgaactcccacatatttgtggataaatatattactagtagtgtgcctgtgctaatatatcctctaattctttttcaaattctttcacaactatttaaatacaagcaacaacgaggggaaattgcctaggattaaaattccatttccagatttctacaggatctcttttcaagatcgatcagttcgcgcaccaaaaagcttgacaattttgtgctctgttttcagatattgaagctggcgtcagaccgacgtttaatctgaaggtagagctcatgtctttttctataaagctacaactcccggttaatatatatatttgaggtgttagtgataactagggtgtccatcgaacattaaaaaaaaacaaaagtatatttcctatatcaagatatagttgattatcaacttgagaccaagagatagtttaaaacccctcatttagcaatggatagacaacctgtatcatgatctgtaaatactgcaattttactaacatgttataatatatacaatataggatcatgtccaacattttctcttaaaaaaacatatacttcatccctccttaaaaaacctagaaacggataaaacctagaaacggatggtatattttctagcactacgaatatagataggcagtctgtccagattcatactattaggaaatatcttatccaattctaagttctcatattttaggacggtagagtagttgattaatgatctagcggcaattaattttatgtttgggagattgtcagggctatctggtaggtaatccgagtacaggggaacgcattgacctcgaatcaagagtgccgtacagccatggagtcggaatcatttcagatcagttatatgaggtgaacagtcgaacacgcggctcacaaaatttaattatgtcctaaatgattcctgcgtgatctttgttaactctgattgcacatgcattcacgtggtttgtctgaagatgataatggagcactgcgaaggtgaggattatgacaatcccagcaacgtgatttgccaacaagctttggctaggtttgacagcgtaaggagacaagtacactctttttttttcctcgattgtattagttgaattttcatattatcgaaaaaactatttagttgcatttttatattatcgagaaaaagaatttcttggataattctgtctgaattaacttattaactacgaatgtctaaaaaaatggcgttttctgtgtttctcaagaatatctagtccttttagtgtaatttattctttttgcagacagtagtaacatatatacagtagtaacatgtattactcacacgacagcaaatacatatccacgtgtccatcctgtatgtaggactaacacttttgcccctttggagcaaaatatgcacctgctgttataaacatacataggccctgtttggatccggagagctattaaatagcctttcggaatcttgctatttaggagtattaaacgtagattactgataaaacccattccataacccctaggctattttgtgagacaaatctaacgaggtatattaatccatgatttgctacagtgacgctacagtaattagccgctaattatggattaatatacataattaaattcgtctagcaaaatagcctaggggttatggaatcgattttgtcgttaatctacgtttttaattaatacttctaaatagcaagatttcagagggatatttaatagcccagaggatccaaacaaggccataacagagatttgctaaccagctgaatgcccgtattttgatagaaaagaaaatatgtgcccgtattaatgtgttatcttgctatagagaatattgaccttaatctaattttatatgtgtagacttgattgtttgtaacttaaactttgtatgatttggaccctagttttcgggcacattatatataggtagtcccaaataaatagcattcacgtgtagttctcaaattgatgaattttaatatttaaactaagaaggtggccagcgcgtatgcacgggcatccatattatttaaatgtaatattatattttgatatgtattataattaagggcaactcaaagtcacacgtatcttaaaaaccattcatcgaaatttaaataaatgatggattaaggtcacatgacttttgaatcgatttaatgataaactgccgtagctaattatctgtggacccctgtttttataacaggaatcattcgtgtaaacagtaccatttccctggatcaagtagtctggtacacgagttcatagctgaaataccaaaagcacatacacgagagtctagtgctaattattacatcataagcccgtaggcattgtcttaaatcatcggaccgagcggtccggaatacatccaaaagcaaaaatagataaggcagcggaattcaggcagcggcataccattgccacaggcaacgaccgtactaagacctactgagcgccattgtcttcatctccctcctggtagtaggcatagggatcctcggaagcttcatctcccgcttctgattaattttatatttgcaagggtgagtaccaaccgtactcagcaagtcaccacagcaacaatgcatatgaaaggggtatttcaaaggatggctatggctcttttgcgctaagccagttttgtaattcttttcacaaacctaagacctagcattgactgatcaaattttagtaccagtgtttgtatttaaacaacgacggttctgtccaccatccattgtgatcccaaggatagcttcccgccattgagtcgttatggttttctgaggacgcccaccttcccccttctcaggaagtggctccaacagcataaaaattcgtcatgcaacaacccatcccacataagttaagaatttagagactagccaagtgtaatacatgtcccggtgctcaataaccgcgagcacggctattcgaatagatttcgttcactcacactgcagtggatgtacactttactcgcactccgcgactgcccaacacatgagcctcgtctcaacacatgaggcgcgtcacggcaaagcttttcgataacctcgcattggcagtatccgctctatgaacttaaatcctcatgcactctaggcgtccatgtttctagcagtgtgaggagttctggcggtcccgggaaagagaagtctcacacatattaaattatggttcaagttaagttctctctctcacacactcatggcagttctaccaacggcgacaccgatgtagggcacgcctctcggccctacctcaacggttgtcccatcgtagcgcacctgcctcactcaggggtgaaccatctatgcagggatactgcctccgctcggctatctaatccgctaggtctatacccattcgagaagtacggttgtacgggggtcgtttcatgcttaacttcatggctcggtccttaattgaccggggacggtactagcctttcccagataccacccaaatcatccgtccgccccagttgaaaacagttgttttcgctttattttcctttcacaaatcatgttatcaatttcatggcaatgtggtgctcatgtctccacatgccgcatctcaattaccttcccaaaggtaattgcccaagcatttagcatttgataaatatgagtatgcatgatcctagaatagcatttctaagcaattgtcataattgactagggactcatacgtaaacatggttacgaaggaataagggataaacaataatcaaggcatggcataatcacaagtaggatgttcatcattgcatgcaattttatttataaacaaaataatttcgcaattgggatcaacatgttcaaggaatagtgatgacttgccttgctcaaggtcttgggggtcttggccttcacttggatccgcaactccctcgggctctatagttacgtgcgaaaattgatttggattcgattagaattcaaataaaaatccaaatggaagtcgaacgcgaaagtcgattcttttatattaactttactattcgcgtactagggcaaacccaatttcgatttgtatatcctaaactattttgtgggtataaatattttgttatcataagtttttaatttaatctacccgagcgttatatccatataataggttggaaatttctatcgcaagctaaatatcggacggaatccaaaaattatcttataatattatacgatttaattttagtctaggactaaacgactaaatataatatacgtctaaaattcctagtgattaagtccgaatttctaccgtgaatcaattacttatagagattacccaaaataatctataatagtctataagaattcatctaatcgtttagttcttaattacatttaaactactaccgcgaattgatttcttgtagaaattaccaagaataatccataatttatattaaatttcgcaattctacgactataactaatctataactaaattctaattattttaaatttttaaaacttccctaatctccctctaatttcctatttatttcccttttctttttcttcccttctttttctttttccttcctttctttttcttttctttttttttctttctctctctcctttcttttcttttttccttctcactatcccttttcttttctttttccttctctctctccctcccggtttctctcctcgttccttcttctttctctccctcggcttctcccttcctccctctccctcggctctctctctacccggcggcacggcgacaaacagggggggaaggcagcgactcaccgacggcggcggcggcgacgacggcggcggcgacgacggcgcacggcgcggcacagcgcggcggcttcgtggcggcggcgcggtggctcgaaggcggcggagcggcgggacaacaacggcgacgcgtggagatggggagggaaaagggagaggaggaggggatggagtggggagaggggagaatggtgggcctttataggggaaagagaggataagggggagagggaagagaagggaagggcggtggagggggggtgaggtgacggcggcgatgtgacggcgcgcggcgcgcgggcggagatgacgacggcgcggcgcggctcggggcgcaaggcgacgcagcacgtggcagcggcgcggggcgcgaggcagcgggtgcgaggcgacgggacggcacgcggcgcagcagcggcacggctcgaggcggcgatggaacgcgcgcgcggcgacgggatggcgacggcgactgcgcggcagtggtggcgcgcggcgcgaggcggcgatgggacgcacgcgcggccctaggcgggacgcgacggcgacggcgcggcagcggcgatgagatggcgacggcgacaggcggcgatggcgacggtggcgcggcggcaggcgatgatggcgacggcgcgcggcggctcggggcgcgaggcggcgacgcgtggtgacgttgccgagagagagagagggggaaagaggagctgggttaggggaccacgtcgaacacctggcggccgatgaatagtgacttttcctatttgtcccgattttagtgtattttccatataaattttattccacaattcctaattttgcatatatgcattttactcaatatttgtgttatcttaactaatgaattcaccctagattaatattactcatattttatttttatataatttatttgagttttaattagggttaattcttattccatcgtatttaaatttaattgatccaaatatggtcgcgataatattttatttatttctatccacacctaatctttattttaatttgtatttattttaccaatttgtttgtaaggtttattcctaattaactattctttactcacgattaataatcttcgagatcaaatccagataaaatagacgaataagatcggcatgatgcaattaatttaaaaagtttttgaaaatccgtatttttagagttttgattttgtcggtcgaattttcagggtgttacattatcacttctaccatctgtacacatagagtgtaatatggctataagcaaaacttgtgagactaaggaaatcaaagttctttgtgttgaatcatttcatgaaggcacatgatacagtgacaaccaaattaaggatagattatatgttggattttttttctacgtagaagttcaactagttcaattttttacacagttttgaagaactttaaaggtatgttagaacacataacacccacacaattgcttggctggtaatgcaaaatattagcaattgtttcaagctaattactttgttttttcatgcttgattgttttctttgaaacaacatttgtttgaaataagatcaatagtgtataaatttgattagtgtgtgtagtgtacttataaattttgaagtgttctacagtaaagtttgcttttgtcatgtagtccaattatatcaaagaatatagttttatcatgtaaattataatcaataagttcaatataatttatatcatcataattaatgaaacttatttaaaaaatatgactacttaaaaaactatggttcgcttttttttttctccttatttactggtgcctttgtctactcggaatcaaagaaaaaagtaacacgtcatgccatagttgatatatggctatatgctatttatcagtactctatgtccactcattgctcagtagtgtcttccactcaccaatcatcttgtgataatcatatagacaatatttgtctatttgtttagtttacctaaagggcaacaccacattgctcctttctcatgcatggtcgtagactctaaaatgatttgcccaaagcatgttcttcattaacacatgtaactagaacattaattacataatattatacaagtgtggcacacttggtaattttcgttctagtttcacccctgttctggaaaaagtgctttaggaaacaatatatacataattctttttctgaaacacatcatttaggaacttgggaaatgtgcaaatgaaaatccaaaatccattaggtaatcaacccttcattttagcttacactgagttgcattttgcaaaaacttgacccactggacttgattattttccttttgaaacacacgtccaatttgttttcactttattaacaaaacaatcattattgattgatgatttgatgtgtcctcaccttggcaaactagtagcgttgtggtgatcctgatcaccttagtttccttgatctggtgcgttgcattgttgtatgtgcggaaggcaaaggtgtacgcatgtattgtgtagaggaacgaagaccaaatagtttaactaaaaaatagatccatcagtttgaatgaaaatcgatgaccaaatagtttaactaaaaaattgtatcaaataatgtgtccacttgttggtttaagtataaattagttgatataaattataaattgttaatttgatagatataaaatataatggtataaacttcagacaatgtattatttggaaataattagtccaccagtttaagtaaaatattatcttatattattaatttaatgggttaaaaatataactttataactttatttttaaacattgtagagctaatgttcagttatatttatttgtaaagtgttactttatgattatatatatagtatatgtttgtaatactatattttttaaatttattatgactaatataattattttctcacatatacatgaaaaaaggtggaaagaagagggaagctggtgtatttttttaattgatgtatataatttgtgtttttagtttttttggctttaacgttcattttttggctttaattgatgttcatttttgtcttctcacataatgttttacgatatgtatgtactttgtattttgggtttttttacgagcaatacttatgtgaacaggagattagaagaagggagttttttaaaaaatatatctaatctaacgggtccatcaatttatgtgaaaattgaaactagatgttttgcttttttttcttagaatttcaagcaatttctttaatttattagagtgccacgtgacggcttaagagcatttgtagaaagtttaatgaacttttactatataatagatagataatttaaatatagaatgctgaagcagtgttgattggatattttatatgcaagatctagtttaactgcatatatttatagagtaatatacattatttctaaatagtagaaaatactatttcaaagctcatcgattttttttcaatgacactaagtgttttttttctttactttatcgcttaggttaatcgtttttcttttagatgtatgttcgtaatacttctttttctttttccggcctataagaggaaagtattatcttttaaaataatacatctaatctaatggtgtaaaatatcgggtccatcaatttaaataaaaatcgatgatgagattaaacaatgccatgtgacgatctaggagtgcttgtatgagcgctacatgatggttttagagcgtttgtagattggttttagagcatttgtagttagtttaatgtattttgaagtatataatagatacgtgtcagggctgtgcaaccgtcggttttaattactgtagctttctgtgaacaatagcagttcatattggtacataagagtcctgttataatcttagaaacacggttgagacaagcatggtggcccaaataccaccataatttattctatttgtccttctcccattatcaaattttttgtcacataaagtagctggccggctgtgacgtttgggccaacttattgaaatagataggtggcttgcttgtcatatacatcctccgtttttggaaagaaaaacaatttttaagaatgaatctgggcaaatgttcttttttatttacaggtagtaccttaggatgaaatacggttcaatgatagggaataagatatggcattgttatcctactaggggtttcccggattatctatatattaatcattgtttttgagggtggaaaactatatatgttaattaataaatcgatagtgacatattgttgtttcactgcagctactacacgaaggttcgagggcccaaattttgaacccaaattgcatttatgtgtcccccaagccaaatcatgagacaatcgacagaaagatcttgaagggggagcatggaggactaaaacatccacctcctcaaccttcaataaaatgtggtgtaaggaactccactacacgtaatatcacgtacatatttctatatatatttaagttcatctgaatctaggtgaattttcgcatccacaggtctatgccaactatttgtcatatttttgggcaaacaacaactttacacgaagaactctaggaatcaagaaggtaatttcggggcaccttttcatttctaggaatcactcctttgcatttgccatacgagcacatttttcaaattatctaaatgccaaatatccagggcaccataaatgaatgggttaggtgccacgaacatgatctaccatacaacatcgacatcaggagcagcataaagtatcatcgaaatgttacactaaaaggttaccgtgctttggtatattggtaataaatgttattggcaagttctcagtagtacctgtacaagctattatttagaacatttcaatagaatatccaaactagatgagatggctatgacaaatatatatatatataccttagacaagtacatgccatggctatcacaggaaaagggagtatttcatatttttgataaatattcttattttttgaggaaaatataaatagtcttattatttcgtcattaccagctagagatagcattgtaactatgttttgaataaaagattgttcctaaattaaacctatacttaaacgtgttctgttcatattatagtcttggttgttcatatcagttcttgtaaccacttggtgagaattgtacttaaaacataaataaatcatacacggggataaatcgaggataaaccaaaccttctgttagaataaataaattagagcccacctcaatattgactttggttgtgcagaactcagacgcacacaaaccaatttatttatgcaaaattctccttttgttgaataaaatattagaaacaattaccaggaattgattttacaaattgatcccatcaacacgttggattatgaagcagattactactatctgtaccaagggcagatattttctttatttataaaaaaatggacagctgaaggaatttctggatgtgttacataaacacacaaacattaacctcaattgaaagaaattgtattttttatatatatttcagcatgacatttcaaaaaggaattagtgaaaaatccttttgaatgaagctattcagggaaaaaaacatcaaatttgcaggtccactcttactaacatttcgactttaaaatcttttaataggaaaaactagtggtcattggtgaaagtaatgttggatgacagaacaacatgttggatggaaactactaacccaactaacaacgaatgtgtgcatctagcaaaaatctcttgatgataagtaatactttgattcactgtgttgagctacagacacatttttaccttcttaagatatacccagtattgtaaactactgtttcatcaaatttatgtgcagtggtgaccacgatgctgttgtgccattcctcgggacacaagcctgggtgagatcactcaactacccaattgtggatgactggagagcctggcatatcgatggccagtctgctgggtaagattaatgttgcctaattcgttttcttgtttagttatgtataacactactacggggtgattaataagattttcataagtttaaaatacactgtgtttttcagttcataataaactcagtcgaagagtacattacctgaaatacgatttatttatttgcagattcaccatagcatatggaaacaatttgacattcgctacagtaaaggtgacaatatatctgtctacaaatgcatgattcttgtttttcaaaaagcaaatgaaacttttcttttttacattcattatttttactatggttattttgaatgaagttaattaactcctacagtttcaaacagtttgggagtatctaggttctaatgatttgttaaataccagatgcaaatgtttggttgcagtatgggttgaaagttgaaactgcaaaacgaaaattttgaattaagggtacaagttgtacactccacattttcatgaatgaaaacttcatgcatagtgatgagtaaaaataaatccaaccattaatgtaataaagctatgtttgttattaaagataagtgaattgttcatgcttgttcaccagcataacttttgaatgaattggcttggctggtgcacagaactaaatttacgtactattagagctagagatcttgagtatgaatcactagtgcaatccatttattatatactaaaagtccattaaacatcatataaatgctcctaatacgcaagtagcactcttacaaacaatactaagatgccatgtgtactccaataaatcaaagaaattcctaaaaaaaaaaatccaaccattgcatttcatttaattgtgtggacccattattttcatgcatttgatttattttagattagaaaaaaaacacttcccaacccaacgtcccttccatggccagcacgtatgtcgatggaaatgcgtacgtactaactactaacgtacacaactcccctcgttatcttactcctgtttactcttctatttacgtgcaatattagttaggaagcataatttctaaaaaaaaaagtttaaacagctataacatctaagttatatagctaataagctaattatatgttcctaggttatttatgactaaatttacatttaaagacacatatttacttatatttcaagtttcaaaaaaaatatgtcacttctgtcttattttttttattttcgtgtgcaattaaaaaatattaaaaaaggaagatatagattttacctttgtacgtaacttcacaatgtctttaaaactagaaaaactctaagaaattgtgaggaaataaacatccaactatcgatttttcactaaaatcgatggacacattgttttcaaccattaggtatatttttagagaaatcgcgatcatgtgtcatgtcttacgaattagaaaaaaatatttgaaattatcaagaagaagcatcaggttttcacttaaatcgtttagaaaaattagaaatacgaactactttctactttatcctactcctaaaatgcacataaaacttgccccgccccctctcctcatgactcagtctctccgatctccacctctacctttctccttgtttctatcaaactaaaagagaaacgatctataacattaacatgaccataatatttaagccatagatctgatttctaatctaactattgccatattcataactaaaataacagttaaatgtacacaatgcctatatttctaacttaaaataagaaccatgtaaaataaaaaaacagaaaatagcaaatgtcaatacagactaagttgagccatttggagaaaatctaataaattcgtaaaataatttggtttttaatttttcacttaaattgaaacaaccatagctttttccattgccataacaattttaagtgcatggtcaacatatatattaatggcctcccatctatcctatagcgtgacataagttgacaaagtgtaattataaatttctccacatattatttcattatgtggctgggacaaaagtgattttttaatctaggagacatttttatcatttaaatatattaaagtttacggtctatttcacgtcatagaaatgataagaggtgacttcttttagcgacttcttttagcattgctttcataaaacaataactaatatgcccacgcatctgcaccggcttccatcatagttaaataaaaaaacacagcccacttctatgagttgcttgtacgtatagcattggggagtgttgaagtataaaagtattattctctcttcctcattcagcttatgtttttcaatgaccaaaggcagttgatgcaactcaacacaaatatacagcaaaattacagcctaagaggcacgctttgaccgttttcgtataatggaaacaaatccaataacatatgctttgagctgaacctaggacatataattaatttattttatttctagcattcaaataatcaaacaacattgatgatgtaaactattcctttagtggcctctacagcaaggaacttctatatctaacccgtagtcattattaacagttcgatgaaagaaaccagttatatttcatccttagtcattatcaacgacaagatagaagaagaaaaaaaaattcaagaacttgacaaaagaccaactaattattgtttgtgattttacttgttttgaatatgcattgtaatactgttttactctctccaaatgtagggtgctggacacactgcaccagagtttgagccggagaggtgctttgcaatgtttaagcgttggatttccagcataccactatgatgatggatgtgcatatcgtgtaacttgcacaaatggaggattgtagtatgaatgtcatgggtgaataaaatcaattcttttttgggaaggctcaaaacaagactattttttgtaaatttgattctttttgacgagacccccactaggttccaggcggaccagaagtcctctcacctacaaaaatcgctccttggggatggttaaggggccgcatgcaaaaatttatttcacaatcgtctccttaagaggtccacctatgataataggtggggttgcccgcgaaagtatattttcgcaagcagacaacatggagagaatgtgtgccccatgcgtccccgcactgacacgcactaccttttctttcttgatcttcaccttttttacacctcctctccactcacacacacctttcttctcttctcctcccctttgctctggtggctaaggcttcacattccctctccactccctcttcctctcctcatctcttccccattcctctcccccttctcttctccggtggttgagacggaggcagctaggagcgacgctgacggcggcgacggtgactactgtgagggcggagcagaaggaaggtcgatccggtggcgccgcccttgggagcgtcatatcaaccgttagcatcacgaggtcgataagcccctcaactgccacttagtcgtcacattccaccgctagaacgcacctccctctagccagcaatgcgtgcctccccaggtcaagccggtccctgtccgccacctcctccgtctttcctgtcaccggttcgccactatcgacaccgacccggagccgtcgccatcttcctcgcgtcgccatcgtcctctcatcattgcccgctgtcgtgagccctcggtgagccgcccctcctcttcctccccttctgccgccgctccgcgcaccctccgtcgcgccagatggtcgccgtctggcaccatcgggctgtgcatgtcgcaccctcacggtggggaaggccgaccgcaggaagccgcttcccagccgtctgatatgccccacgacagatctaggccgtccaccttgccgcccgtgtggctgctgcgtcggcacaacatgtgcaccacatggtgcacctgtccccagcctagtggacttagtccactgtgcgccgccctccttatgtcaacaacgtgtgcggcccgcttgtcggtgctggcctccattcacttacgtcagtgctcgagctttcatgcgcaataattcataaagttttttttctattagtatattcatccgagctccatttatgtcctttcaaatcgcactgaattcatcaaaatgcctagaattcatttaaaatgtttttattttccatttcaaaagacttatagcatgtttgctttgtgtgcattgtttgtctcttagattccatcagttgtgaacccccgttttacttcaaagtggttgcagaggtttcagcagcactagagcaaggcatgtcatgcatcctcattaaacatattgtacccatctaacaaatgtctcgctttgtattaaatactgtattattttacaatgtcatgtggggtagtttcctacatacttagccacagtttaatcatcttgtaccattgataagttgggaattaatatgactagatgttggtttaggaaatgcctagccatgcttagatcaactacctcactatgggaatctcacatataccttatttcttggattaatgatgatgacattggacatggatcaacatggtattaattcaacgacaatatgcgtaatggtgggctatgggcatatggttttgatagaagcgcccaggcagctaaggactagttcgtgggaaacaactgggtctgtagtatagctcttccctctataacgtatccaggcaagggttggcgtgatggagttgggttggccctggtttaagcgttgatcagttgcgagattcatcgcggtgcacatggggttgcccacccctatttaaaggtggcggttgttggtatttcttacgttcacagataaatctgcaagcgcacggatattgttgtagcattttacccatgagtattcccaagggtatcgtatttatattctgcaggcacggcggcggcgtaaagatataaattatacatcattcatctatctacaattaatccaccatagtctaaaaaggagttaaagataatatgattaaggtagtggacacacagtatgttcacctctatattaatgcttagtagaacagagtattagagaactatgatacaactgtacttctatactaatcatgtctaatacacacttaacatatacatgcttacaacataggacttagttccaggcacctaggtactaccgagagaccactccctgctagtctgcaagcgtagttattgcatttacgcaatacgtcacacccgaacgtggaggaatacaaatgatggacatggatatcaccacctaccatctacctcacttttcgtggggcacacccacatccaatggcatttatataacctaagcactgtgcttgtgctagtaaataatgtcacttactcccctaggactcccaccctacgggtagacaagttagcgctagagctacctataaaggtcattagaccgttactgtagcatggatcaactagcctagctagaatgaagcagttatacaaagtatatactaatatactgcctggtgggcccttccatccgcgtgctcgcacatgattcgtcggaggtgtgtttctttgcatgccggcttcatttttccttcactttgatgtatattctctacatccatgttaattctctaggtccagtacatttaatttatttattatctattatatactaaaagtccattaaacttcctacaaacgctcctaagccgccacgtggcgctctacaaacgctcctaaaccgccacatggcactttaatatagtagagaaaatcttaaaaattctgataaaaacaaaatacatctaaccattgattttcctttaaataggtggacccatcaattttaaccattagttctctattaaaaaatccggtacaacaccccgcaccgtatttgcgcacgtacgtaatccgtactccctccaccctccgtatctcttctcctctcctattttctaacttacctttcatatttttctagctaacagttaatatataattgtaattagatagatcataactctcaaaagttatcataaaagaaaaaagaaaaagatccgtccgtcgatttcaactaaagctgatggatccactatgcatgtcaaacagttagattatatttgtaaaggggcaattgcttatttgaccccgttttgaaccctaactaccaatttgaccctactttgttgagtttgcttatttgaccctcctttttgaaaatgaagatacggtataaccctattctgttaaaggcacctaatggtgttaactgaagcacaaaatgtctcttatgcctttaatgatttgaccctattacatgtgcgacccacccgtagttctctcttctcatctcctcctctcctctcttctctcttcacctctgcttctttcctccccgccaccccctcctccctaggcgcgccggccccgtcaccactgatctcttcgcgtgtcggcgccgctgccgccgcctctctccagcgcaacgccacccctcctcccaccaccgcgccggctgccacgacctccctcctcacgccgcccccgccgctgctcctctctccgcgtgccggcgcccccgccgccgcctcctcctgctggctccccgcatcggcgtcggcgccgccgccgcctcctccttcccagtgccgcctccaccacctccttccccatgccaccgacgccgcggagatgtcaacgagagagggtcgggccctcctccccgcgccgccgcctcctcctgctcgctcccctcatcggtgtcggccgcgccacgcctcctccttccccatgcgtcatcccactgcggggcgcaggagctagggatccgctgccgcaccagctggggatctgccgtgatgaccgggcgccggcgcggatcctcctgtctcgccgccgccgcgcacgcagagcgccgccgccgccctcctctacctccacgccggcgcgaggttccgattcacgcagccaccactgccccctcggagcgccaccgccgccccctcagtgctgtcgccgcaattggcgcaggaacgagagagagaaattctgggtattatgaatactggttacatttctttttttattttaaataaaaacttaacggattagtggaagcagggttggactggagcttcgttttgaaaaaggagggtcaaataagcaaactcaaaaaaaaatagggtcaaattggcagttagggttcaaaatggggtaaaataagcaattgtcccatttgtaaaataacaggcctatgttcggccttggagctattcaaaaataacgaacctttttctctctctctaagtgtacctacatatgttaggatatgtttagatcccactttaaattttttcactctatcacatcgaacgtttgaacacctacatgaagtattaaatatagactttaaaaaaaactaatggtacagattgggactaattttcgtgatgaatattttaaacttaattgctctatgttttgataatatggtgctattgtaaacatttgctaatgacggaataattaggcttaataaatttgtctcgtggtttactaacggattctgtaattagtttttttattagtgcccaaacaccccataatcgtatataatacctgatgtgacacaccaaaactttacacccatggatttaaatacccccttagtcaaaaaataaagtgtacgtatatagtgcaagagtataccgtggttaaatacttaaaaatagtattcaaataaatataacttcttaactgtgcatgcaatttccaactggtttgtatttttatattatttttgattaaattaataatttaagacccatgttaactatattttgattatagttatgatattctatgcatcacagttatgaaatattttctaaataaatacgatatcaaatgtgctattatatattaatctagaaacgtatatgtagttaaatttgatccatgataacaatgatgacgatgctctacgtatttccatggtgtatataattttttaagtagtgtcaaataaccaactacactcatcaaatttaaaagatgataaatgtttatatactactaaaatttgatagtataatttaagtgtaccaattacttaataaaaatgtgtctccactaaataaaaaatagactcaaaacacgtaatgattccctcacggatacaatattcttttgttgatcttccctatcttcaatttgtctccgtgaatcttctcattgtcctcccttatagtccccaccaattcatcccataataaactatcataatatatatgcaattaaaaaacaccttactttttacttctgttgacatgttttccaaagaaaataagtctaccttcttttcatatgaagaagaagattataaataattgcttacagacattacttaaatatgatataatataaagctaataggttagaaaattataaaaacatttaatgtcgatgaaaaaactttatggagaaattgtggcagatgttctccggttaatatttcgcttttataagtgtctcaaacttagcatacgatatatgcccgtgtaaatgtgtgggctacctttctagttgttataagtgtaagaaatattagttatccttttatttattatgatagttgacagtcgaaattggtacttatcgaccgtcaacaggggtgaaacctcaacgtggtaagcttgattaaagggagttgtgtgaagggtcctgtcccttttttgatatgttgttgtggcatgtcgacgcatagaaacgtgttgtttggctatgtttcatgggtacagtctgcactctgtttgcagatattgaagatggggtcagatcgacgcttaatctgaagttagttcacatgtccatatttttctttttttctatagatacattcaggtgttttacacgcgatgatttaattaaataataaataagtggtgttagagataactagattgctataggttgtcgatcaaacataaagaagaacaggtatccttacccatatcaagatatagtttactatgggctcgtggccattaattaatttgcaatttgggagatggtcagggctatctgataggtaatccgccgcttactggcgaaggcattgtctacgcatcaaaagtgccgtactgccatggagtcggaatcaattcagatcagctatatgaggtaagcacttaaacacgctgctcgcaaaattttaattatgtcgaatgattcctgctcgggcttgattaactctgcttggaaatgcatatgtatgtgatttgtctgaaaatgacaatggagactgcgaattgaagttgatttgcaaacaagctttggccaagcttgacagtgtaaggagacaagtacacttccgttttttcgcgattgtatgagttgaattatgatgacaattgctagcaggaaaaaaaagaaatttccctgataattctgtcacaattaactcattaattgcttaagcctaaataacatgtcatttttttaagtttcttcaaacaaatacatacacaagtgtccaacctggatagctgaaacaggacaaacactttttccccttggagcaaatatatgcaccggtggttataaataaactaattaacattagacagaaaattaggggattgtgatcccatggatgaatttttttttcttccaagatttggaccctagttttcggtcaaattctatataggtagacccaagtaaatatcattcatgtttagttctcaaattagtgaattttaagatttaagtactggtgtgtcaggactatgtaaccgtttgttttgattaacgtagctttctgttaactatagtagttgattggtatagatgcgtcatcctgtgatatataatcctacaaaacactcatgttcagacaaaaatgggtggcccacgtatatacctccatttatcatgttttcgccgataaagttgctgcagctggttgtgacgtttgggccaatttattgaattaagtagacatttttgggttttgcttgttatatctatgccacctcttatccacgggtaattatcaaaatctaaacacttcatcttctcccccgtatcattttcataacattttaacattcattatttgtacaatattttacatatatccatcctatagcctaatgattacaagagcctcagtagcacctgaggtcctgggttcgactccccatgggagtgaattttccagtatttaacggcgttgtgctttcagtggtaggcgatgtacccgttgacaacgaggcgcctgtggggacttcgtcaatctctccaggatttgctggcccaatcttcgaagatgctcataagggtgagtgtgcgtgcgttgtgagtgtctgcattgtactgtgtaattctaaaaaaaaatttacatatatgcatctattaataccacaacaaaacacgaggtatcatccaataggaacgatgaaatgaaccaggttcagtgattggaaaaaaagtacttaaaaacctatgtattaatcattgttttgaagtgtagaaactgcataaatcaactactcctttcatgactctgtccctccgtcccaaaagttgttatattttagaatggagagagtaataaactgatcatagctaaacattagattggttagtcatatcaaactggctatggaagacattgtgggcaactttttgtgacaagtcgacaagcacgattgcagcacctaaacaccttgcggtgatatggagtcaccaacctcctcgatctagccaaatggccaaatcaagatgggttatgtagaaaaacaactaaaccggctaacggagccgatttagagatcaaaatcagcctctaagccggtttagatcgatatgaggataattacatgtttcgtgggcaaaacgaaaggttttcaggacaaacctacaaagatgtgtcacactctcgcagcggcggcggacaatttacggcacaaatcgacaaagatggactaaaactagggtaaaatagaaaacatagctaaaaagtaaagataaaagaaaaagcgattcaagtatattgtgtgtatgggagattacaattgaaccggccttgtcccttaaataggggttggtcttgccctctacaggctctcctccatgtccaacttggtatagaaaccaaaggaaatccaaaatatgccttcccaagcaagaaaacccgagacccgacgaaaacatactcagactcggaatctgacggtctgaccggacccatacctgcggtcagactggagttcaagccacggtcagaccgcccacatacctacggtctgaccggccccgtgaaggaaacccgacactttccaaactttggcaattttcccctatttcgtgcataggtgccaaatttcggtgtaaacagacatattgttgttcaactgtagctactactacaccacggttcgaaggcccaaatacgtccccccctaccaaaccataagacaaccggtagaaagaccatggaaggactagcatgttgcactgaggcaaaatatgttacaggatatccagaaaatttgtaattggctagagaacaccgcaaaaacgtgtatcaactatagagcaccgcaaataactggtaattagctgcttgttggcgctgttaatgacaaattttatgccaccaatacctgcataaatcaaagaaatagaacatccaatatagtgatagcgttaaattctaacatattccacaaagtgttagtgtatatttatatgcaggtaataaaccgccaaagatggatgaaatatagacttaagtgaaggagaattcccatccatatcaagagtgggccagaaactatcagaaaacatattcaattgggccttccactcgtagatatggatagtggaggaggaggagagacaacatgccaaaacttgggcctgttggacctggcctgggttcggccgaaccactcccacggcagttcgatcaaggttttggcatgaacggtcatgggttctgccgaaccactccaacggccgttcgatctaggttttggcatggacaatctggatgaactcctgatagcggttgaagggcaaaaaggacattttgtgttttctaaccgtcatacctacccttatataaggacttcacctcttcacttcactcacacactgcaagcttgtcacgcccagaagtttccccctttttccttgctttaaatatttgttaaataaatcgtccgaagaaattatcttaattaacctagagctaattccataattaataaatgcaattaataatcggaaatagcgtggtggaatttttcttgagttccccatgctccaatgcattaacaagatttttagtggaattttcagagccttggaaataattttaaccaattaaaaatcaccaaagtgcaatatctaatcccaggaaaatccttctcctctttttcttttcttttccttcctttttctctagatgggccatcggcccatctctctccccgcgctcggcacccctttcctgggccggcccgctcctcctttcccctccccgaagtcctccctccctccctttctctttcgggtgccgacaggtggggcccacctgtcggtcgtcccttacctctggtcgttggagccggagctccaaccgcccgcgccgccgccttctccgctgcacgtcgcgcctccactccgcgcccgcacctcgcgcccacgtcgccgccctctcccccgcatctcccccgcgcgcgcgcacccgcaagtggtgggggatttgaaatcccccaacaccctctttctctcctccacctctccacgtcgccggccaaataggggccatccccggccgtttccgcccctccctcgccataaaaaccctcactcgagctctctctctcatttcccccattcaccgtcctctcccacgccctctaccgccgtcgcgccgcgctcgccgagctccgccgctgccgcccatctccggccgcgtgccgtcgccactagggccgccgccgcgccaagccgccgccgcggctagctccgccgccgtgtgggccatcttggccaccgcctcgcgtcgccggaaccccaccggaaccgcatctccctcgcgagccggtgagctatccattcccctccgtctccggccagccactttggtcgtcgcggtcgccttctccatccctaactcctctcctcccctcctctaggtgtcgccgccgctcgtccgcccctcctctcgtcgggtcgtcgtcgccgccttcgtcttccgctccggccgccgtgtcgccggtgagtcctccctccccctcctttcctcaccttcccgcgagcgccggccacgccgctgctccggccatgcgccgctgcctttcggccgtcgccgccgcttcccgcaccgccggtcaccgccgtcggtggccgtgcctcgccgccgcctcgccttggtcggccggtcggcccttaggcagagccgagcccggccggcgcctccctcgcctcccctttgagccaccgcctggtggggcccacctgccaggcgccacctccctccctttggagccgctgacccgtggggcccacgtgccggcgccccccctttcactgacgtcagccctgggctttattgcgcaataaaatgattaaggctttttctttattagtaaaaacacagtttatcttctaaaattcttaagtaattcatccgagctccgtttaagtccattcaagtctcagtaaatcaagaaaaatgcaaagaatccattaaaaatggttttgtttcctgtttctgtagtcttatagcatgttttgcttgtgtgctttgtttgtcgcataggttttggccgtttcgtcgatccgcggtttctcgaagacgttgctgaggtctcatcagttcgagagcaaggcaagtcatgcaatacgtttgatcatattgtacccaatttacaaatatcccgcatttctattaaatgttgcattcttttacaatgtaatgtgggatgggtcctattcctcagccacatattggttacctgatgccattgataacttgggtatcaaaatgactagatgttggcttaggaaatgcttagccatgcttagttcaactagtacacaaatggggatcacattattacatagactttgtctattggcatagctttagattggtgccaccgcaagggtgtcagttaattaaaatattctgaatggcgggctgtgagtgcatggttttgctagtcgcacccatggcagttaaggaccggttcacgggaaaccctgggagacttaccgtgcttaccacaagcgggagtgggtaactgcttgatctgaagtatagctcgaccctttcctaggcaccggtggcgagggtgggcgtgatggagttgggtcggccgaggtgttcggttgtccagctgccggattcaccgcggcgcaagaggggaccgcccactgccttttgaggggtaggggtgaaaccttagcgtggtgtggatggttaggggagggttatgtggagggtcttgtcacgatttccccctttgcagtatcatggtgatacttcggggcatggcgacatgtgtggaatcgtgtcttgtgggtacagttgtacacctctggccagagtaaaactattcgaatagccgtgcccgcggttatgggcgatcaaccagattcaccgtgattagtctcacccctagtttagcttaatgaactggtgtagtttaggtggttggttgggcctgttgcaacgtggtgtagcgttggacagtgattggttaatattgattaattactacagctgttttactgctttcaactactgctttgaaatgcctgctttatgcaaaagaacccctagcttcctttggttatatcctgcatcatacctcctcttccggtatgacttgctgagtacagtgggtagtactcagtcttgctctcttttcccccacaccagagttgaagttcttctcagttggagccgtctcagagaggttggtttcgttgctgccgtcaaggtttgcctgtggagtggagtcgcccgctgctgaagtcaagcttcccggtttagctcgctttaatctttcccgctgcatttgtaatcttttatatttttgtaagacgtgggtctgtatgtcaacaattgtcgtttgtgtaccctggctggtcctggacagggatttaatgcacattcagcttagaaattctggttcaagaatttctgggtgtgacaaagcttgagctgaattataagaggctctattgtactatgttgtatactagaataggaagagagtagagtagaagaagtcggaggaattgcggagttatcgtaatccgctccctgtttctttctgctctgttaattactttgattataatagaattatcttttgagtaatttagtttttctcggttagaattatctcttggttagttcctattcagagtacgggatcatcatacactataatcaactaaaatacagtgatttactttagtgtgtagctagcattaaagtaagtaatttccgttgttttcatacgactattttgtgatacagatcaacaatactcttagtatcagtttttactcttatactatatattgaacacatcagtaaacatattactacatggtggctatgagatcatggctatatcgagaggaaggtggtaattgttttacttgcaaaccacgaaatctcagtttttactcttatactgtgtaatgagcacatcagtaaacatattactacacagtgactatgagatcatgggctatatcgagaggaaggtagtaattgctttactcacagaccacgaaatctaaacaatatttataatattggtaaaagaataactagcgttgtaagttgtagtaattcttttaagaccatctaggtatggcgtcatacgatgtggaggcattggcgtcatatgatgtggaggcattcatgcaagtcaatttgttacttttgattgagcagatgtgggaggctgggactaaatgaaaaacttcacggagtaaattcgttacttttgaaacgtgcagagacactagaaaaacgaaaactcagaaagaaaaactagacggtaaatagtttactaaaacacgaaaatagaaaaactacatagagggaacaaaaaaacaaaaaaatctggatggttaatatttaactgggcccatgatgaagcacggatgagatggaaaagtgaaaaaaagaaacacggaaggtagagtggtaaaaaagaataaaacaaaccgagaaaaggtgggatgcggaggaaaggtggggtggtaaaaaaaagggaaaaccggaaggagagggcgtcgtgcggcgctcgaactaatattccacgctgtagagcgcagaatagcgctacctgtaacttttaatatttatttaataatcaagttaaaagtaaaattgtattaattattaacaacaaataaaattggtttgtcaaactatgttcaaagagaaataaataatgtgaacgatatatatgtgttaaaaatattgtgaagaataatgtgaaggaagatgattggatgttgatttgcataattcaattataaatgatgttgcatgcttgcataagttttgcatataatcattgctagtggatgatgaggtggcatgtttacatgttgagcttaggattagtgggttattactttatagtaagataggataacactagggctgtttccgcttcacgctccagctcccttatcttgtgagctcgccagatttgactattagacatgagaggcgtgtagaagtggagccagggaggttcgagcggaacagagagacgagagggaggaggtatgctgccgcaacccataaggagagaggtaaaggggagaggcagatggcggctagggtttgggggacggaaccaggacatggggattaggtaatatgtgtaaatttttccataaaacacccttaacttctgtttttcatagggcagtcccattttccgttctatttcgcttcgttacgtagaatattacggtttatagagagcatctagataataatgcagaaagtagaaactaagtaccagagatctaaaaaaattaacaaagaaatcaaggtttttgtttttgcaaaacatcaaatgtcgacgcggacgcacaagagctagtgaaaaccactaggcttccagcatcttgttgttgcaattaatagatgggccttagccctctcgaagattaattctttggaaaatcacaaaagcccacctcatgggatggtatgcatgggagtttagtaccacctttcttattctaggagagggggacctccttaaaagggtggatgccctactagcaacttgaagcatgtgaggtggagagaagagggggaacacgcgcgcgtgctcgctcgctcggcatggcatggcagcgcgtctgcacgacgtacgcatcgaatggtccgccaaagttggttcctcacccttgcgtagatgcagcttccttctgcagttttgttttgctgcgggaaatctggatttgtttgttttggaaacattccgaaaaatctagtgcgagaaaacggcgtggagtccggataggttacgcgcgacttatccagttcggttacgtggagtggacatcgtacgagcgccctgatcaagcgacctttctctatataaaccgagccgccacctccacgcaacgatacgaaatcaatctagggtttgcctcctccactatactgcgccgtcgctcgtagtctactccatcccactcgtcagcgtgcactggtgatcgggagagtaggtctccagaacctgtgccttcagcgtcctacaccgggggaaggcggcaataaggtttttgggaagtgctccgtgcgactgctccttgttcgaccacgacggctcgtcttcctgttcgctcgcgtgctgtgcgtcgttgtcaacgcctgcaactgctgagcaaccggtcttccactaccctcggtacgtgctcaacatactgtgcatatttgatttgttcatgttatcctgcttagtttacatgtgtagatctaatgatacgttcatgctagtttacatcttcaatgtcatgatttatttatggaataaattaaatcattatgtgcttataaattcaacaatccaaaaaccttattataggcactgtggttttactatgattggttttgccgatgcactgaagccggataaattcaccggtgtgcactttaagagatggcagatcagggtcactctgtggctgatagctatgaaatgcttctggctgagtactggcaaaactatgggagttcttactgctgaccagcagaaagaattcgatgaggccactactctctttgtgggatgcattcttaacgttcttggcgatcgtctagtcgacgtgtatatgcatatgaccgacgctaaggagttatgggatgcactgaataccaaattcggtgctactgatgttagcaatgatctgtacgtcatggagcagtttaatgactacaggatggctcatgaaatacagaccatggctaaggaactcgaactccttacatgtgtcttacccgataattttgtggccggatgcattattgcgaaactacctccatcttagagaggttttggtactgcactcaaacacaagagataggaatacgccatttagtggttgatagcgtctcttgatgttgaggagaaagctcgagaaaaagataccgcgtctaagggcgatggtggacagtctagtgccaatattatgcacaaggcccagaacaagaataaggggaaatataaagctcaacagaccaccaacttcaagaagcagaagaagaacaacagcaatccgaaccacgatgagtgaacttgctttgtgtgtggtttgactagtcatctggccaagaagtgtccacaacgcaaggggatgaaggcacctgtagggcagacttccaagtttgctaatgtaaccattggtaacactggaaaaggaagcgggtatggtaatttacctactattttttcagctaatcagtctactaattggtgggttgatacatgggccaatgtatatatttgtgctgatgtttcgttgttttcttcttatcaggtagcacgggattccaccgtcctaatggggaatgggtagatatgaagttttgttgttcatggtgtttgcacggtagatctgaagtttacttggggaaatatcgtgcagttgaagaacgtgcagcatgtccctacaatcgatagtaatcttgttagtggctcccgtctaactagagacggatttaagttagtttttgagtgtaataaagtagttgtgtctaaacatggatattttattggtaaaggttatgagtgtggaggcctgttccgcttttccctttctgatttctgcaataagtcggcagtgtggatgatgaggctaatgtttggcactcacgtttatgtcatattaattttcgcttgatgtctcgcctttccaacatgtgtttaatttctaagttttccattgtcaaaggttctaagtgccatagttgtgtgcaatgaaagcaacctcgcaagcgtcacaaggctgccgaggagagaaacttggcacctctaaaactcctacattcagatcgctatgaaatgaatggggtgttgacgaagggtggaaaatgatatttcatgacgttgattgatgatgctactagattttgctatgtgtatatgttgaaaatgaaagacgagggtctagactattttaaaatttataaggcagaagttgaaaatcaacttgacagagagataaaaagatttaggtctgatcgtggtggagagttgttcttaaacgagtttgacttattctatgaggaacatggcatcatacataagaggacgcatccctattttcccgagtctaatgggattgccgaaaggaagaaccgcacactgattgacttggtgaatgccatgttgcataccgcggaactacttaaggcatggtggagggaggcattgttgacgtcgaatcatgtgttaaacagagttcctaacagaaacaagaacaaaacaccagacgagatatggattgggagaaaaccatcactttcttacttgtgcacacgggggtgcttggcgaaagtcaatgtaccaataacgaagaagcgcaaacttagacctaagactgtggacagtgtcttcctgggatatgctcatcacagtactgcctatagatttttaatagttaaatctgaggtacattttatgcatgttggtacagttatggtgtctcgtgacgctaccttctttgagagcttttttttccaatgaaggatacacatagtacttctagccaaccctctgaaataattcccagttcaatcacaccaccagaacaaaatgaacatacacatgaacatgtcattaaggaggatggcagtgaagctcgtcggaggagtgagagataaaggatggctaagtcttttggtgatgatttcactgtgtacctcgtgaatgacactccgcagtcaatttcagaagcatatgcatctcctgatgcagactactggaaggaggttgtccgtagtgaaatggattccattatcgctaacgggacttgggaggtaacagagcgaccctatgggtgtagacctatggggtgcaattgggtgttcaagaagaagtttacgcctgacggtactattgaaaagtacaaggctcagcttgttgaaaagggctatactcagaaagaaggcgaagatttctttgacacttactcacttattgctagattgaccacaattcgcgtactactttccctaagcctcacatggtcttgtcgtttatcaaatggacgttaagacaactttcctcaatggagagctggagggagatctatatggatcaacctgatgggtttgcaattgaaggtcaagaaggcaaggtgtgcaaattgatgagatctttgtatggtctgaaacaaactactaagcaatagcatgagaaatttgatagaacatttacatttgcaagcctccaagtcaatgaggcaaataaatgtgtatactatcgctatggtaggggtgagggagttattctgtgcttgtatgttgatgacatactaatatttgagacaaatactgaggtgataaatgaggttaaatcattctgtctcaaagtttcgatatgaagaagttgggagtagctgatgttatactaaacattaggaaaagtaggggtgagaatgggattacactcttgcagtcccattatgtggagaagatcttgaatcgctttggctacattgacagcaagccttctccaacactttatgatcctagcttgctgcttcgcaagaacaagagaattgctaggaatcaattggaatattcccaaatcattgaacataaggttggtgctgtttcgtggaggtcttcacactgggtggtggtgttgtttcgtacccatgtgagttatactattgtggtaacccagtctatgtgatcggagatcccgtgaattggatcctgggaagaacaagccataagttaactgaaggagagtaccaatataaaccctctctaagtgaagatgcatgtactctcgtgagctgcaaggcaggttggctatgccttaatgagttttgttggctttaatttgcgaagatgctgtcctgcagagcattcttgaaagaactcacctttgtgagcttgactgttggtcgcagtctacggagattttggatgaatcttctaggaagcttactaaaagaccaaggagtatgacttatacgctccaaatgaggggtagtttacagacggtctagtatcagataagactctgagtaaaatttgcttgcacaagacttgcaatgcaaggcatagtccattgttcaagttgtgagtaagtgtagcttggagttctagatggatgttcaaccttaatcggtctccatcgaaccgttggtctataaaaagtacattggaaaaggaaaatctcagtgagattttaagatttggtgggggattgttggaattaacagatgggtcttagtccacttgaagattaattctttggaaaatcacaaaagcccacctcatgtgatggtatgcatggggagtttagtaccaccttgcttattctaggagagggggacctccttaaaagggaggatgccttcctagccacttgaagcatgtgaggtggagagaagaggcgaacacacccgcgcgctcactcgcctcgcctggtccaccaaaattggttcctcacccttgcgcagatgcaacctccttttgtagttttgttttgttgtaggaaattcggatttgtttgttttggaaacatttcgaaaaatccggtgcgtgaaaatggcgtggagtccggataggttacgcgcgatttatccggttcggttacacggagtggacatcgtgtggacgccctgatcaagcgacctttctctatataaactgagccgccacctccatgcaacgacacaaaatcaatctagggtttgcctccacgcaacaacatcgtgcgggcaccctgatcaagcgccgtcgctcgtagtctactccatcccgctcgtaggcgtgcaccggcgatcgggagagcaagtctccggaacctctaccttcgatgtcctgcatcgggagaaggcggcaataatgtttttgggaagcgcttcacgtgactgttccctgttcgaccacgacggctcatcttcctgttcgttcgcgtgctccatgctgtcgtcaacgcacacagtaccctcggtacgtgttcaacgtgttacacatatttgatctgttcatgttttactgcttagtttacatgtgtagatctaatgatgcgttcatgctagtttacatctgcaatgtcataatttatttatggaataaattaaaccattatgtacttataaatttaaaaatcgctgacgtatatcagcacctacagggggccacgctagtcaaaaattgctggggaggggtgaattcccagctacctttaatactttcggttgcaacgtaagacttttaacttatgtggcgaacttatgtggcgctgtattaaatgagagagatgaaaaaaaaacttggtcttatacaacacatatctcaaagggaaaaccaatacactattgctgcccccagttttggaaacaaaaaatatattttgtttccctataccaacccctagaataacagttggtacatacaaaaggctccaaaatgtaacgtacccaaactctagacctttaaaatttcttgtcaagatagttgaaagattacttttatatttttgtgagacaaaaattttcattttaaacataggtgaagataaaaccaacctttatatgtaggaaaatgagagcaaaattaaaacctttttcatttctaacctgagattaaaaaaaagtgcaaccatatgtgtaattatgcatacttgcataggacatagtttaacttgagtcttttttcttgtgcatttgtatttttggttggcatggcataataggtctgatgaacatgattaaaagctaacttcactaagcaaacctaaagtcattcttgaggtataactttaaagacatgaaaatggagttaagtaataacatgtcaggtcaagagaaatccaaatataattcttataaaatttagatgcatttatgcattggaaacacacatataaagaaaggtcttgctaattatcaagaacaatccatgcaagacaaaatcatgagaaaattcatgaaagcacaaatcaatataatcagctcactataatttttactcaaattaatatttaaatttcttagctcaaataattcagtcaaagcagtcaactataggatgtaaaatttaactttaatctgctaaaaacataactcacaaaaatgtgcattaaactgcatagaagtgtatgagtgaaataatttattcacatactaggttaattatcaagagcaaatataatttttctagagtttatttcttctatttagacctcctaaaattcaaacaaagttctggtgagcccatattctctatttgtctgacagcaaactacacataattagtacaaccaaagaaaatagaatctagataatttcatctacctccggaaaaatccactataaattattctgcacagaaattaaataattgaattactaaagtgagggagagaaataattcaggaaaatcgttggaaaacatcttccactcatgttcctacccttacctctcttacccacatagctaccatcgacctgggcccatctagcagctccttggccacgcgtcgaccggtgcctagccgtgtccgagacataggagtttcgagaaatgccatcatagaaacgattttgtaactcaacagcacggaatagacggaaccctaacagagatggtatttttagaataaaattgttagtacgatgatatttcttggaacttacacttgtccatggtgtttctgggacttagacgcttgtcaatggtatttcatagattatctcttattatatatgtaagtctaccgtctattccatctagatatttctttagaaatcgctcatggtggtgctgtgctgtcctgtccttgaatccgacgatgtccctcctcctcctcctcctcctcctcctcctccttagcttattctctggtgtgtccgccgaagtgccattgacgcggacgcatgtcaccagcctaccaggcttcaacggcgcgctcccttcccgcctcgagacggggttcgtacgccaaaagttcttcgccatcatgttctacttgaccatgaccaggtacgtgctgctgctgatgtgagtcttgtcgtcgatcgatcagatatgtgaccgtcgacgaggagaacggggcagagctgttctactacttcttcgagtctgagggcgaccccggcagcgaccccgtcctcctctggctcaccggcggcgaccgctgctccgtgctcagcgccctcttcttcgagatcggtcagcaacccaacagcaaacaagccccgttgtcacccaagagtgtcagatcatgtggtaaattcatcgcgtaagttgcgattaccccgcaggcccattgaagctggtcatcgagccctacaacggcagccttccgcggctgcactaccacccttactcgtggacaaaggtcgccagcatcctcttcgtcgactcgccggtcggcgcaggcttctccttctccagggatcccaaggggtacgacgtcggcgacgtctccgcgtcactgcagctcgtgaaattcctctccaacgtaagcccatgttctagttctacgcaattaattggctgtatttttcgaccatttttgttccaagaaacgcctctgatcgcctgtttcagtggttcggtggccatcctgagtacctcacgaatccgttctacgtcgggcgagactcttatgccggaaagatcgtcccatttatcgcgcagaagatctcagaaggttttgcatgtttcgcagcaattacgactacttcacaatttaacgattccctgtttttcagatattgaagcgggggtaagaccgactcttaatctcaaggttagccatctgtctgccattgattaatcgcagaagaatcattaccatggttaatacgcagtggctaattaacaagtaaaattgcagtctctcgtccttatcgaaatacgtcctcgtgtacaacttgcatctaactgtagttcatgtacggtcgatcttataatacgggcagtagtccaaaacgttaccatcgttcttgattaataatgtttgttcatcatataatagtacaaataagttcacctaaaagctttgacaagtttaattaggactgaccattcgtctatatggctagctatatccatttataattgtaggaactgttgttagagatagcaactgaactaaatactggcgccaattttattcagtaactagtcgaatccaataccaatatccggtctctatatccatgcatgacagattatgtactcgtactaattactttgcattttgagtgttattcagggctatgtagtagacaatccaactacaggcgaaaggatcgactacgaatcaaaggtgccatatctccatggtgtcggaatcatttcagatcaattgtacgaggtaattttaattaactaaacacgcttcccatttattatgtcatcagtccaatttcattcagactgactttttacatttcttaattacaccggccttaagacaataatggaacgctgcaaaggggaggaccacaacaaccccaagaacgtgatttgcaaacaagctttgactaggtttaacgatgtaaggtgacaagtacaacttcattttttatcatccttttgacttctttttcccggttcaaattacgtgcatgggaatttctgttcgaatcaagggaaacgtctagaattcgtccttttggtttaaggtccctaggctttcaccaaagaacagttttgctataaatctatcgtcaaattttttccttaaaatttgacgttttttcaactgtccgattagcacctgattagggcaaggcacatcccacggttcgtgcggaagagacagcagggcgcactgatgaccaagtgaagtactgtatgtatgcatctttttctagctttgccactgtatagaacgaaagcgattgaacgataaaacgtccttaatacgggtcagagatctcccgtgatgtctatttcgtatgagcagcagtgttttaaaagttacatgcaagttacactagaattaatgtaagttacaatgtaaactataattgtactatgtttctttaaaatataaaactacagtcctatataactaaaattacatttgtaaatttatttgacatgacatgcaagtatattgtaattttggtaaaaatattatgtaagtaaatatgtattcgttattttctttaaaatataaaattacagtcctatatataactaaaattacatttgttaattcagttgatatgacatgtaagtgcactgtaattttgataaaaataatgtgtaagtaaatatgtatttgttatttttttttgtagtccgttggatgtaaatctagagatatgaaaaatctgggagatttttttttgttagaaatcacccgacaaatggataggcagaagtctaaactttcgatttatccgtccttagacttctgggctgtgttcgttgatttgggttgggaatccaactcctacacacggaaaacggagcgattcattagcacgtgattaattaagcattagcttatttttctcaaaaatggatcaatatgattttttaagcaattttcttataaaaactttttgcaaaaaacacaacgtttagcaatttgaaaagcgtgcacgtgaaaaacgagggaggtgagttgggaaactggggaaaaaacttagccatgtatcagtgaacttcagaaccgaacaatattcatccctcaaattttcaaaccatatactctagacccctaatcctgaaccacggtggtttcagtttagatggcgcttatatagtactttctttgtcccaaaatataaaaacctataactggataggacgtttcctagtataacgtatcttctactagtaaatgtctcatctagttctaggttattatattttagaatggaggtagtatctcgttagcgaaaatcattcaaacgtctgtctctggtttctcttcacctttcacctttccaccttttttatccttgtgttcaacaccaccatgccctctttgtacccggatgcctgcaacctactggccatggatagaaatagatcgagtaggaagtagtaagtgaccagatatgcctcctcgtttctctgattgatgccttttgtgctccattttgtaattgatctgatctgttctgttatgaagtactagtataagtagtaagtattattttgttgtccgtggagttgagtagattactacatgtgcttctattgtgagctccggctaggtggtcgatgagctcgagctggtgcagtagagtgagaaagagcaacggaggaaaaagcagagtgaatgacattttttttttttgggaagagtgaatgacatgttgaccagctgtgtgcaatttttttatttttcgaactaaccacataacacgtaagtgccacatcaactaaaaccacaataggttaaggacaacctgtataaaattaattgtttaaaaggttgagcgatgaatagtatctggttttaactttggatgtttaggggcctaaaatcaacttattgctatttaaaacttcaaaaagtagctagtatccttttataggtcaagtatgtgttgaggcgtaacatcctgttatagcatcttattacgattaaatgaatactacatataacatccataggaaataagcaacaaatatgggatgattcccgaaaaaaaattcctatattatcttctgagcacacacaatgattcttctgtgctaccttgaaattcacgggaatatgggctactgttccattggaatttggtggaaagctagctaacacgagtattgcattgctattcctaatgtttcactgcagctactaaatgaagtttcaaagccccacattttgtacaagaagtgcatttatatgtctctcatcccaaaatttgagagcatggacagaaagatcctgaaagaggagcttggaatactaaagcatcgacctccgcgcccttcaatacaatgtgttgtaagtagaacttacctcaactatatggtaatggctagttataatctatgtaaagtgagtatagaaataatatagtcgaggaagtacattactttctgaaaatatataaaataatatatatggcatcctttatatcctaaaggatacaggaacagacgcttgtttaattttatgtttctatcttataccaatttagacctgaattaaaatgaactttcctattgcagagctattccaactatttgtcatatttttgggccaacgataacgtcacacgagagtatctcggaatcaagaaggtaaatttgtggttccttcatttttctagagatgaatacacgcttgtttgcagtttacatacaaaatgtatgaagttgtcttcgaattctatacatgctaatatttcagggaagcgtggatgaatggattagatgccacgataacgatctaccgtacaccaaagatatcaagagcagcatacagtaccatcacaatgttacattaaatggttatcgtgctttagtatacaggtaaagaaaaattatcaccaagttacttgctgaagcttacattagttgattttcagaagaaaaaaaaatctgtcatagataaaagtaaatgatgtgggatatgacatagaagaggtgttttctatttgtttcactagtggattactagtaatcatgcatttgcaaggcacgttttggttatatatattgcctataatcaaacatactattttcttatattgcaaatctgacatcaatttgcggaagcaattctacttccaagaggtaaataagtaaggtggcatagttacttcacatatattacaaactttacctcatgaatcaaacttatatggtttagcaatatgaaatgttagaaatagattctgtctaaagaataacaatcattatgcttcgaaatccacatgacaatctgcaaccaccagacatttggtgttatctcaaaagataaacaaatggcagcacaatcttgaataatcggtaagatgaaaaaaagaagagaacttctaaagtcaatcttgaatggcagcacaatccattcgcctcacttgcaccaccattcccctctaactctcctctaccctgcagcgggccgccattccccttcaactcccctctatctgcagcggacacaaacgggcaaccataaaaaaaccaagtactcaaaacaaaccaatccgagacgaaacctagtgtttgcataaatgaagaccatactaatggtaccttggtacctgcgacctaattttccggactacagaaaaggatagttagtaagaacaaatgataaaaaaacatatagaaatttcgttttctacccatagtaagatagtgaataattgaaaaacaatccaattgctcaatccgtgatttaaaaaaaagaagaaaggaaaaagtggcacagtacattatcactgaataatccactcaaaaaaatgaactcaagtaatacactgatttgaaacacatatatatatatatgagccaatgtaccctgacggagatatgggcccgggggtatgtgaagaagaggggaattactttcccttcagccacatgactctgcaagttggccccactcacacgtcacgcgagtcgtggaagcggggggggggggggggggaaggggggcggggggcctcggagcatggcgtcaccctctcgggctctcccgtagcttcgccccgaggccctcacccggctgccatgtggcggagggagagagcgagagggaagcacaggctgaatagccataaatgtgcgacgccccaactgtccctcaccgcatttaatgtggtcagggcagacgtgcggcgcgcctagctgacccctgtccatcggatgtgaccggtctgtgaccggcctgtcaccgtcatgtccgatggatagggcaatcgtgtcctcacgtcgctcctgtacccggcggagtgggggtgggtatgacccgtcacatccgagcgtcactcgaggaagggttgtcgcaagtcatcgttcatttatgagagaatgacagggctgtcccccgtgtcaggcggggggcggcgccggtttccactcgagaaccgtttgttgcttagcttccgggagaaggcacggtttgaagcccaaaaaaagtggagtgggatccccctcctatggagggtaggtagaggcggcgcatgtggtatccccttgagctataaaaggaggaccctgcccactgagattgggggacgactcccagaaaacctgagcttcagaagaaagaaagcgagtgtgctctctggagtgaagaaacctctgtaaaactctaccataatcctaaacacaggagtagggtattacgcttcatagcggcccgaacctgtataatccgacggcgtgcaagcttgccagtaatcttagggacgagcgagtggttttcaagaagcaagcctctgtcttctgaactcacaagaggggggtctcacgattccccgctttcgaggatcttccctcgacaagactacctcctttagatgtgatggggcatatctcttgtgcccagtttctcggaaaataatatatagatttcagatgactggaatcatgtacgtcacaaatatgaaactttgatcagaaaaaagtggaaattcttatgattatgtcattcagagttatcagagcatagtaaaatcctctaacaacaacatgcttaccaatgacagcaaattaggtatgtgtctatgtgaagctctagttttctaaaaaacatgaatatgtacttacctcatgatttcattaaacgcggccactacaaatctttatagtagatgagatcttatacttaatgactgtaacatcaaaatttcagttcaagatattcagtgccataataaggggtgagatttggggtacctgtaacacatttttagcagaagtttttagcagtacctgaacaatctaaaagaacatatacatagatctaaaatatacacaaacctggaatataattttagtgaaggaactgatatgcttaaaatcctggagtacatagccggagaagccacactatatttttagtgaagctacaaataaacaacaccaacacaatagagatgaaaatgattaaaaacatatatcagtaaccccagaacttatatatcgttttggtcttctcttccaaaagttgattattctccaaaaggtcatcgaaaaaattcaagaataccttataaatttgacggaagagaaagggcctgactctaaaaccaaaaaaaactcaattattttagtccattgctatgagcacatgattcaaccgaaaatgataaaaagtcgaattgttaagcattttatcaagtaacccaaaagcatgagagagccatgtgcatgtacctgattaggacacatcagaatatcagaaattcttgactttttggatatcttctcaccttgttcttgttcttgatgacagtggccatcaatctaattacatgttcttgatgtgaaatcaccttagggtaaggattcttcttccctgctataaaaagagaggaaacaattaccaaaggtaaccacctaaatagattgtccagcgaactattaaatacatgcgattgtagaaaaaggaacacatcaacaatattacaggcttttcaaatgtgcacatcttcagttttccttaaaagaagaaagtctgacacattcttgaaatcagaagcatcatgtatttacatctaaagaaaagaagaacaatctgataaatctgcactatgtatatatatcatagaatggaaacataagattgtagtgcgccatgtaaattactgattgacaaagaagcaaaccctgcaaccagagaacaatatgcagattttgtcatttagatagtgaagtaactatctcatgatgtgtccagattcatcgtctgactccatcaaggattcaaagcaaaatagcacgcatgtaaaagaactcatttcatggttcatgtctagctattcagttcttctgagtgacatcactcgtatgattttgctcgaaaacaaacatgctttctaatttgaacacaccgagatgttacatccaatttctgaactttttgagagtaaggaattagaaggttccacataattagctcttatataaacgtgatctcacagcatgctgcatctagaatctgttaaaactgagtcacttgtagttgttcaccttctccaaaaaatatcatgattgagacgttatgtatttatctattgaacaatatatcagcaattcagaaaccggcctgcgtatgcaggttgaacaatgtgattgtgaaactgtaagatccaaattagttggctgcactgcaactaatcgtgagaatggttccaaaattttatatttccatctatatatacacgcgatcattttataaaaaaggttccaataataccacactatgttggaataaatgggctaggcccaatttaattcaattaaaatctcaagagcccacaagtaatgttagagagaataatactgcgaagagtatggaattattcatgagatgacgcctccctattcaccccagtcaaacggggtagccgaaagaaagaaccgcattctaactgagatggtgaatgccatgttagacactgcaggactttccaaggaatggtggggtgaggcaatattgactgcgtgtcatgtcctgaatagaattcctactaagcataaggaagtaacaccattcgaggaatgggaaaggaagaaattaaatctctctcacctgcgcacatggggctgtttgaccaaggtaaatgtacctatagccaaaaagcgtaaacttggaccaaagaccgtagattgtgtgttccttggttatgctatccacagtgtgggatataggttcttaatagtaaattctggagtacccgacatgtgtgttggtacaattactgagtccagagatgccacattttttgagaatgaatttcctatgaaaaatgcacctagcacttctagtcaagaacctattttatcccctgagcactttgtgccgatagaacatattgatcaaacgcttgaggaaaatcctgaggaggataactacattgtaagagacaaaggactgcaaagtcttttggagatgactacattgtatatcttgtggatgatactccaagaaccattaaagaggcatattcatcttctgatgctgactattggaaggaagcggtactcagtggatggactcaattatgtctaatggtacttgggaagtcgtcgagcatccatatgggtgcaagcctgtaggatgcaaatgggttttcaagaaaaagcttaggcctgatggtacaattgaaaagtacaaggcaagacttgtggccaagggttatacccaaaaagaaggcgaggactttttcgacacttattcaccggttgctcgcttgaccacgattcgagtactactcgctctggcagcctctcatggtctactcgtccatcagatggatgttaagacagctttcctcaatggagagttggaggaggagatctatatggatcaaccagatgggtatgtactagaaggtcagaagggaatggtgtgcaagctattgaagtccttgtatggtctcaaacaagcgcctaagcaatggcatgagaaatttgacaatacacttagatctgctggctttgttgtgaacgaagctgacgaatgtgtgtactatcgctatggtgagggagagggagtgatcttgtgtttatatgtcgatgacatattgatctttgggaccagcctcaatgtgattgaggaggtcaaggactttctgtccaaatgctttgaaatgaaggatttgggagtggctgatgttattcttaacattaatctactgagaggagatgagggtgggattacacttgtgcaatctcactatgtggacaaggtcttgagtcgctttggttatagtgactgcaaggcagctcctactccttatgatcccagtgtgctattaaggaaaaactaaagaatagcaagggatcaattgagatactcttagatcgttggttcattgatgtacttagctagtgcaacgaggcctgacatcttatttgctgtgagcaagttgagccagtttgtttcaaatccgggagatgatcattggcatgctcttgaaagagtaatgcgctatctaaaagggacaatgagctatggaattcactacgctaggtacccaaaagtgctggagggctatagtgattcaaattggatatctgatgctgatgagataaaggccacaagtgggtatgtgttcacacttggagggggcgctgtttcctggaagtcttgcaagcagaccatcttaacaaggtcaacaatggaagcagaattcacagctttagatattgccacagttgaggccgaatggcttcgtgagctcctgatggacttgtcggtggttgaaaaaccagtaccagcaatcctgatgaactgtgataatcaaacaatgattattaaagtgaacagttcaaaggacaacatgaagtcatccaggcatgttaaaagaagactgaagtctgtcagaaagcagaaaaactccggagtgatagcattggactatgtccagacggctaaaaatctggcagatcagtttaccaaggggctaggacgtaatgtgatagacagtgcatcgagggagatgggcttgagacccacttacagttgcacaatagtgtaaacctgtccattgtgatcggagatcccgtgaatttggatggcgaaacaaactattgtgtagctgagagaagagaccctaaaatgagcctatcttcatgatgcacttctcttctaatctgtatggtaggatggtatacaccttaatgtgatccgagtggcttttcataaagcagagatgttggcctatagaacaccttagaaggaacacacctatatgagtctgactgctagtcacagtctatgagatctgggtgatctctagatactcatgaaaaggccaggagtatgacttatacgctcaaaacagaggggatgcaaacgacagcctagtaccagttaagggtttgagtgaaacctgaatcgcacaagactgacaattcaaggcatagtccattgttcagttgtgatctggtgtagctcttttcctaggtagaagttcaacttaacagtctccatcgaaacactggtatatctaacaggttcaattttgagaacatttcttgtgagccatgaaatttggttgggattgttagaataaatgggctaggcccaatttaattcaattaaaatctcaagagcgcacaagtaatgttagagagaataatactgccttgaaaatttaggtggaagaacctcaacttaaatagggtgatattagagattccctgttgaccggttaaggtgatggttggactgccacacgcatgcgcgcatgctgagtcggcctcggccgtgggccgtgggcgtagcgaggcgaggtggccgaccgagctgagcctgcctgctgctcttccgttttgtaacagacgagaataaagtcaccattaacaaatgaaattcattgtgttgtaacctccacaacaaatgagacattcattgtgttgtaacctccacaacaaatgagagattcattgtgttgtaacatccacaacaaatgagagatttatttgttgtaatcttcacaacaaatgaaagattcattatgtggtaaccttcacaacaaatgagattcattatgtggtaaccttcacaacaaatgagatttattttgtggtaaccttcacaacaaatgagatttatttgtgtggtaatggagatctctctctctacatataacgcaaggcagaggctctcaaagtgtgtgtcttcctcctactattgttccttggcgatactctccttctgttcctgcgctgtctctctgtttccccggttctgttcatcccgcgcgcagaggtgatcggaacgagcaggtgcctccgaaattccgtccgcttgagaacctgcacgggaaggcgggcgatcaagtttttgggtaccgcttcaagcgcgactgctctacatcatcttcaccaacattattgcgttctcttatctatgttgatgcttattctatattaagcatgctcatattgtacacatctagcactgtcactagatctactcaaattacaaatgtcatgtttattgtctaaatattttggattaaaatatggcgaattatgaccaaattttccaacacactacaactaaaagaatgtgactccatgagtaaatcacccaaaacggaagttggagggacgacttgggtttagcggcattcaatcaaacagctctggacaaaacaagagaatctgcaatcaggtaagaacttgctgctaatcattcaagttaaaatcaaatagtaaaatggaaggtagaagtgatcataccaatacaaagaaaatctagacagtggaagaaaaggagagtggaatttgttggtggagaatgccagcaggaggtagcaccgtagcagtagtggaccaccccatccgtgccgagcgagtccaatggcctctaacctcaaccgacctgatttgacatcttggacctggcgttcgatggatgaggtgacaccgggttcgatggggaaggaggagacgctggccccgggagggagctcgggggaggacgccgctgcatcctctattcctctgtgagagctcgagctcgggaggtgaagccggggaggaagtggggtcgcaaggatggaagcgggatcaaggggtcatcattaggagggcggaggcggagggggtggcgtggtttctgccgctgttttgatgctgcgggagtcggtatgtgcggatgcggatggatagtagagaattaatctgtgatttggcctgtaggattgctacagatgaactcctcctttttatattagtataggaatataactagagatgattcggcgattatgctttgaatcatgattttttttatagatattacgggatctattcagaacactcttttgtgagaagttcgaaccatccacttaggaattatactacaatacaaacacactgtggtttgaatttttttcaaaactgcagattagtagtgaactcatcattgtcttcaaataaccaagcttgtgtccattgaattagcataatttgcctctcttaataaaacagtagggatcaataaaataaagcagtggtcaaagttgcattttggtactgttaatgtcaaaatcgatatgttcactagaccagagtagtataaattctgccattatgtctttacgtggaacactttgagatctgtatgcttagtgtattaatgattttgcacatatctatctaataaattatctgcatgaccattgcagctagctagccagctatgcatgtcctctaccatgactagagagaccggttggcaaaagggcataatgcactccagtgttctaaactgtttctttatcatatttctgcattaataaaaaaataacatttcggtgcgcagcggtgaccatgataccgttttgccatttcttggtacacaaacctgggtgaggtcactcaactatcccattgtagatgactggagagcttggcatgtggatggccagtccgcagggtgagttttaattatgtttgattagttctgttgtttggcttacataatcaaaatggttgtctaataagttttcagtatacaaactgctttcaggaataacttttctaaaacttcaattaatttgcagattcaccgtagcatatggaaacaacctgacatttgctactgttaaggtaacaacccatcaatgcacatccaattttatgaataatttatatatagatatttccaaaggttgttgtgaatggagttacgttctgattcacgattacatatcgttgatacaaattcaacccgcgtcatgatgaggatttttaatctgtattactgctaatgatatttactttagttcaaagattattctattttatcaaaaatttcttatattatttaaaaatgaaatcattggtatgcgaagaaatcctcacaacatgggaaagaccttgccacaccagtgttagcaacatttgtggccccaaggttcattttttaaatataagttcattgaaggttcattttttaatttatattagaaaggttaaaagataataaaatttcaaaaactctttagaaggaccttgatatcaccaaggggtcaaattggcgttcctaaacattcgatttgaatccggaacatttggtctaagattaagagttgtgatcttatagcaaaacgtccaatggcaaggtggtaaatcaagaactaaccacttgcagatcaaacaaacaacaaatatagctaccaaaatgtgtgaaacaagatacaaagaaaataacaatatcatcaactagattaaactaagcacataggtagatgaggcaaatgaagaataataatggaaaaacacacgagagacaaaatcaaaatatttgttctgtgatgtttagatccactgattccatttcaaaggccatgtctctttccactcttatactcactaaggcaacaccaaagtgcttctgatgtttagtctttatttcttctattatggaggcaaaatcgaaatcttgacaaacatccatgccacactacataagcttgagtactcaccagcaacacccagccatctaaaagaccttaatgtccaatatagtaatacacacattacaaaatttcctataaactcaagtgctcagacgatgaagtaaactcactagcttacaacatttcaatctgtcactaatttgataaaaaaaagaggggaggggggggatatgtaagaactatatggtcatggatatgcataactctttgtacaaactcaacaactcctaaaggagggggatgagagctttaaatagcatcgttatatttctacccgttaaggtaaaaacaataggtggctgaattaaaataaccataacatctcgctctcaagtctgttttcgaaatcttgaactctatgtaaagcttaattcgacatctaggtaacacaactaaaaccacacaaagtagatgttaaaactgttgattctcttaagatagcacttggatatgtcactttgagcaccgtcaataatcaaggtacaattctgcattcctcttgacaggacataattcctaaactcaaatgcaattagaaaaataactataccaatgagaacacatgtactgtcatggttatggataccaaatacctaatagtagttgattaggcacggctggacccaccacatatcaagtcttatacggaattaggcctcacttacggaaggtattccggataaggaaggacaagtaaagttctatatggaaactataaggactacttggattgtatccatattggtctccctagttctagttggataaggggacacctataggcataaatagaccccctaggaggagagggagataagccacaagacatacaaatcgacacacaagccaggacaaaccaatacgccaccagatatcgacatcagagataagcctagacagaccccatttggtgcctgtagaggccaactaaagggatctaatgccatctttgatctcgatgagttcatattcgaggaggaagactaccctatcgtcgactacgtgttagtgatccatgccgccaagtcgatgacagctagataggttttcccaaatattgtacttgtgtgattcag

SEQ ID NO: 9424 - DNA, 9595 bp, Oryza sativa
tgagttacttattagtgtatattaaggagaagaaaggagtggataagaacccttacaacaaacacaatagaccttacacgagacaaaaaaaaaaaaactgcctcagcctattacaaaatcggacaaaattggacattcttcacccccaactatgaataccggatgaattacccccctcgaccaaatccacggtggttttggtctacgtggtgtacacgtggcagtccagtcagcattctatttataaaaaaaattgtgggacccacctgtcatacactactctctctcactctctcacttctctctcttcctctctctctcgcagccccatctcacgggtcggcggtggtgggggacacgagtggcggcagcggcgcgtgaagtggaggcggcggtggcgggggatggagagtggcggtggtggcggcggcggcgcgtgatgcggaggcagcggcggcgggagatggggagctcggcgcggcttcccccctccctctcggtggcgtgcgggtgggcggacggagctcggcgcggcttccctcctccctctcggacggagctcggagcaggatgtgatccgatcgcctcgccatcgtcgccttctccggcgcgccgtgcggagtagcagctggcacgagcggtgccggccctccacggcgggagctcgtcgcggcggctgcacaacctgttcgtggcgacaggagcggtggccgagtcgcggcggctagcggagctcaacaactacgcgacggcgcgggcgcacggagctacgcgactaccgacgacgacgcacccgagccggtcaaccccgccgcccgcagcctcgcctcctactcgggccacgccatcgctgccaagaggtcccgccgtatcgtcggctgcgatggcgagtaccaccgccggcacccggtccgtggcatctcaaccccgccgcccgcgcgccgtcgccatctcccctcgagccctgcccgtgtcacgcgccgtcgtccgtcgcgccccgccaaccgcctcgccgccgctgccacctcgactcctccgccgcaccccgccgctgccgcctcacctcctccgccgcaccccgccgccccatcccccgctcgccgcctcctctgctgccgtgcgcgtgtgagacaaagagtgaaagaagagagagaggaagagtgagagagagaagagagaggaaaagtggaatatgagtgatgacatgtgggccctatattttttaataaataaaatgttgactggaccgccacgcgtacgccacgtagaccaaaaccactgcggattaggtcgaggggggtaatttgtccggtttacatagttgggggtgaagaatgcccgtttttatgatttagaggggtaattcggacaactgcgatagttcaggggggtaattcgtactttttcctttctattaatgaaaatgaaggtttgccctttgctaaaaaaaagttcccaacattcataaatctccaagcaattaaacaaataagttttttttaaggcacaggccgcttccaaaacttcttgcaaattaaagtggaaaaaaccatatgcagaagaaccagtactatctggagcaaaagtcctagagctaagtaatgagaacaatccattattcatttctcgtaataccaagtaacagtatgtcacatgaattcttctgtttagcacaaactgtacaaaattaactaaatgatgaacagtcctagctaacaggtaatcacgtgcattatcagttcatcacagaaaccgagaggccaagacggtttgctactcatggatgtagaaggaattaaaccaaactctggtgtatatacatgaggaagtttctcttttttaatactccctccgtttctaaatatttgtcgccgttaacttttttaaacatgtttgaccattcgtcttattaaaaaaataagtaattattaattcttttcttattattttattattttattcattgttaaatatactttcatgtatacatatagttttacatatttcacaaaattgaataagataaacggtcaaatatgtgctaaaaagttaacggtgtcaaacatttagaaatggagggggtatatcgttcctcttcgtctgttccaaatgaactctatagattcttctgctatttgtttctcctcctatctccaaatctaatttgaaattgctacatcaaccaattatggcgttgtcttggtatcagaagtgtaactcatggcttttgaatatagctagaaatgaaaacacattatacaaaatcagcagaggaaaagaaggtatatgaaaaaagaaaaaggctgcctactctacatttaatagaaaattccctctaaaatttagggaatattacgccattaattggattgttttgattcgttcaaacacccaaacccttaacctcagtatcctcttcttcttccctacaccgtcgccgtcagccgttggacatctagatcatcatcagagcgggaggtaaggtgttgagacatgaatcttagaatagatcggagagtccaaaatctgcaagacagtgagggggtaaggagggatttttttttttgttgaatgaaggttattatcaactagcagctggaaaagaaatccatgtattaccatacaaggacataatgtaaagcaatggatgaaccaatgcttaggatatttcttgaatggctgctagagtatctccttcatcaaaactggccaatgaaagcctagtacgactcaagcggaagtgttcagttatgtaattattgtacctttgaaactgctagccaagtgtaaacgcacacccttcaacagggaatgctttatatttgtacttttggtcctgttaatttctgtcacggtgtcacctcacatcaaatcagaaaacgcacacccttcaagagggaatgctttatatttccatatagagatcggcagtgttccaaaagtccagtgttccaaaatcaatggccatcttcatcggatgcatctgttcacttgcactcttgctgctctgctcccatgtattccagcttctctcagacgctcgccgccctctcccaccgggcccgaggccgcttccggtcatcggcaacctcctcgacgtcgccggtgagctcccgcaccgctcgttgtcgcgcgtcgcacagcggtacggcccgctggtgacgctccgcctgggcaccacgctcgccgtcgtggcctcctcgccggccacggcgcgcgaggtcctgcacaggcacggcgccagcatcaccgaccgcggcacgccggacgcgtggcgcaccgacgggcacgagaccaactccatcttcgcgttaccgacgcgccaccaccggtggcgcgcgctgcgccggctcggcgccgagcagctgttctcgccgcggcgggtcgagaagcagcgcccgctgcgccgggacgccgtgcgcggcctcctccgccacgtgtcggagctggctgcggcgtccggcggaggcacaggcacggcggtggtcgacgtcgggagggcggcgttcgcggccatggcgaacctgctgttcgggtcgctgttctcggtgggcatcgacgccgcgacgtcgtgccggttccgcgacgcggcgcgggagttcgcgctgctgacgctgacgcccaacgtgtcggagttcttcccggtggtggccatggccgatctgcagggccttcggcgaaggacggcgaggcacatcacgtggatgtaccagctgatcgacggccatgtcgaacggcggatgcgtggccgggaaacagccggtgcgctcggggagaaggagaaggacctgcttgatgtgatgctggacatatcggagaaacaggagcagagtgacgacagcctcaccatcaaccggggtgtgataagagcatttttggccgtaagtatatatatggagtatgggcctatttagttcacgaaaagaaaatttttgtgtcacatcagatgtttaatcggatgtcggaagggtttttcggatacgaatgaaaaaaataatttcataactcgcctggaaaccttgagacgaatcttttgagcctaattaatccgtcattagcacatgtgggttactattgtagcatttatggctaatcatggactaattaggctcaaaagattcatctcgcgatttccctcttaactatgcaattagttttttcatttatctatatttaatgcttcatgcatgtgtctaaagatttgatgtgatgttttttggaaaaaaaatttagggaactaaacggggcctatatcctctctctctctctctctatatatatatatatatgtacgtttttattagattatacagtttacttgtaattatcttttgactgtatgtcatattttaaaattttagtacaaatatgccaaagtataaatcatatataaatttcttttaatatataacaaaacatgcatgttagaataaaataaataatatttatttagcttttaataaaacgaatggttaaacgtcgtataaaagggtaacggcgtcatctattttaaaacgggagtacatgtttttagtgatgtttttccaatgactttacacctttataatagttaatcctttcttaacatattataaaaggttggataattcatcaccctttgatcagaacagaaaaaccacgcacaaaagtaacttttctcactgcacatatgttctagaaagaggcaaaaattgctactgagctataaacaacgtgatgttagaagacatcaatattaattaatcatggctcttctacatgacagtttgtcgcttcgtagtcactaaaacataatgtgtggacggaagcctgtgaccccggctcactagagtacgttatctctaacaaagctattttctaatttttttataactatttaggtcatgaaaaaaaagattggaagagcgaaaacactttaaaacaaactatatttcatgcgcaaggtgatttctataatcgtctgcctaggtttttgtcaagctttaaatattttctctgggttggtctattgcacgtggatgtgttttcaatactcctacaagtttgttggggatatatatttacatatttatttaaaggcaaattttatgggagggcatcacggctgctaagcagtttttgcttctacatacggtaagagctgatctttgggaacgtacttttaaagtatgcatggttatttactactggacatcgtgttgattaaaatatttatttttatttaataaaaaagagataaatagtgtgaaaggacaaatatactagctaaatgaccaaggccagtggcatatttgccttttgcaccgtttttctcttctattcaatcgaaaatgaatattttgatcaatgtggtattcagtagcaaataaccatactttgaaagtgtattctctaaagattgacttttgttgtgttcaggagctaaaactacgaaatcatgatgccttttagcaaaatttgcattatttataatatctgctaatctctttagatatttgttagtaggcacacgatgatatattaattcttatgatagaagtatacatgtaacaatactagtttttcttcagttgtaatggaaaaaaagtgagaacgccatgggtgacatctatctcgaagtaattgtgcacaatatgttaagatattcggtttatgatcaaaattacttacattgcttaaccaatttcaggatttactaacggcgggcagtgaaacaagctcagctgtaatagagtgggcaatggccgagctacagcagaatcctcaaactatgagaaaattgcaagaagagctcaaaaaggtcataggctcaaaaacttatatagatgaagaagacatcaaccaacttccctatcttcaagcagtcatcaaggaaacacataggctacatccagccataccactgctaatgtacaaagcagccgtcccagttgaaatacaagggtataaaatccccaaagaaaccactgtggtagtaaatacatgggcaattcatcagaattcagaggtttggattgaaccagacaagttcataccagagagattcctacaaaaggagatcagtttgtcatcaggtagtaccaacatggagcttgttccattcagtgccggacgacgtttctgcctcggatatccggtagcaaatagaatgctgcatcttatgcttggctcgctagttcatcagtttcagtggacactgcctgaagtagtgaagaagaacggtggcgtagacatggcagaaaagtttggactaacactgtctatggcgacccccctacatgctatagcaaagaatattgtgtagtgtgtaatttgtgtaatgtattgccgaataaaatatgtcatttgtgctgaaatataacatggatttataaatttttatacgatgattacaaattgaagtatctgaaattaaatagggaatgattgtgattgattaaaatgaaaaaatgtaagttgagaaattaaataatatatgattgggattacttaagatgagaaaataggtggagaagttattatattttaaaactaataatagataatattattacttttacggctactgttaccacaactcactactagaaaaacgatttttaccgatgttggccttttatttttccatgtggacaaaaaaaaaacctctcttataatcgtttgcgaaaatagctaaagagtctctagatttaaccccacctacaaaaatttgtatgcggacctcttaaggggtccgcctagaaaattttgattttcacaggcggaactttatgtggtccgcctgtaaaaatcatgctcgtaataaaaatatctatgtcacatccttatcttctcctccaccatccttatcctctccactactcatttccctccccccccctctctctctctctcacccctagccgatgcgcatcggcggttctgaggaggtcaaacgacgactgccacgacgacaacggcgccaacgcctgggtcccgccaccggcagcgatgacgacgacaacgccgccttgatccaccgccagctcgccacgggtgcgcggatccgccacatgccggtctcggggaggggaggggaggcggcggcctggctcctccctctctaggcgatggtgtggatcagcgacgaggaggggaggcgtcggccacgatgaggaggtgatgaggcgatggctcggctcctccttctcccggcctgacgacggcagagacgaggggggccagtattaggttggcaaaaaggagggaggtggcagcggtgctccaatcctccctcccttcctcccggatccgtcatctggcggtgtaggtgaggcggaggagaagccgatggcgacggccactgcagactgggctggcccctcccctcccagatttggagggaagagaagagccagcaggaggcggcactccccttggtcagcgctggcaaacggaggagaaaagccgttggttggagggggaggcccgcggtagtgccgacgggtaggggtggtggcggtgtatttgtttttgttcgttgaaattattttcataggcgggtggatctacctcatttgaagatggagatgccacctgcaaaaatgattttcgctggaaaaatcatctatttttacaagcctttgcgtacaggcggtcctttccctcgcctggaaccgcctgggaaaacgattttcctagtggtgactactatgaggacaaacgaatactaccaatgccaccattactacgagaacctaccattacctacaatcaccaccaccaccacatcactactaccacccatcgccaacctggtacagcaatagcgattgccactattacttatgtagatattatagtaacacactgataaccacaaacttaaagtccatccaaataatgcaagtttaatttgcaatctcattccactaggcaacaaaacaatattattagtgtagttctttctaagcatacggacagaacaagagagcaagagccaaagatggattgattgggctttggatgggctaatgatggtgaacactagtgtagacaaggccaataccatggagcgagaactatagtactacaaagtacacaagttacggagcaaactgatagcatgcactactagaaaagacgtttttgcaggtggtcaaaatacatttttgcaggcggataaaccttccacctgcatctaaacgacggtaaaaatcctcaatttttataggcggaccaaagcacaggcagccgttgccatcttctcaggcactgcaggtgctacagtagcccgcttgcgaaaatactcatggcgcccaaaaataattttcccgccagccccaccccctccgtaggtttgaaatcacaaattcttacaaatctcatccaggaaaaaaaatccaatcacaaacatccattcatcaacacaaaacattggattcaaatccacagcaatcaacatgtaaacttagaaaaaaaaacaacatcatcgtcgtcaccggcgaactcctttgcatgcggtggccgccgccgccccctccccccatagaccggatctgtgaaggagggaggtgtccgcctgttgacagaaaacacgaggcctaggagatctgcttaactccagtgcaggtccaaaacttgccttcgggtgtgtaagcgtgccaattgatctgatcctgtaatcaacaagaaatagagacaaagaaaccataattaatcctataaacgatagccgatcggctaggtgccgatgacatatcatttatctctgagccgatgtcatatatgtatcgatcggcattcatgaacaaataagaaggaactaaatctactcgatcggctgtagatattaatgatacatacttcctatatcgatatatacttaaatcaagtgattgggatagatcggacgccatgccgagacagtataaatcattagatcgaaatatatattaataatggaactatatacattcatagcatagccgatcaggtagatctagcatgtatcggctaatactccgatactactctatattaagatattaaagcaagtagaatatatcaaacaaaagcctaatatacttaactgcaacaagatcttaatgtaaagggcggatttaacatgtcaatcatgcatatagaataaaagtagttaaatcaggtaagatcggctgaaaccctgatactactctaatcggcaaccagaaggcaggctagaggttgatattctaagcacgacttaatagatcaaactcaactgatgcagcattaagtatgaaaagaagaacaatatctagacaatcaagccgctggaagtttcatagagtggtggatattttatataatctaaatcaacgtcgagatctaacctaatcggctgtactctaccgacagatgctagccgattgtaagttagataacgatattgctagagattatataagatatttgataactcgacggattacataaacaagattagagtatcataatgatggaagcactaatcccgataacgcaaaccgccataacaagttttacctcttgttgaagatcgaaaccgatgcagctcaaccggaaagcaagaactcgtcgaaataaaactaaagca

SEQ ID NO: 9425 - DNA, 7055 bp, Oryza sativa
atctcagagtcatcatcgtcatcatccgacccatacacataaggacacacatgattaaccttcttagagttcttcctagcttccgcaaatctctgttcatgcaattttaccttatgtataagatgtgacaaactatcaaagtcttcagatgagaatttctccttaatcggaccaatcatgtcctgaaaggctaaatcggctaattgagaatcagtcaaacttaagctgaagcacttattcctcatttccctgaatctctgaatatactcatgcacgggctcgttatgcctctgcttaatcgcggtcaagtcggataatttcatctcatgaactccgctatagaaatagctgtgaaattgtttctccaagtcgacccagctgtttattgacccatatggcaaggaagaaaaccaagtaaaagccgatccaggcaaggacaaccggaatagcctaactctcagagcgtctacagccgatgcctcaccacactgagctaaaaatcggctaatgtgttcataagttgacacaccatcttgtcccgaaaacttggagaaatcgggaactttaaatcggttaggaagaggaactcttttaaaccactcagggtaaggttgccgatacaagtttccagtgtcctttggtttaagcccaaactgttccctcatcacgtcagcaatcacatcggcccatggtcgttgctgagctgctccttgcgattgttgctgcgtcggctcgaactgattatactgaggagcgaactgaggttgagctagccctccttgctaatactggacttgtggggaagaaggtcgatactgataactcaaattgcccccttggtaattctggtaattcggctgaatattttgcaccaaatgctcgggcacaatctgaggcatcaccgtaccatctggctgcacatggtgagccaaatgctctggaacaatttgattcagggcgtgtccagccgattgattcatcaagccttgctgtggaatcggctggatagtttgctgtcctgatggtgtctgttgagtcggttgtgcgacctagcgtcttggcggcgtttgataaatcggctgttgttggactggatcaacaataggttgagggggtaaaaacatagcagcaacctggtcttgtgtcagccgatttgtcgcctacccactatgctgtggctgcttcctcatcaacaaccgaggattaatcagctgtcctggtgccgatgctgttggagcaggtaaaggagtcaatggcagtactgtcggctgagctaatggtgcaatgggaggaactgcttgagcagatggctgagtgccggtaatcaaaggccgataatttggaaagacgtctccctgcaaataaattgggcctgcagcctgatgctcggctattgatccgtcggctattgatttcatcaggtttgacaaagtgttaactaacaccccagactgattgatcaaagcgttgtgcacggcataatccactcgatcttgaaagttgttgaagaaatcctgtgctgtctcgccatcttgattaagatttcctccttgcagcccatgaacaccatcacattgaactccacgtaccccttgagagttgtcaccctgagtcttgtaagccgagtcatcggtagtacctttttgtcgcctggttgagccgattctgaggctttcttcccttctccttccttagaagtactagtctcaggctcatcaggaactatctttaccttgtatttctgaacaaatgttcccttgcgagtctgcatgaatgaatttaagaattgatcccgcgcttgttgcatcattgcttcaaaatccttcttatgatcaggtgtgaacttttctggatcaacagccactacatttccttcattgatttcccccaagcctagcctctggattttttccttaacagcccctgggctagccgaggatggtgaaggtggcagcttctcagccataagggaaattgtcttccgacttctaatcggtcccactgggcgtgccaagagcgtgttgacagaaaacacgaggcctgggagatctgcttaactacagtgcaggtccaaaactcgccttcgggtgtgtaagcgtaccagttgatttgatcctgtaatcaacaagaaatagagacaaagaaaccataattaatcctataaacgatagccgatcggctaggtgccgatgacatttcatttatttctgagccgatgtcatatatgtatcgatcggcattcatgaacaaataagaaggaactaaatctactcgatcggctgtagatattaatgatacatacttcctatatcgatatatacttaaatcaagtgattgggatagatcggacgccatgccgagacagtataaatcattagatcgaaatatatattaataatggaactatatacattcatagcatagccgatcagatagatctagcatgtatcggctaatactccgatactactctatattaagatattaaagcaagtagaatatatcaaacaaaagcctaatatacttaactgcaacaagatcttaatgtaaagggcggatttaacatgtcaatcatgcatatagaataaaagtagttaaatcaggtaagatcggctgaaaccctgatactactctaatcggcaaccagaaggcaggctagaggttgatattctaagcacgacttaatagatcaaactcaactgatgcagcattaagtataaaaagaagaacaatatctagacaatcaagccgctaaaagtttcatagagtggtggatattttatataatcaaaatcaacgtcacaatctaacctaatcggctgtactctaccgacagatgctagccgattgtaagttagataacgatattgctagagattatataagatatatgataactcgacggattacataaacaagattagtgtatcataatgatggaagcactaatcccgataacgcaaaccgccataacaagttttacctcttgttgaagatcgaaaccgatgtagctacacccgaaagcaagaactcgtcaaaataaaactaaagcaaaagggtggcgatgcgccgaaattgtattgaacgtgtgttgttgattacatgaggctcagggtctatttatacccgagaattacaagatatgtgtccataccggacatgactattatctctaacaaactctaagataccataagtctttacagcagacttttgcccaaacatatctctaaggaaataacatagaatatcctaattaatagatacaattgccttctcaggaatctatccttgcatggcaattaccatgaagcacattaacttaactcgatgatgtacgccgagtcgtattgttggaatcggttgtatcggctaaccccgtccgactcaaactctgccgatcttatcatagccgatttggatggcagccgattcttgctctgttttcacaacagtctccgtcttggattcctcttcgatctgatcttcatccccgatactgaggttaccaaatttggtcgttaacaccgccgccgccaccgccctcccctctcctcgtaggggccggatctgggaagtgaggggaggggagctgtgtccgccccaccgttgccccgtccgtgccgccgtcgtcgtccgtgctgccgtcgcctcgtccacgccgaagccgtcgctccccctcctgcagccagatctaggagcggggaggaagagagggggagccgccgccgccaccgtcgtcggcccgtccttgccgatgtcgccatccatgccgccgccgcgtccgccacgtttgtaccgctgccgtcgctgtcgctcctcctcctccgccggggagggagagagggggagccgccgtgccgctgtcgtcccctcctctggtcggattgggagggagagagggagggagggaggggaggggaggaggtgagccggtggggggtggagaggagaagagaactgttgagggggagagagagagagatagaaaaatgagtggcatggccggtggggaggacaagataaggatgacttaaagacttttttggggaggtacgatttttgcaggtggaccacataaggttccgcctgtaaaaatcatatttttccaggcggagcacttaagaggtccgcctggtattttcgcaggcggacctcttaagtggtccgcctggaaaaattgattttcacaggcggatgacgaaaatgcacctcggtttacatttttgtaggaggatatttggcttcgagggtcatacccgtctgcgaaaaaaatgacccaacatcggtaaaaatgccttttctagtagtgatgagaaactttttagggtacatgtatcctaggtatatacactggtggagaaaccatctttggtcggtcggccaaattccataatagtctggttctaataaaaaccgggactaaaaagcatctttagtcctagtttaaaggttgaggagtactttttgatctttagtcccggttgatagatcatttttagtcctggttcaaaaagttgtagggttcaagacagaccccaattatatttactcccggttagtataaacaaccgggattaaacagtaccccgaaccgcgcgccaccaactcagatattatccgcgcgcactcctctcgatctcctcccctctcatttctctttctctatcccttcctctcccccttcatccccttcctctcccctttcccctcccgttcctccccttcccctctctgagcggcggccgggcgagcggtagcgacagctgggcgggagcaacggcgcccggcgggagcggcggcggccggccgtctaggtgcggcaggcgggcgggcgggccgccaccgcgcgggctggcgtggcggccgaccaggcgggcgggcgcagcagccggccggccgagatggcacgaaggccgcgaggatggtggccgggaggccggcggcgccttactctctgctgccgatttttttttttgaatttgtgattcattggatttgatctgtgatgtatgtgatattggatctgatctgggagttgtgatgtatttcttttaggaattgtgatgtatttttttgtttgagattttgtgatgtgatgtattgtgatatgtgatgcatttctttccaatatgtgatgtatttctttccagatctgtgatgctatttgatttggggatgatttgggagtatgatcggggatatttagggagcagatcgatttgagaaaaaaaaaatcaaccgggactgctcccactatttttagtcccggttattttatccgggactaaagatacccatctttagtcccggattcgtagtcccggttatacaaccgggactatagggggtttcctatcaggagtaaagcccttttctccactagtgatatatgtttgatttcaagataaagtgggatataatgagatggtatcatcttgtctttgatcggaaggttgggataaaccttatttgaggacagaaaaggatggatgggacaataattgatgggattttcggataagagaaaagtcgtacacatgtacgtcatgcgtttcttcagcacatgacaagcaccccatccatcatcacgattgggctcaggggagtacgtacactaggagatgggtgtacagttgtaccctattttttttttcaaacaaatgtgatttaatatatttggtatatgtgtacccaaccggttaggcatcaaaacaatcatttgtaagtacaaaattatccttttcaaacaatattactacatccatcttaaaataagtgtaaacatgggtatccgtatccaacatttgaccgtccgtctaatttaaaaaattataaaaaaataaaaaaaattagtcacgcataaaatactattcatattttatcatctaataacaataaaagtactaatcatattttttttaaataagacgaacggtgaaacgttagacatgaacagtgcaaaactgcacttattttgggatggatcggagggagtatcattttcccttagctattttatagtttttctataataaagattcctatttatgctaataacacatattagcacttcaatacttttctcattggataacgacgcttgcttgagtaactgcacctctcgcgctactgaatccgagccaagcctgtacggcccagctcgtcgtcacgcttgaagacgatgaacctcgtacgtgacgaggataaggctgctggaggcgtacgttgaggtgtcaagatcggaggcagcagcgatcgatgtcgaggtccaggaaattgatagatggaggtgaagtagggtcctccttatatgcgagtgatcgcgggacggacgcatgcgcgatcagaaacggcaaaacagaaaaagccccatacacgtgatcgagaccttgtgacccacattcacgtccataccacttcacacgcgtttatatatatatatatatatatatatatatatatatatatatatatatatatatatatatatatatatgtgttgcaacaggtgaataaattctaatgataatatacgtttcttatacataattatgtcaataataatgtttgtattttaatgagccgtttgttttttcataaacggcgtatttctttctaacagtttcttcttagcatactttttttgatttttttttctgaagacgaaaaccatatttttctccctttttctttttcttttctcacgcgttttttgctttttttaatgttctttttttgcttttttttcaatacatgagaatatatgacgaaataaaagccgtgtaatagatggcaaaaaatcgatagatcctatccgacttaaacgtccatcaatttagcgtttttttttctgacagttttttcagaacgatttattttttaatagacggtgtttttttcttgcgtggttttttcaaatatttttttagaaatggcgtatttttttcgttacatttttttccttgcatgtttttttaaaaaatttaccgacgatggaaataatatttctcgcacgttttttatggaaggtggaaaacctttttagcattttt

SEQ ID NO: 9426 - DNA, 28584 bp, Oryza sativa
aacctcggctccggcggctcgggatcggccaccccagagcatgccatcctggccaaatggccggccggtcagaccggccaacacctgccagtcagaccgactatgaggcaatggtcagaccggccgtgaccctgcggtcagaccggctgcatcgtgtaacatcctcaaattttaaacaaaaatctgactgcatcatgctggcttttgattacttttgtgtgcttcaagattttatttgatttttaattggttcaagtgttacttccttagagccctactaatttaccctaattattccctttactctaaatcttagtgaatttgagcaaattctttcaaatttcaaactaaagattattttcttagcttaccctaatattagtgaggattttctttactccaaaccctagtgaaacccttccaaattcatagattaaattcattcttttctagggaaatattcaaaaattcctgaaaacactgttcattgtactcaaagtgttcgacaaaatgccaagcccagctagagcagcccaacctttacccaaacttgtgcaaagtccagaattgatccttagggaccacaccccactcaaaaaccgtggttttctttgcttcttcctccccttcacgcgcaccgcccaggcatccgacttagccgcacgccgtgtcgccgcgcgtcggctttgaggccgcccgcgcgtgcccgaccgccttggcgcgccgtcgcccgtccgacgccttcagaccgctgtcgccgcaccaatcttgacgacgacaaagccgggacaacctccgccgcaaggaatcgccgctcgacgtcgtgcgttcccgtccaaagccgccgccgagtgcgatttagcttctacccggggtgaatcgcgccaattcttgccgcacggttagattgaagataaacggtggtttcccctctcacaattcaaaccattcatccccgagccggccgttttcaccctcgctgccgccgcgcgtcgcgcccggattggcaccaacatgtcgacagccgatttcactcgcggtcaagtcaatctttcaccggtaagtattcgaacgtggcctcccaccactcaaatcgatcttgcccgccctctcacagcccctgccgccccagccatatccaaagatcgagctcatccatggcgatgacggtgtccgagctcatccgctcctcctagccctataaataggaccccaatcccttccttgtccatcatcaatcatcaacaatcaaagacctacaaccccgaagctctgcttcaccaatccatcccatcaaccaccatcgcccgtcggtcgaacaccttgtgcgtgatcgactccacacccctccatccatcctccgccctaaatatcccttataacaccttatatcaaccatgttctagtatactaagccctaaccgaagccctgcgccgagttttacctcgccacaccaagccgaccaccgccgcccccgcgctgctctgttcttcgccgccgagaagttttttcggccgcaattcttcatctcggcatatctcggtgagctcttacgttttaaccatctatgtactccctagattccattttagcaatccttttgcactatcataccatcctctgggctgccgacgtgagcacggccgccgccaatggaggcgcgcttgtcggcaagtattttccgcgccttgccaaaggtcggcaagctatcggaatccatccaggcactccatagatgctctagaacccctcccctagccatgtttaactcacatcacctcgatcaccatcacggcctaaccgtgccaccgccgccctagccgctaggccatccacacaacaaattaacccctccgccgccgctcgccgtcgccggagaaccctagttccctcccctcctcggccgcaacccctttccccctccatcgccgccgcaatcgtcaaccctagcgccgccggccgattttggggaacggccggaggtaggtagaagaagagaagagagagagactgacaggtgggacccacacacagtgccatttcacatttaattgattttcaaactttagaagtccatatcttttaaaacatagatccaattccactgaaacttggaccaatattcttctaaaatcattctctatctattgagcccctttttgctatttttgtattttattttattttctccatttttcttatctttggattttatttgaattccttttgaatttgaattttatgtctaaccctaggtcttgaggattcttctgactcaatagataatatcaatcaacctcaggacatcgagcaaggcaagttaccatatacctttgatcatttaagcctatattttacaaattatttatttatagccttttattctatattctattttacatgcataattcaatcatagaaacccagataatttagtattgcttactttgcttacaatctggttaaaatatcttatacttaggttgggacagtacgtaagatttggttgatttccgggtggctagtactgtctcgatcgatataagttttaccaggtacttatgtcgaacgaacgggtacgaccgcagtttctagaatgaggacagacctagttattatgttaattagcaatatggcacctctgtatagtggttcttatttttaagtcctcgcgcaggaggctactatagctgcgaagggcaacttttaaccattaccatgtacaggtaaatggtttgtgatactcgagtataaactatatggtatatttctaaaccctgatcgagatgacgtggtgtcatacgatcagttccccttaaatacctcgggaacgccagaactcctcttgctgctgttaacattacgttcagagcatatgaggatataagtttatggaacaggtgccacaattgttaataacttaatactgggccatgactaaagccgatgattattagcaagtcgtggactgcgggtaaagcgtacatctgctgcagtagaatatatttgaaactattcgaatagtcgtactcatggagttgagtaccgggactcatatggtaccctggttagaaatttaaagtctacgtatttacaaatttttgctataattcttccagattgtttattactgctttttgcaaagaaccctactatatgctaatgcataacatatttccatgataacttgctgagtattgtgaatactcattcttgctctcataacccctttttcagatttgggtcaagaggatgacccctttgactattactacgatgaccccgataatttagagagtccctaaaggttatacctccctagtcagaatgtatagaaacttccgctgtgtattaattgtgaattaattaagttaggtaagtacctattattgtaaaacccttagtattgtaaaactttaacatatgcaatgaaaaaccagttatattgtatgtatcaatatttactgatccagagattgatacattaatcgtagtcggatccaagtatttagtttcgggctccgacacatcggccggttagaccggcacttgggccgcggtcagaccggccctggtcacccagaccagtgacagcaaatgatgaacaatgaaatttagcacaagtctaaatgcaaacatgacctagtgtggaaattaaaatcatctctttgctaggtcattatccctcttaatagtacggcgaagctaaaaacaaactagcaaatttgatcgcccttcacctcgatcaatttaaaactaaatcactagttttaccgtcttcttttcttcgcttcacgccatcaattttaatccatcggttgtcatccatgcgcacacacataatgtgaacctaactcaaaatttatagcacaaagacaacggttagtccacaattagtgtttgtcattaattaccaaaattaacaacgggggcctagatgcttcacctgatttctttttaaattacttccgagcccttctatgcagtctttttactcaaagtgcaactttgcccattcttcaggggctttctctatctagctgtactcccagatagcttggacaaaacaaaattatagaggcatctactttggatttgtttaaaacggggcattgaaacataacgtatttggtcatgttttcttaggtttttctggtgctaacactacaatcaaatcaattttctgcaattcaatgtgttgttttttccccaaggtgaaaaagagtttaggggaagaaatgatgagtacattgcaaggagaaagcttacggggcaacctcataccttctcatcttggcagtgagattgctcctaaagtggggaagaatatgaagaggagggaagaaggggggggggggggttggacaacttattgatcaaaatatgattaagacaatatattaagtggcgagctaaagtcccaacgttgatgaaatgactccctaaccaacttctagaaattttaatgaaaaactgccccgtgaatagtaagagctacccaaccatttctctctcaccgcattaatttgttacctttttctgaaatataataatacaaggtgcatgtcaaagatttgtttatttgagcaattaatcttttctctttagtgaggtactccagtatataaattttgactaagcaatttcaactcatcagatgagttgcttcaagtattgctttgtggtatatgctattttccaagaaatagaatggtggataaatatgtgcttccaagcttctaaacggtattttttttagaaaaaaatttctatatatgaattgcttagaacattgttttatatccattttaaaccctttttatatttaataaattgattgtaccatcaaataattataataattataaaaacaattgagctattcagacaatcagctattcaacacaagaatggagggattcagactattgacaatcaaaactctttattataatatggaatggagggagtaaagtaattaaagaatggcttaaaatttcaatagatattttttggaggaaactttccatatcaatgatagaatacagaactctcacttgaagtttatcaaacattcacaggaatttaatttgtaaactttctacaatataatcttccatataatgaacctactatctatagaatagacttttcgtagggaattaaaaactttcataaagaaagtacaactttctctagatatatcaaaattgctaaataggcccatttacataggcatgcttgatcaaacaacaagaaacatttttttttattatgagaccgaaaactggtttagggcatgtttaaagatagacgtttcttagttatttagagattgttatcatgagacaataaatatctaacaattaatgcacaaaactaatttctattatctctttctttttccatcttgataagtatagttttcttttatgaacactaagagtccatggtaagccgctgctaagtcttgatatcgatgtttctttctttttttttctttatatttatgtcatctagcttagtatcttgttaagggtgagtttaaatataccattttctaatttctactctctcgtttttcacgcgcacacttctcgaacggtcaatggtacatttgtttataaaatttttctatagacaagtttctcaaaaaaacaaattcaagtttttaagttaatacttaattaataatactactccattttactactagcgtggatattagttttcaacccacaacaaagaacacagtccatttggctactattaatgaatctatcacaaagtattcgtagacaacagcatgcgccaattagcttttccctataagggctcctccacatcatcatgtaggcattgtaggtgtcaatttggtacttgttctgctttaaactccatcgctaaagcaaatgcaaaagactcttttccctttatcccgcacaagtgtgaagtcaagggtggctcagctcaacgctactaggaacgtgaaaggttcgttactagtactataatatggaatggagagagtaaactaattaaataatggtcgaaataaaactttctataagaatgatataatacaaaattctcacttgaagtttatcaaacgttcgcaggaatttcataaactttctacaatataatcttccatataacgaacttactagctatataatagactttttgtagggaattagaaactttcatatagaaagcaaaactttctttagataaaccaaaattgctaaataggcccacttacataggcatgcttaatcaaacaacaagaatttttttattatttaaccaaaaacttgtttagggcatgtttaaagatagacatatcttagtagttatttagagactattatcttgagactatagatatctaaaaattaatgcacaaaactaatttttaattatcattttgttttcccattttcataagcatagtttccttttataaacactaagagtccgtggtaagccgtttctcagatatcaatacataattattgatatcgatgtttctttctcttttttctgtttttatgtaatctaacttacaatctcatttttcgcttatgcttatacttacaagccaaaatttgaattttcaaccttaaatttggagttgattttggggtccttttatcgtaatttattttccaacctttacttttagatcgctaagaacacatatataaaagttgtattcacaaattattttttatttgcaaatatgccttgaataagccaaaccatggagccattagtatctttgttaagggtgagttcgaatgtaccattttctaacttatactctactttttttttacaaattttctataaaaaagtttctttacatccatattaatatgtttcaattcttttattaatactatttgattaatcatgcgttcatccaccactccattttactaactgcgtggatattagttttcgacccacaataacgaatacagtccatttggctgctattaacgaatctatcaagtatttgaagacaacagcatgcgccaattagcttttccctacaaggacgactccacatcatcatgtaggtattgtaggtgtcaatttggtaccttgttctgctttaaactccatcactaggctgccccatcactaaagcaaatgcaaaacactctcttttccctttaagagcccctttcaattaaaggatttatatagaaatttctcataggattgaaatcctatagaaaattttcctatttgaccctttgattcaaatgatagaaactttccaaatcctatgaaattcctatggaacgacacattgtatgtggattttggaggaaatttagcaagagcttcaacctcttggaaaatttcctttaagtctatatctctctcatccgattcctatgtttttcctgcgctccaatcaaacaacaattcctatgttttttctgtgttttacaatcctctgttttacacttcaattcctgtcaaaatcctatgtttttcttattcttttattttttcaaccctgcgattcaaagggaccttcaacctgcacaagtgtgaagtcgagggtgactcagctcaactctactagtaggaagtaggaatgcgaagggttcgtttcgtttccacaccaccattggtcaagtcaagctgcgcgtccaatcccacaactcactgacgcgtgggcccgggtcgtcctcactactactactgtgcagtgcagccagcactagtgctctcctgctctcctctgcttctcttctcctctcctctcctcaccgggagagtggagaccctcgagatgcccggcggtcgccgcggcggcggcgggcgtcctggctccggcagcagcagcaacggcggaggctccggtgagcacccctcccccgcgcgctcgcgccggcggcgccaccctctccgccggtaggattcagggcggtggcctcgtcgtaggcatgtgcgtgtatatgttttttttttattattcccgtagattttgtgctgtgcatggcctgctccgatccccagtttcctgggcctctttgatgagactatggtttactgcattgcattctgctccgtcagtaggaagtactacctccgtccgataataattgcatttctaccattcaaactttgtcccataaaaaatgtatttactataagatgagacccaacaaatggaatttgtaccccaactttccttttaattaatttgtagtagtagtaaacactatccggggaaaaaaagaaagtggcaaagcttttgcccttccttcagagaaaaaaatatattattattatttttttattagatatataaaatcgatcaggttagattcatcttggatctcatattttgctaggaggtatggtaagaaattttagtattttttcacactttgataaatatatcgcggtacttacttaatcattagtagcaaaccttgaggttggagactgtatgatgctaagtatgtgagttatgacttgataataagtatgctaagtagcaaacatgagaagttggttgcatgttccacagtacattttttagttgttcctttgtcgtacattgacacacataggaaaatatcatattactttatctaactgtttttgatgtagggtatagttgggttgagaagaagtcgaagaaatcggagaaatcagttggaaagggacaatgcgcaccatgtacttcttcaaatgctgcacctaaacctgctatggcgtggcaagcacggagtggcaatggatctttacaccctcctggaaatggtcgggttcaacattctgatcataggcctgctgccagaggcagtcctaggtcactgccacaaaataagcatacagaaacaaaattgcaagcaccgtgtccagttgtgactgcacctcttgcaaatggtttgcagtgggtacccaagtctcgctcatctggttctgagagcaatatggatgatgctcctacatcaggttctgaccctgaaatggacaatggtgcaacacacccagttgtgactgcaactcttgcaaatggcttgcagtgggtgcccaggtctcgctcatctgactctcaaagcaacaaggatgatgctcctacagctagttctgaccctgaaacggacaatgttgcaccacacccagttgtaagtgcacctgttgcaaatggcttgcagtgggtacccagatctcactcatctggctctgaaatggacaatggtgaggattatgattcatatgacgatgattctgatgatgatatggttgatgataccagtggtgactttgattctaaggcatctgagaaaaattttgagactcgaaaaaggcacaagctgttgaaaagcatttttgaacttctggagaagttaagtgttgaacagataaatgaaaagactaggcaatggcattgtccagcatgcaaaaatgtacgtggtggagttacctggtacaaagggttacagcctttgatgaatcatgctagaacaaagggttctaagagggttaagcttcacagagaattggctgcattactggaagaggagctgtatcgtacgggaatttcaatggcatcatctggcgagttctttggaatctggaaaggattgcgagaaaacactgatcgtcctatagtatggcccccagtggttattattatgaacactcgattggaacaagataaggatggcaaggtggtgttttctatttcttgctcgagctaaaaaatattttgcttttctatatcattttctgttgcattgtatctggaagttttttgttgtccaattgtaagtcatgttgtttatttactgactatggtgttgtattaggtcgcaatatttatttcttcgaatgttattgaattttgagtaaatttcataaaccccacctgttatggtccaagttacacaaaaccatagggattttgacacgtggcacataaccccgatggtcataaagtttcacaaaaccacactattagccattttgacatactcctatatcaaatattttaaaagtggatgtaacatttatatgatggatagaatcctcataaatttgagatatgattgtaaaactcaaaagtgttgtagatcaaaatcaaaatgatcaatagtgtggttttgtgaaactttaggaccataattcctgtggttatatgccacatgccaaaatctctatggttttgtgcaacttgtaccataataggtggggttttatgaaatttactcttgaattttagttatgggtaatgcacatggattctactaaacctaaattgtacacataactttatggctgtccactattctttctgtaatatctgatctaatcagttgtactcaatgtgtagcaaaattaaagaaataagactgatttgttttcatatggttctattgatttttttttatctattactacgtatcattaaataaaatgtaaatgcatccttcaggagcagttaagatggcaaatgtgatggtttccattacttaaatatcagatagctgtcatatgcattgcaatatcgatccatggacacggtttatctccattaccagtttattttgtttatcattcttatgttagttattattttatgtgccagcaaacatttttctttgtgttgaaggtttaaaatatttacaatattcaaataacataaaactgcaagaaaacatattgtagttattctttattatgttttgcttgcattcatactccactgcaaagaaacataaatatggctactaattaggattgtctaggcatacttggcccaaccagttgaaggtcattgtacaaaaacatccatttgatctatcttttaagctgtatgaagctaagatttacttcattctaatttatatttctcccttgacttgttccagtggaaaggtatgggaaacaaagagctccttagttatttcagtaaatatcacgtgaaggaagcatgccatgcttatggcccagatgggcacagtggcatgagtgcgctaatatttgaaggatctgccgtggcctataaggaggcagaacggttgcataatcactttgttgatcaaagaacagacaagtatgcgtggttgaatcataggatcgtcatacctggtgggaaaaggcaactgtatggtttcttagctgaaaaagaagacctggaggcgttcaatagacatcatggtataatgtttaacttcttttcatatataatgctctgaactctgtgcaattgtatgtgtttgttgtcttttgttataagcatttaaaatggaaacatgatccatacatgttcgcatgtttgaaaggtgaacattataaaatatcattttggaaccttttattgtacatgagagttggagtattgtcagaacgaaatgcatcacctgtatgactgtgtattcatctaatttcctggttttcctgacagattagctttgctgttgcatgtcaatttcaacataaattcagactatttttttttaaattttgtatgattttcaggaaaagactatttgaaatacgagatgaaatcttataacgagatggtggttacccaattgaagcagatgagtgaagacaaccaacaactgaattatgtgaagaatgagatggttaagacagagcgacattctaaagaagtagaagaagccttgggtgttgagacccagaaacttcagggagcaattgaagataatattattttgaagagaaaaaccaaggagatgctctcagagtgcgtggaacaggtattgattgcttaatagttaccctggtgtacatattttctgctaccacatgtatgatctgcaaccagaagtaacataactataaaaatctgcttggacactgcctcctaaaatcttaatacaaagatatgcatcgctcttacgtattcctgaaaaaaatctgcttggacaggcagtcttctgcaattaaaacgtttgccatagaatcccttttgctttgtctcatgttaaccttgttttgattttgtctcctttcctcaccttctatgcagatggagtttaatgcgaaattttatcatgaacaaattgaaagacttcgcaaggacaccgaggagaaagagaatgagtttgagaggttgctgcaggaggagctagcaagagctatagagtgtgatgttgactctgaaactacagaaaattgcaagctaaggtgtgaccaatacgtggttgggacttgggagcagttgaaaatttgatagtacttctgattattcttctattgatcaaatatagatatggtgtctctgtgaatggaaatgctccactccgatatatcactaatccaaaaatattttgtgcagggaggaacagatacaaagaatcatagattgccaggtgaaggatgcggaggagtttgatgctgaacaagatgaattgatcaaaacacacgaagagaagaaggcgaacgtcaagatggagtatatggcaaaggatgttgagctcgaggaggagctttatgccgctctcacaagtctgatggagaaacacaagccggacatcttccaaccgtccagcccttgaagagctgcaggcttgcagctcaccatatatatgccctgctcacaataatctcaagaggtccctctcccaaatgaacttcaatttacatgccgataaattgcttgaaatgctcagaaactctcccgagtggcgtctctgggcaattgtgttgcacccccaatttggtgttttgatctgcaatttttatgcatctgcaaaggtcaatttgattgagttgacaagaatacctgttgctcaactcaaagatgatgtgctattcttgtcaaacatataactctacacggttttgatttcacttgcaagtttgtgaaaataaaagtaaaacagatggttttactttgcaagtaaaagaatttcggaactgccaagtccgtccctaatatttctagagattcagaaacatcacatgtttttgggttactgcaagcatggtttgaagtttggacttcattttggaatgaaaaatctgttcgattgtcatgtatggaagcacatgctaccgtgtcatgatcagatgaaataggatgtcgtatgccgtatgtgtatggtgcagcagtgaattgtccatctcaactctttcgaacttgtaaaatcacatctgttgaaagaatttaaaacgcacaaattaatcgatcaattcgacgacatctacaattctgcacacctaaagatgacttaacatgcatgtgaattgtttgaacttcgaatttcgggcaagaatttggggtatcacaattcacaacatgtcgctatgcaatacccaaatcttgaacattacactactagaatatataatattaacaaggactaaataacgaggacaataaattcctagtcgttaatcatattttggagcagtttcggtagaaaattgggacgtgatgtgtaaccgacgaccacagcttacctcccgtcgttagttttcgttctttgtcatcgttaatagcagttttgatttgcctatcaccgttttatagtaagttgaataaaattttattcgtgtactcccgatccgataatctcgccccccatcttcttgtattcccctcgctcctgctgccgctcacctcggccgccggcgtgatgctactggcgcaaccatcggatccctgcgcacgagctccggcctgtcgctcccaccacccgtgacctccattgctgccaacgttggccgtgcgctctcaccaccaccatctccagatccttgccgaagtgctcccgccaccacaaccccaacggcggtggttcttccccaagttctcaccgggcacacgagggaggaaggaggcttgatttggtgcccccacccccctttggtagaatctccttctcttggcacaagaagtttctatcagttatatgtcctccccttctgcgctaatccaaactgagatcgttccctgctggtttctcctccaaatcagcaaaaatcaggaggttgagagctgattagtgattgctcgctggaggtgctgcctgggggctacatcgagcaaaagggtcacaacaggaaggtaatactatcaaatttgccaggtagttcatacgtgctgattattattaaggtttatttgcatgtctagttgtctactgtgctgcttctccctatcacacaatgtttgatatggtacgttccaccaaattcttgtgcttgtgatagctctgccactttcatgagtaattgaggattacaagcaattaattctattttgtaggtaagcatacttcagttgctagctttaatcaaggaagaaattcataactgtgtatcagtgtgcatgactacaggtaaccgggtaactgggaatgaattgatgccatcagttaagcaggctcaatgtttgatgtgaaattcagggacagcttcactcttcgtggtcctataatctttatcaggattggaattttggaacttaactataggattaatcattgtgttggtaaatgtgtcgccgtgtattaaatttctctttcagtttttagatcaagaattcgctctttgatcaactgttactgaattataatacaattgggcatatgtgtaggaactttgcaacgtttatgtgttgataattatgctgcccccattcatgacctcatccctagtcccccatgaagactctaccaggtgctttcttaactaaataatgtaacatgattaagagttctcctcaactgactgcctggcatgattttatcagaaactaatggatttttgttataagctattgcactgtttatcttctgcaggaacaaaattcaggatgatgcctcctggtccgaacagtttagggaaaactcaatagagccagaggatctacacaagccttctattcattgttttaaattgccatcagtttcatcaaacataattctatctaatttgtgctctgtattgcttgagttaattaatgaattatcatccaaagcataacttgtagtgaacttatttgctacaaagtgttatattgttccatttagctattgaagttaaattgttcttatttatatattgcagtcgaatattgtttaagaaataaatactaagtttgcaaaacttatcaattgataattctagactgtaactgtactaaagtattttgcttctcagtatccttctttttatatttaggtaactgaactaacatatattaggttatcagaacaacatcactggaggtaaattttgctctcaaataagttatatattacatgccaaatataatgtatattaactagtataatccttgccagtggtaggatttatgatgaaatggatgaggaaggtgcagtcgaagacatattgaagggttgtttctctatataatgattagcggttctatccataagacctccagatcgaagaatatttttttgtcatatgtaacattgaagctcgggtgtcccagttagattaggtatcacaatgtatccctgaatattttattacaatcgattcaagaatgatatcattattcttgtactgattgttttgaaatattgctatgttgtgcaataatatatgagattgttaactccaaaatgtgcacttgcaattatttccaagggagtaatggatcttattgtgaattaataatggtgttaatgatgtatcctgaaatttcctaatattagtaaatatgaacttagatgtggtcgtcaatatattaagaaccataaccagtcccagtcattaatacatttacaagcacaaaatgttacggtcgttaatgtattaacaaccgcacataaccatggtcgttaatgtattaacaattgcacataaccatggtcgttaataaagtaacgatgacatattgttcctgtcgttaatgaaataacgatgggaaaaattacgtggtcgttaatactattaacgatggagccttcaatgactagaactttgtagtcgttaatgaccacatttggacctttaacgaccacatttcccatcgctaataatcgtttctctagtagtgttaatcgccattgatgcatgggtaattgccctaccaatctcgcattcatgattttcacatgtctcaaacgtgaagagaacctatcatgcataaactcttactgtcactacataaatatcaaatcagggtgtgtttagttcctgaaaaaagttggaagtttgaagaaagttgagagtttggaaaaaaagttagaagtttggctgtatttagatccaaagtttggatctaaacttcagtctttttccatcatatcaacctgtcatacacacacaacttttcagtcacatcatcaccaatttcaactaaaatccaaactttgcgctgaactaaatacaacctttatgtgtgtgggaaagtttttgatgtgatatgatgtgatggaaagttaggaatagggggaaaactaaacacggcttcagtgccctcacatttcatgtgaatggatcaaagagggtactagcgaagtactataataaaatactacctccgtcccattttaagtgcggccatggtttttcgcgccgaactttggccatccgtcttatttgaaaagtttttgaaaaaatttaaaaacttgagccacaagtaaagtactattcatgttttattatctcgtaataacaaaaatactaattataaaattttttcaaacagttaaaatgaaacacagggagtagatcgataaaatcaaatcacttgcttagtcatgacaaattgattgctcacgattcagcttctttcataaataatgaaacctttgtacttcggcaacttttaaagattcttcataaaacagcagcaacacgaaccagacttctcatgtcttcattcaattcaacaccaacaactagacaaagcttaaaggtcccctgacaaagtgccaactctaagagtccccatccatcactcacagtgacatgtgggcccagctcctcacgttgaccgcagttgactcgttgacagcctcccgggccccaccagacagcgcgaggtgcgcctcctctttaaagccttcgtaaacgaggaaggcgaaaagcggggggggggggggggggggggccaacgcattgccccacggtgaccaaacttaccttaactgaaacatggggcccaccagtgtggaccccactcgtcagctacccggggtaagcggggtggatcgggtgaggaccaaacgagcattccgtgcggccacccacccggtgcggttaccggcgcccccccctccataaaaaaccaaccaaggccacaggcgcgggtccgcttcggcttctctctctctctctctctctctcctcgaaaaccccaacacacacaacgcgaaccccactccgcgatggcgtccgccggcgatcgccgcggcggcggggggcctcccggctccggcgacgactccggtgaggccccgctcccgtccctctcccttgtcccggtggtcggatggccgatccccgcaatgtcggcggcggatgctgctcgttcgcgcgtagggtttatgggggtggttgggttgggttgggtttccccggggatcggtgcgtggttggcgtgcggggtttttgttttcgtgggggtttcgagatgatgtgtgttgcgggggggtggccgcagcgatgcggggggatttgggtgcgctgcgcgggtggattgttcgaggtgattggttctttcattttttttttgggtcgattggggtgtgtactgtgtagggggtttagtgccgtggtgctttgtgtggttgcggattcggtggtctcgtccatgtggttggttcatctgaaggcgatgggttttggtttgatttggttagtttgatccttctgtctttttagagcttcagagtttggtgttgttgggtatttttgggttcctttcggtgaggatttgtgttcactttctatttgaaaaaaagagagagatatatacgtattcaccttatggagcattcagttgtaataggtgggtttttatttgattttgcggctggttcattgtgctaaatttgtgttgttgaaataggatgccgtatgtgattattgtaagatcattgattattgaaataggatgtatgtgattattgtatgttttgaatgttcgcctagcttgctagatcgataattatgcccacatgcttattgtaagtttgtagctatgttaattttgcttccctgcgctcttaggtttatggtgtgacctccttaatttgtgattgatctatgcatgtgtgtgtttaggtctttactactgataaaattcaaaactcttagaactttgcaaatactacttcatgctgaatgattgctctactcagtctggtcagaattaatttacattttgtatagaactgttgatatttatctctatgaatattttgattggacataacattacgaaatatataatgcaatcctaaggtagtgtttacaattgcatttggagaccttttgatatctagtacatatttgtgactggagagagtgttcagtgttctgtattggaaccttttattgctttcatcatacataagagcatttcataattattaatcactggccttcatcagttttggtgtgtgtcaaggagctgcactcgtgaatctgtgcgtgcatgtgcatctgccttataatcacgtgaaaataacatgttatactaatttatgtaaatgccttgtatccagggggtggttgggagactgttgagaagagggtaaagaaaccagcgcaacaagttgggaaggggcaatggggacaatggaattctccaaatgctgcacctgcacctactgcaccacggagtggctctggagcttttcatcattctggaaacactttggttcgacattctgatcgtaggccagcaagaggcactcctaggccaccaccacaaaacaggtctatagaggcagaactgcaagcaccgcacggagttgtgactgcacctctggcaaatggttggcagtggggagccaggtcttgcccacctggtactgaaagcaaggagggtggtcttcctttgtctggttgtgatcctgaaacagacaatgctgaaggttatgacacatcggacgatgataatgatgatgatatgagtgacgatttgagtgatgactatgattctgatgcaagtgagaaaagttttgagactcggaaaaatcacaagttgttcaaaggtttcttcgaagtcctggaggcgttaagtgtagaacagttaaatgaaccaactaggcaatggcattgcccagcatgcaaaaatggacctggtgcaattgactggtacaaagggctacaacctttgatgactcatgccaaaacaaagggttctataaaggtcaagcgtcacagagaattggctagtttattggaagaagagctatctcgcaggggaacttcagtggtaccatctggcgaacaatttaggaaatggaaaggattgcgggaaagcactgatcgtgagattgtttggccaccaatggtggttgttatgaacactgtattggaacaagatgaggatgataaggtaacattttcatttgattgctgttgagtttcagtatagatctgaccagtttttctgcctgacttatatctttatgagcataacttttactcttatcttctattcatcattctgcaattacaggtcttgtctgccacattaaatttgtagtaaatatacatatttttggctattttcttgcttatttttttgtatctcgtaagaacattgagttgattctactgatttgtttacctattagtatcaaaagcaatgcacattcctcaggagcagttactatatgttgacttttgttactcaaatattatatattttttcttatgcactttgatataaattgattagcaagatttatcctcttcatcacacattttggttgaatttattatgttttgttccagcagatatttgttttctcaagtgttaaaacttaaaaaaaaaagacttcaaaattcactctctgttgtgattttcttgcatttatacttcattgtgaaagaataaaaatatgctgagcagtcagggttatctaggcgttgttcattaaaatgtatttcttattttctttattattgtgaaagaatatctgcttgatctattaaatgtgtctgcttttatgtttttattgcattctaatatctcctctttgtctcaatctagtggaaaggtatggggaaccaagagctaattgattatttcagtgaatatgctgcaagcaaagcacgccatgcctatggtccaaatgggcaccgtggcatgagtgtgctaatctttgacagctcggctgtgggctatatggaagcagaacgtttgcatgatcactttgttcgtcaaagaacagacaggaatacatggaacagtgctcacaaggttacattcttacctggtgggaaaaggcagctgtatggtttcttagctacaaaagatgacatggagacattcaatagacattgccacggtaagccatttaactatggtccaatacctgtacattaaattaattaacgctgtgtttttggtgcaattgtcattcatctgataaataactggctttcattacttttatctcctgaattctttctgacgccgattattattggtcacctctatgaagtgctcatgccaaatactagcttgcatttttatgatatgctgcatattcctgttcttcatcttcattggaatgtgatcacaattgatattatttaccgcaatatgtttctactaatgcttcacaacaattcataccttcatttcatttttattacgtagcatgttattatagtgtactcaatgctcatcagctgggtagctttctggtagtttatctctactacttgaaagcatgaatgtctaatctcattccattcaaaatgatatttcccttctgattgtaagaagaaaaattctatactcaaggacaatatgcaagggtaacttacctcttcggggacagcaaaggattagatctgtgcttctatattaataaaccttcagttatctattttctcctagaacatggaatcctatgatttatgctaggtatagattcatcatcattgggttcagcaagagtaatgtagcccattaataaaaaagaactgttaatgcaaaaatttaaatgatgctgatggaccctaatattttattacctttgtgcaatacggataggaggcatgtgcttgtcttttgtcttgtatcctttacctagtttcgttttgttgtttttttctaaataaaatacaccatttttaaagtaagaaagatactctagtttgcagatttctttcttttataagaacaattaattcctgagcattgcatttgggttacattcaaccctctacacttcgatagttttatttcttcatacgcattacaacctgtcaatctgtcattcatcatagcctctctgcatgtcagtttgacttcatatttgctatcctgttgatagtaaaatagaaggggaagtggtgcctgcctgtttgtaataaacaggtcctggcctcccaagtattttcacaacaaatgcaccacccatgtgactgtttatgtatcaattgaacatggccatcagtaatcttgattttcttagcttggctatcttatgattgttttattgtaacattaatgcaaacccctcttttatacctattgcaaattttcaggaaaatcccgtttgaaatatgagatgagatcttataatgagatggtggttacccaaatgaagcagatgagcgaagacaaccagcaactgaattacctgaagaacaaaatggttaagaaagagcagcactctaaattagtagaggatacattgagtgttgttacccagaaacttagggagacaatggaagagaatactattgtacgaaataaagccaaagaaaagcacttggagtatgagaaagaggtaacaattgcttaattggttaccctaatgaatatattttttggtaacatttgtatgagcagcaaccagaactgtcatatacttagtttacatatcagaaatattccgagagaacagatttctgcatttgaaacttgccaatttgccattgtcttgtacccttgttttgatttttgttcccttttcaccttgtggttttatacttcgcagatgaagtaccaggaggaatttttccatgatcaaatcgaaaaaattcacaaggccacagaggagaaagaaatcaagtttgagaagttgctgcaagaggagcgagcaaaggctagacaaagtgatgttgactctggaagtactgaagatcgcaggcaaaggtgaacaactagtttaatgtttttttgtgtgatgtcagttaaaattacgatccttagatcactcttctaggagcaacaaatttgaaatttccatttggaatggaaatgctccgcatcaatatataacctagtcgacattgtttcattgtgcaggaaggaaaagattcagaacttcatagactgccaggtgaaggatgttgaggaatttgaagccgaacgagacaaactgatcaaattgcatgaagagaagaaggtgaagctcaagaaggagtacctggcgaaggaatttgagcttgagaaggagctggacacagccctcacttccctgatggataaacacaagccggacatcttcaaatcctccacctcgccttcgacatgaagaactgcggcttaccatacatttcctgctcatctacaatagctaagactcccatttcctaagtacccgtaaaacttctagcgatgcgaaagcatcattctgtttgggtggatgcatgcctttggaaggaaacctgaaccagttccgtattatatggagtactatcagtttatggttgctgatgaactgatgactgtgcgctgcgcttttacagcaagcgtggaaatcgaatatatatctagtttatctcatcattctgctctgcgttgcatcaactgctgattgagtgcttacggtttcctattagcaacatatactatcttattgtgttaaccctttcatgttgtctttggcatgcagaacgcattttagcctacaaatacaatactagtattgtagtatgacatgcaagctttactttgcacatgttcgacaacgaaatgcaaaggaagatttgtttcttttgcacgttgttgacagtgcaaattgcccaaaatgtggccgagttacatcgcaagaatgatgcctagtaccgtagcgcactatccactatgtcaattcgtcatcattacaactggtttccaagatgttgaaattttggctgtgcggaacatatgttttttacactaaatacttcaatcctgtcggaataagataaaacgtttaattccaaacatcacattgttattgttttccccaaagatataactcgatagatgaaatctctccaaacccattcaaagagagaatggattatcttcttatgatgagacagtaagagctaatgggtcatccgctccacataaattctgaagtaaacgttatctgacgtcaaaactgaacttcattacagtcttaaaaactactccctctaaaaaaaaaaaaaagacaaaccctgatttccccaacttttgaccattcgttttatttgaaaaaattataaaaaagataagtcacgcataaaatattaatcatgatttatcatctaacaacaatgaaaatactaattataaaaaaatttcatataagacggacagtcaaacgttggcacggaaatccagggtttgtctttttttgggacggagggaatagcagcctagtttgcatcaggcataagcccatctttgctagaaaaatgctgcatttatacatcagacatacaataattctgtacaagttggaatcctagattttgaaggacgcccaaactttcaccaagtagcccaaaatcttgatgtcgctgaacatctgcatcatgctatggtttgtgttctttgtcctactcgtttactcatctgagtaagtgtcaaactcaaactgttgctcacctttatcagttgatgctgtccttctcctgagaaagaactggaacagtgtaaccgcagctaccagggctatctcagaatggtctgaagtgctagtcttgacgcagaagcggcctaggttcctgctgtttaggttagcgctgactgagactttcgatccgcggcccattcggaagtctgactgaagattggtgctgattacagtctccttctcgaacgacagagcggtggctgcgactgtgatgctctcttccctcacagggtaatctttccccctgaatgtcatttccaggccacctccatgtgccacttgcccgcagccaaccatcctcccagcattgccgaccaactgaactcgtcgcccgacagtgatggaatcctctaatttggcaccagtaaaatacttgctaccgaatttagtaatggaaatgcctcctccagtagtgttccagggcaaattgtggaacctggcatccccattgacagtacagaccagatccttatttgctgtttgcatattcatgctccctatcaaggagcggccattcttaccgctgtagcttactgaacattctgattggatatacaggtcttctttgtcctttctcatctgccccgcaattgatgcagtggtattcttttctaaatcttgagatacttcaaaattgatcccatcaaatccaatatcatggtcccatccttgtggatctaaaactggtctgaacaccatatcatcagtaataaggtaacggtagcgatggactggataatcagagtcaaaacttgacggaatttccatatctgacatgtgcacaacctctggggacacgctttcttcgtaatcatcaccaacagcatttgatgcatcaacattttgagcttcaacaagcttttgcctcctaattccctccttccactgtttctttaggtacagagtttcacgatagtctagttcatcaagatatgcagatctctgttcttttgacaatttttcatattcagatttcttcagaacacggaatggcggtagctgatcagattcatcctcatcatctgacacttcggtcatgtcaatgccaacatcttctgatcttgatgatggattaggtttaaggagtgatgaaagaagatgaggcagtgaaggcagtctggtatttgcttgtgacagaaggaagctatcttggaacttaagcaaggaatttgcttctgccaacaacttggtcgccccacatagcagtaaaagttctgatacccataccttcccattaggtaaaactctttcacctttggtgttccgtcggcacattggatgattgtcaacaagaactacagggttctccatctgtgtgttagaagcagccacctggatatgacgctgcaccacattcttgcaataacgggcataggagtcatattccagaggataaccatctggtccttcaggaggagatgaagagcagtgagtcatcacaaggacagtgttgaaccacatcgaagaacccaagatatcagttatgagcttcaacagcgggtattcacagtatctactgttaatatggtcgagtcgctcgaagtacaagacgatgtcaggtggtgatcttttaatgaagcgcttgacagcatgtaaaatcttcctgttcttcctctgtctatggtaatgaggcaacaaaccaggtgtgtcgataactgtaactcttattcctttgattgttccatcaatcctccttatcctttcagtagcaggagctaatgcattggtagcaacctttggttcatcaaaaatggagtttatcgtggcactctttcccacaccagtctttccaagtagaagaattcgcaagggcaggtccaaatcaggtccacctggtgcttcttgctctgctgctataactctggctttgttgatagcaaggttggttctcttggaatctgattcgccagctttaatcaagttggcaaggtgcaatctgtacagtacctgtgcgacaacatcagtagtgggaggcactccagttctgtgcacaagccgcaggaacttaatttgaagagcctcaacatgctttagtggatctgactttgtgctatcatgatctggttcataagatggactggatgtgacctctgaatctgatgcgcggatatcattagatggaaatctattggcagacacagtttctacaatctcattttgcatcacgcctgaatcacaagatggaataagggggcattcattatagtattaacatgagcataaatcaataacaaatgtgtcctaaagaccattctattggtaacatgaatgaccaacaagtaacagaatgtcctcccagcaaagcaaatgcatccacaccaatttggcagtaccacagcatataaattttcatcaagagcatctattggtactgggtaaactaatgaatcatgacacaaggccgtgctccaccgacgatggaaaaaagattcaatcctactgaattcgaagacataagatttcctatttcctaatcacaatagggcaacagttcctggtagcacactaatcgaccaccaaacattatacatgcccagaagaactagtattagcgaaaactatcacatatatcatgcaaaggcttgtaatgagcccctgcaccatttagtgaagtccaaaattttatcaatcagatttcagacttcagaggcaatactgtactcgagcaacatcagaaacatccaacaattatcatgcagcggcagactcgaaaacacatggcacagcatgttatccctttcagaacaagaaagaacctaaatagaatctgaaccatggaacctgagctgcaaattctaatcaatcaccataccaaactactactatcactaatcatcatcatcatcatcaagtaagtaagacagagagagtgcctaccatccccatcgcccccgggctgggcggcggcgccgtcgtggtgggcggagagcgagaagggcctcgccgacagcaccgacgagccgagccggtacgagatccagtccctgaagctcatcatcaccaatcaggaatttccacccaccccggctgcataaccagtaccaaaatcctcatcacctcgaaccaacccaaacaaacaaaacagaaaataataattaaaaaaaaccccaatccccccccccccctcctcgaattgaaggattcgatacgggaaccctcacgctacctggcctggtgggaggctcggagcccgcggcggcggcggcggcggcgagggggatgcggatgatggtgtcggagggagttggttggatttgggtggatgagaggagagagtgggtgcgtcggtccaacccagccggaaacggacagggtcgtccgcggcggcgagcgcccggatttgtcacgtctgcgagtgcgaggccgaccgggagatgggggggtcgctgacaggtgggccccagcgatcggtgcgagggtggttattccaggagtgcagctgtgcaggtaatcatagagcaggtccaataagcattttttttgccggtgataatacggccacgttggattctttcatgacctagaacatggaacagagattagaggagagagagtgtgagcccgcgactaattagtcgccggtttcacacgtgctccaaggcgagccaaattgaagtagcgctgctgcttgtcccccacaatactgctggactcataaaaatgaggcagagcgtaggtaaggcaggatgtcgttgaggcttcaagctcgtcggcaagcgactgtggctaggaaggaagcttggcgagcgacacgatgatgactagagtggcaagcttggggacatttcaacgatatgaactgaagcggctggtgagctcagggacattgatcgccccaaacgatgactgaatctggcttggtgtagatggcaagagaacctcgaagaggttgagcagcttgttcttgtgcggagttaagacgaggtcgggaggaggaggattccgggattggggtcgtcagtcgtcaccactccggaagaggaggtagtggccgcaataccagatatcttgacccccctctccaattattaaaaccggtgtaatttaactcccttagtggttttggaggatggttttgctgatgtggcgcctacgtggcggtgttgacctagtcttcgttcgacatggagttgacatgcgcttatttggcgttagaaataaaaacatatgaattggacccatttatcattaacacaaaaacactgtgggacccacatgttatcctctctcctccccttcttcctcctccgtccctccctcttatctctctttctctttctctcctctttctcttccccttcggccggcggcgggtggcgacaactggagcggtggtggtgggctttagtgacgacggcgggcgggagcaatgttggggggctggagcgacgtcggcgagtgggagctgctattgacctcaacgtgttgcttcgtcttggctcgtccgcgtccgttattgcacgaatggacaatagcgccccaagaagctcgtattgcagtgtt

SEQ ID NO: 9427 - DNA, 14258 bp, Oryza sativa
  unsure (1)..(14258): unsure at all n locations
caaaagttggcttcaaactaaatagacactaaacactattgaaattgtcaaatattggtaagcctaatttaggcctcaaaccaaaccaaccttatattttttctgattttaagtgccacgtcaacgccatgtaagcatcatgttagtcgaaaacgccatctaaactgttttaggactggttttgtaagttgaagggcacttcatatatgatattgtagttcagacacgtatttctgactcctaaaaattgagtaacctaaagtgaacttattccgttggctgttgcggtcggcctagaattggctgacgtactgatccagttggaccatatctgcaaataaagaattttttatttataattttttttattaaaagttttacaaaaataattttctattttgaaaattgacggaaggagtcgcctaccgcccttaaaaatcgccctctcagagggcggcgaaaatgacgtggcagacggccgtcgctcggcccccttgccgccctccgctagggcgattttgtactgtgggggggccgcctgcaaatgggcggcgagggggcatggaattttgcaggcgacccccttgccgccctgggggagggcgatttttgcctctccccctataaagcccagtccctcctctgtgaaatttcattatattcactaaaaatccaaaaaaaacaaaagagagagaggggagggcagcagaaggggagcggcgaagccctgctggttcgctcaattcatcacaggtatgctcccatacatcttttgcatttgtactaatatgttatgtttaagtatatatgttgcgttttagttttagttccatatattttagcacatctgtagcacacagcacatatgtgtagatccagagcatagaatataatagtatgaattgagacatagacagtagtgttaattgtaagatgtagtttagtttgatctggagaatgtaacgtaattttagaaatttagagaacaatattgtagagaatgtaacttagggcgtagtacagaaatgcgaggttaacgcagttattgttttcatcaggcacaatgtcaagtaaggtcacatttcagatagttcacggtgaaggaaatattagatttggtccagatggtgttgatctgtcagattttgtaatgacatctaagggcatcgataggcctgcggagagaacatttcagtcaatttatagttggttgttgagaggatttagaatagaccaagaagtctacacaatgtcagtgtcagttgtagtgagtcgtgcaacagaaggttatttttgggaactaatgccgatggacagcactgatgcttggagacggtatgtggaaatggcttttgaacggtcatggcccctcgttatatttgtgtcggtacaagagaaagatataaatgtttcaatgcaaaccgaagatgtagagggtcctatcaatgcaggggatgttgttggaccatcgatgcaaaatgaggaaaatcaaccaagggaggagcaggctatgggcatggcggatgagggggagagagtcggtataattgttgatgaaatggagagggaagattcggataatgaggaagtggacgacgacgcatcatccgatgaggaaggtgatgtaatggccactgattgggcaaatgaggacttctctggacttgttatatcagagggtgatcatgtaccctgggagtataaggagaacgaggtaattgagggtgcaagatatgctcataaggatgagatgaaggaggcggtgaagcattgggcagtttccttgcagagagagtttagggtggtcaagtcaacaaattatgtgtatgaagtgaggtgcatgaaggaagattgtccgtggcgtgtccatgcatataagggtaaatggaatgattattggaaagttagcattgtgatcgagcacaagtgctacttacaaggggtggagaagtatcaccgaaacatcacttcagcttttgtggcaagtgagatgtacagcagtgttgttggtaacattggctttgaaccaaaatcaattattaggcacatcgagaacaaattcaagtacaccataagctatgcaaaggcctggagagccaaacaaaagatcattgagatgaggtatggcacatttgaagcttcttatgataatttgcctcgtttgttagccaccattgcccagaggaataataatacgtactatgacctacatacatttacatcggttgatgatcgaacaaagagtgtgctgcaaagagcctttttctcattgggtgcttgcatcaatgcttttgtgcattgtcgacctgttctatgcatagatggaacttttatgacaggtaaataccgaggtcagatattgacagcaattgggtgtgatgggaacaaccaggttctacctatggcttttgcatttgtagagagtgagaacactgaaagctggtactggttcctagagagagtgcacattgcagtggtgcgtatgaggcccaacgtttgccttatacatgatcgtcatgcgggtatgttgcgggctattgactacttgcagaacggttgggatgagaagggacttccagctaagtggcctgatgttcggagtcggtggtgcatgcgtcacatgggtgcaaatttctacaagcaattcaagaacaagcatcttatggagctctttaagaggctctgtgcacagaaccaagagaagaaatttaatgagttgtgggacaagttggatgagttgacaacgaagcaaacagatgagcaatctcgcagaccactagttgaaggtgacgagcctcccatacctcttggtgcattacatgatgacccaccaacaatgagaaggaggtcagggtcgtccatcagaaatttcactcagtggattgagaatgagcctaaggagaagtggtctctattgttcgacaccgatggatctcggtatggcataatgacaaccaatttggcagaggtgtacaactgggtaatgcgaggagttcgggtacttccattggttgctattgttgaattcatccttcacggcacgcaagtgtactttagggatcgatacaagaaaattggtccgtccatggccgatgacaacatagtgtttggcaacgtagtgacaaagtacatggaagataaaatcaaaaaggcacggagacatcgagttgttgctcaaggcacacaagtgcatcggtatgaaataatgtgtgttgataggagcaggcgtggtatctatcgcaagcaagccgtgcaggaatgtgtcttgaaggcggatggtggatgtacctgcagttgtatgaagccgaagcttcatcaccttccttgctcacacgttcttgctgctgccggtgattgtggcatatctcccaatgtgtacgtctcaaattatttcaggaaagaagcaatctttcatacatggagtgaggagatatatgggttcgggatctcaggatcttacacaacgctgagtgcccaagttttttatattccagatccatctaagttaagggtgaaaaagggtcgacgccaaactagacgcatcagaaatgatatggatgagtcagaagcaggtgggatgactttacgctgcagcaagtgtgatctgcgcggccatacttacaagaaatgcccgaagaatgcagaagttccaagcggcgcagatgctagtccatctggacaggcaagtgatggtaggcgaccacctggtgaaggaacaacaagcaggcgcgcaaggccaaggcgtcgtcgcgcagcaggcgattccatggtgtaacaatgctttcgatttaggaaataaaatgctgttgtgatgtaatgagtgttcggaccgagactacttcgtggcggtacatccaatttgtattacttcttacaattatttcatttatcttgcataatataggacaactactgaatttgttatttccatcttgcataggctgatgccgcacgggatatcagtgccgatatcaccgcagtccaagtgaggttgaacagaggtttgcacttgactgacgttgagcagagggtgaccttcgaccggatgtaggagaagatgcgtgcggtcatgcgcgtcttctcctgtcgcagcgccgtggacgtcgtacctccagctggtccggtacaactacggcctcgcgcgcctaccgtcggagcaggacctcgacctacggcacctatttcgcacggtactgctcagcccagaggtttcttaagttttgtttctgtttttgtacgaaaacatcaccccgtcgtaacttgatgatccatcctcgcaggacctcgtttgccttcgagcgcccctagcttcggatcagtgcgacctacagcaccggtttcgcacggtacagttcagcccagatattagttcatttttgtttcagcttttgcacgattatgtcaccatgttttaactgcacgtttcctcatcgcaggacctcgtctgccttcgagcgcgttcgcaggcacgaccggcgcttccacgagctccgcaggggcgttcgccacctcttcgagcgcgttcgccagctcttcctctcacggagcgtcgatccctcgcccacacggtactttactttttattaatactgttaaatacctgtacgaaactgatggtccttgtccagcaggatttgcagccgggatcttcggtactggggcctcttcgtctcacgccggtaggactggtcctactagccagttctacgacgacgacttgcacggtgcagaccaccacgacgtactaggctcctctcagcttggaggagctccagaggcgcacactcaggagcagccagaggtcacacctgtacaggcaggacgggttggccgtgccgtacccccggaccaactcacgtactcccacgggcacattagggcgcagggtaggagggacaggggtaagaggcctcgtcagtagtgttctacctcttcagtccttatgtgactgtttcttttggcttacaaacttgtaaagcagtactacttttgctattactactgcagtactacttgtgtttgtctcgtctacatagttcttttcattcatatggtgctagaacaacttatgctcacgacaacacactttcggcgctgcacggtagtgtcagatccagtagcgcgcacagtctacaacagcacacatgaaaagcggcagctcgagttatcactatcaactttcggcgctgcctgtttacataaagtgaatcacgcccacgcgtgatcgtcttgtcacatctaatgaataatgtatctcattgagttcacatatattgcagtgaaaacgacgctatataattgacaatctgaaggcaacctcttcatatcttctttcccactagcacacaacacacgaaaatggaagcctattcattgataatacgtaatctagatttgagattatgtagaacattcttcactacaattttacattttggcagcaaaccaaatatgatcaaatgcaattttaccttaccaaatatttggtcgtgaagaaaaatttggcactaacaatccaaatatgccctaaaaattaataaaatatttgtacggtaacaatccaaatatgccctaaaaaataataaaattgtattttaccagtcttggagattttaatcttgtatagttttcaatataaaaagatttgataactattgatatttatacaaaaatatagagcacagtacaaaatcgcccttgcggagggcggcaagggggccgcctgcaaaattccatgccccctcgccgcccatttgctcccgcacagtacaaaatcgccctcgcggagggcggcaagggggccgcctgcaaaattccatgccccccctcgccgcccatttgcaggcggccccccgcacagtacaaaatcgccctcgcggagggcggcaagggggccgcctgcaaatttcgttgacggccgtcgcccgagagcgaacggccgtctgccacgtcattttcgccgccctctgggagggcgatttttaaaaatcgccttcccagagggcggtaggcgagtacttccgtcaattttcaaaatggaaaattatttttgtaaaacttttaataaaaaaaataaaaaataaaaaaaattctgcaaataaacgtgtgtgggcattaaaccgaagaaaattttcaaaaataaaaatgtttaatttgttcgaacttggtagatctcataagaaaacttagtaacagaggagctctagctgatgaccgattgctcaaaaaattttagaatacaatataataagtaagcacaatacatatattacaatttgcaaagtccgtagcccctatacatatactagacgccttctcttgcattcctcgtcgaagccgctggcatgatcggcttgctgagcggcacacgcaagcagaggcctcttcggcgccgccaccgccgcgtccatctgttccatggcgtcgtcggcgaggacctgctcggccagctgcgccacggcgccggctccggcgttggcggccgccacggttctcttgacgcggagcatctcccggaacgtgcactcgtcgccgtgacgcacctcgaagtcgttccaccgcctccagaagtcggggtgagccgtcgggtcggtgaagccggaggcgtagacgtacagcgcccgtgcacggtgggcttcgccgaggccaatctcgaggtcggcgaactggaggcagagcaccctggcgtccgcgtccgggaggccgccgccgtggaggatggcctggtggtatatctccctcgccttgagtacgccgaacagcgcggtggcccgtgcgacgtacgcctcgtagacggcgagcttgtcgccgccggggacggcggccgcggcctcctcgtacaccttcaggacacgcttggcgaggccgaagtcctcctcgaacctcgcgtactgcatgtacacggccgccttcttctccgccggcgcatgccggacggcgtcgtcgaacaggtccctcacccgctgcggcttgctcgcgccgtgcctctcgacgaactttgtcaggtacgccgcccatattgcctcgtcgtgcgggtacttgaacgtcctgacgccgcgctcgtagacacggaacgcgtcctcgaatcgcttgtgctcttggaggagggaagcatggcggagcaccagcagcggcgtgatgatccctagctcgtgcatcctatcgtacacggcgcaggtggattccggcgacccgtgcgtctccatcaggtcggcgtagaagcaccacagcttgagagaccgatgcagctttgtttggacgacggtctcgccgacgccggcggcgacctgcctcctgacctcgagcgacggctctgacgtcgcctgccgaatgagctcgatggccctgttggcattgtgctgtctcagctccatctccgcccactcgcaccaaacggcggcgaggtggtccgccgccttgaagctcgcctgcgtggctctccgcaacacctcccgcgcgctgtcgaggaggccgcggtcctcgtacatcttggcgaacgcgagccagagcgtgtgcggcggcggcttccccgtcgccttcgccgggtcgacggtcttgacggcctcgacgtaggtggctactttcctcgcggggtcctcgtcgaacagcttggccctcgcgtgccacgcctgcacgtcgtgcgggttctgcctgagctgcacgcggttgagcagctccggccggcgttccagaagccgctcgagcctcgcgagcgccatgtcgccgtcgtcgcggtcggccagccagcagccttgaccgagagtgttctcctctgcgtcgccgtgctccccgagctccacgtcaatcatggcgttctcgaagtgcaggtacgcctcgaacaccaaccggaagtccttgacggtggtcgccgtggcgacgccctcctcgaacacgtcccttgccttgccgtggagacccacccgcgcgtagtggccggccaaacacgtccacagcgcgccggcctcgtcggggaacctgcgtacgctgccgcggagtatggcgtcgaccggtagcccggcgacctcctccgggtgctgcgcgagcaggtggcacagatcgagcaggagctggcgcttggtcctgcccttggccgagacgaagcagtcatcgttgacggccgcggcgaggtgatcagcggcttctcgccatcggccagcggagacaaggaaggcgatgaagtgctcggcgtgggcggggtcgaattggaggtggcggcggaggacgcggatggcggtgggaacggggcagccggggagggaggcgaggcggaggaggagcggccacatgcggtggtgctgcgtgacgggcagcgagcggagcgcgcggtcgagggctcggcgagcgcgggtgaggaggcgctggtcgaggagagccgagaagtacatgtgccacacgcgcggcatccgcgacatgcccgcggcgagcgagcgctcgaaggcggagttgagggcggcgtgggcgcggtgggcgacgggcatggcgcgcgcggcgtcggcgagctccgtgaggtacgcgtgccacagcttgtaggagcccgggagagcccgcagagcgcgctcgtagatgaccgagcgcttcgccagcggcgccgagcggatggccgacaggtagcgcgtccagcaccgtagccggaacggttcgcgcaggacgtcctcctcgtatggaacgtcctccggcgagatcatcatcgccgccaccatctctctaactcttttgactgatgaagggccggtctatcttctcttctcgtctcgtctgatcgttgcgttgcgctggatttggatgggcgattgtcgacgaggcggcacgaaccccagatttatagagaaggatgaccggtacgagcccgagtcggtttccacttccagcattccgcgtgaacgccagaagcccagaagtcggtgcccccctcggggttgcgaacaggagtcgtactccgactcgctggcccatgttccccgttgccccgctcgtcaagtcgtcattgggcagtacaaatatcaaggcaaaagccctgctaatcagctaatgtaaaatcttattttaatcttatcttatcttaatctatacctacacctatacctatacctacttttttaattaaaaaataagctaatttttcatccgtcattaaaacatgggcccacgcgatatttcaccactaagagcaagtttaatagtatagctaactactagctctaattcatttatagccaatctaacagctcatttatacaatagttatatactacactattaatatctggtcccacttgtcatacacacactgcgtcttggagtccgtactacagctagctacaaatctgtagctcgctgcccttctctcttctcatttatctacttaaaatatatttgcagctggcttatagcctgctattgtacttgctctaatccgcgagtccagacacgtgacagcgatctctaagggagtgtttggcaaatgggaaagggaaatgatttcccacccatctttaaatcttaaccattcattctcccttttccatttaatcctaacccttcattcatttcccaatcccaatctcaccccctattttccattatccaaacacatcctaacgctctgcaaataaaaagaggaagctggcaagtagctcggccaaagcagaagcagaccggcccaacaaaaaaacaaacatagcccagcagccagcccacggagcagaggagtagcaacccagcacagtactgcgcgacatgtagcaaccgagcattgtagcacgaataataccacctcacttatctagcttgggcagcactagattaaataggaggtttgccagaggctactaacactgataaagtttggaaccatgctgtcgagcgagcgattgctcggacaacgggcctagatcagtgcatcaaagcaagatgtttttgttgttttccctagatcagctagatcagtgcatcaaagcaatatcagatccctagatcagtgcatcaaagcaagatcggatctgcttgcacggcgtgtacggcgtagaaagataacaaagtagatcagtgcatcaaagcaagatcggatctgcttgcacgcctatgtttttgttgtcttcccaaggtcagtgcacggcgtagaaataaagagatcaaaatatcaaagcaagattggatctgcgggaccctactcctgtgttttgttgtcttccctaaatcaggttttgttgtcttcccttgtgttttgttgtcttccctaaatcaggttttgttgtcttccctagatcagtgcacagcgtagaaagagatcaaagcaagattctgtgtttcgttgtcttccctagaacagtgcatggcgtagaaagagatcaaagcaagatcggatctgcgggaccctactcctatgttttgttgtcttcccaagatcagtgcatggcgtagatcagtgcacgacgtagaaagagaagatcagtgcacggcgtagaaagggatcaaagcaagatcctgtgttttgttgtcttccctagatcagtgcacggcgtagaaagagatcaaagcaagatcggatctgcaagaccctactcctgtgttttgttgtcttccctagatcagtacacgacgtagaaagagaagatcattgcacggcgtagaaagagatcaaagcaagatccagtgttttgttgtcttccctagatcagtgcacggcttagaaatgtgttagtgttttgttgtcttccctacatcagtgcacggcgtagaaatgtgttttgttgtcttccctagatcagtgtactcctgtgttttgttgtattccctagatcagtgcacggcgggaccctactcctgtgttttgttgtcttccctagattagtgcatgacgtagaaagagatcaaagcaagatcggatctgcgggacccgagaaacagactagggagacacaggaattatgcaggttcagccaaaggtgtaataccctacttgtgtgtttcgtgttggtgtagttgtcttctctagatcagttgaatacaatacaggttcagccagaggtgtaataccctactccatccggctgctttatttaacatgactgggtgtcgtcgcgcgccatcatcggctttgtctatcacccgccagcatgccacgcggagggcgggtccaccatgattcatgggtattcagttgaatacccaaaatttttgacaaaaaaaaattcatatatgtaatatatatttcatatgtatatgaaaaaaaatatgtaaaatagacttgtttcttcagagaagcccgacttagcaccatcccatcccacctccgtcctctcctcggctggtcggcccattggcccaatagcccatatcagcaaaagggaataatgaaaccctaacctctccttcccattcgatcttctccctggcggcctcccgaccctgattcccgactcccgacggcgcacgggcacagcgacagcggactagcggaggcgcgtcggggtcgcagcatcgcctcccaaccccgatggcggcggcgcccagctggctgccaagctgctgcagctccacggctacccagtggccacgcccgcgcccccgggctgccgcctgccgcgaagggcgccatccgcccatcccntatggcgcccacgcgccgccgcccttgtgggctgtggcgcccaagtgcccacgcagccgcgctccgtgctccggcctcctctgtcctctccaccactccaccgcgccaaacgcccagacggctggacccagatgaaggtaaaactggttaggaacattttggtaattaggttcgaataggatttaggagtttcggatttatagttcctagttgaatccaggatggttcattttatttaggatttgaatccagccatacagggatggttcatggtttatggatgaacaattgaactttgaaacttgtgattcactgatttgtgaggctttgtagcagagttagtgcacatatttagcagagttagcatggttaatacttaaattagaagaccgtagtgttgttttgtaggtttgaaacatgaagaggaaagtgaaggataaagacatcgtcacttattttcaaaatatcaagaaacgaaaagtctctctaaattgtaagatttcttatcatttttccattttctatgctttataaatttgacatgttttgtcaattaatactttagtactgtactttaaaatatgcttaacatatttaatttatggtcaattctatgaatctatgactttacaactcgttcgctcactacgaagaaacatttcatctagttgacttgaaccccattcaactcaactcgatttcaggttttgaataaatccctgatggacggaagggagcgggagtcagctcccttcctatgaaagacacgcatcatgcttataccattatatattatacaactattagactttgtgttggaaaaaaatatctcttccaatttcgaatacccaagttgaaaatcctgggcccgccccacgcctgacatcgcgaagtggcgaagatgtgtgtgcagactcaccgaaggagattcgtccctacgttttgccgtttggtgattctctgaggtgacaactgacaacaagtgagtggccctcctgtcacatcggatgtatagacactaatttaaagtattaaatataaactagtaaaaaactaatttcataaatgagagctaatccgcgagacgaattttttaagcctaattaatccataattagcaaatgtttactgtagcatcacataggctaatcatggattaattaggctacgaattagctcaaggttatggaatgtgttttgtaattatctatgtttaatactctaaattagcgtcaaacatccgatgtcacagggccgtatcgaacggaataatgtaccgaggagctaagcaatttcagaaaacaaaaacatgtgcatgacaaaaaggaaataataaattttaagtggcctagcaaaagtgcctgcgcgatgcaacaagaacagatttatgattgcaatcaaactccacatactccaataaattcaggtttctgtaattcttttaggtgatgaaaattcaggtttctgtaattcttttaggtgatgggcagcggcttcagtaattaatcaaactctagacaaaaaagtaaacaaaattcaagcataatcctcacagttaaaaccaaaccgagatcgaagctgtggttgtttatagggacaatttgaaccaagccacacaaattttgcaaaatttgtgatatgccaccctaaccccttgtttataatttataatatattgcagtactggtctattcattccactagagcgaatcaaaagatataaacagtgctgtaactgaatgcaagtttatgtaaggcagacaacttagggttataagaaaaatagcactaaatttcataaaaccccacctaatatgattcaaatctctactattataaaaatcaaagatatttttgccggtattttggtacgtcatccgtgtatgagtcggtttttaaattcgtttgcttttggaaatacatatccgtatttgagtcggtttttaagatcgttcacttttggcaaatacagaagaaatcatataagaaatctgttttaaaaaactcgcatactaacttgagacgatcgaactcctaactacagctcatgattttctaaaaatatatatccaagcgaacttccacagtgaattttatctttactaaaccatataacaataataaaattaaaatagacttcacccgttgcaacgcacgggcattttttttctagttacataaaaccataggaattttgacatgtgacacataactcagggaattatggtcctaaagtttcataaaaccatatcattaactattttgacatatttctatatcaaaattttataaaatagatgtaacattaatacgatggataatttgtcataaatttgagatgtgattgtacaactcaaatatgtattagatcaaatttaaaatgattaatattgtggtttgtgaaactttagtatcataatacctaggttatgtgtcacaagccaaaatttctatgattttatgtaatttggaccatagtatatgtggttttctaaaatttacgattatatatatgatcccagagggaagagggaagatgaaacaacagaaataaagaatgaagagtaaatttcacaaaactacatgttttgtggtccaagttgcagaaaatcacacgcactttgacacttggcacttgagtacatatatt

SEQ ID NO: 9428 - DNA, 10651 bp, Oryza sativa
agtggatcccccgttgtttttatataggacaactactgaatttgttatttccatcttgcataggctgatgccgcacgggatatcagtgccgatatcaccgcagtccaagtgaggttgaacagaggtttgcacttgactgacgttgagcagagggtgaccttcgaccggatgtaggagaagatgcgtgcggtcatgcgcgtcttctcctgtcgcagcgccgtggacgtcgtacctccagctggtccggtacaactacggcctcgcgcgcctaccgtcggagcaggacctcgacctacggcacctatttcgcacggtactgctcagcccagaggtttcttaagttttgtttctgtttttgtacgaaaacatcaccccgtcgtaacttgatgatccatcctcgcaggacctcgtttgccttcgagcgcccctagcttcggatcagtgcgacctacagcaccggtttcgcacggtacagttcagcccagatattagttcatttttgtttcagcttttgcacgattatgtcaccatgttttaactgcacgtttcctcatcgcaggacctcgtctgccttcgagcgcgttcgcaggcacgaccggcgcttccacgagctccgcaggggcgttcgccacctcttcgagcgcgttcgccagctcttcctctcacggagcgtcgatccctcgcccacacggtactttactttttattaatactgttaaatacctgtacgaaactgatggtccttgtccagcaggatttgcagccgggatcttcggtactggggcctcttcgtctcacgccggtaggactggtcctactagccagttctacgacgacgacttgcacggtgcagaccaccacgacgtactaggctcctctcagcttggaggagctccagaggcgcacactcaggagcagccagaggtcacacctgtacaggcaggacgggttggccgtgccgtacccccggaccaactcacgtactcccacgggcacattagggcgcagggtaggagggacaggggtaagaggcctcgtcagtagtgttctacctcttcagtccttatgtgactgtttcttttggcttacaaacttgtaaagcagtactacttttgctattactactgcagtactacttgtgtttgtctcgtctacatagttcttttcattcatatggtgctagaacaacttatgctcacgacaacacactttcggcgctgcacggtagtgtcagatccagtagcgcgcacagtctacaacagcacacatgaaaagcggcagctcgagttatcactatcaactttcggcgctgcctgtttacataaagtgaatcacgcccacgcgtgatcgtcttgtcacatctaatgaataatgtatctcattgagttcacatatattgcagtgaaaacgacgctatataattgacaatctgaaggcaacctcttcatatcttctttcccactagcacacaacacacgaaaatggaagcctattcattgataatacgtaatctagatttgagattatgtagaacattcttcactacaattttacattttggcagcaaaccaaatatgatcaaatgcaattttaccttaccaaatatttggtcgtgaagaaaaatttggcactaacaatccaaatatgccctaaaaattaataaaatatttgtacggtaacaatccaaatatgccctaaaaaataataaaattgtattttaccagtcttggagattttaatcttgtatagttttcaatataaaaagatttgataactattgatatttatacaaaaatatagagcacagtacaaaatcgcccttgcggagggcggcaagggggccgcctgcaaatttcgttgacggccgtcgcccgagagcgaacggccgtctgccacgtcattttcgccgccctctgggagggcgatttttaaaaatcgccttcccagagggcggtaggcgagtacttccgtcaattttcaaaatggaaaattatttttgtaaaacttttaataaaaaaaataaaaaataaaaaaaattctgcaaataaacgtgtgtgggcattaaaccgaagaaaattttcaaaaataaaaatgtttaatttgttcgaacttggtagatctcataagaaaacttagtaacagaggagctctagctgatgaccgattgctcaaaaaattttagaatacaatataataagtaagcacaatacatatattacaatttgcaaagtccgtagcccctatacatatactagacgccttctcttgcattcctcgtcgaagccgctggcatgatcggcttgctgagcggcacacgcaagcagaggcctcttcggcgccgccaccgccgcgtccatctgttccatggcgtcgtcggcgaggacctgctcggccagctgcgccacggcgccggctccggcgttggcggccgccacggttctcttgacgcggagcatctcccggaacgtgcactcgtcgccgtgacgcacctcgaagtcgttccaccgcctccagaagtcggggtgagccgtcgggtcggtgaagccggaggcgtagacgtacagcgcccgtgcacggtgggcttcgccgaggccaatctcgaggtcggcgaactggaggcagagcaccctggcgtccgcgtccgggaggccgccgccgtggaggatggcctggtggtatatctccctcgccttgagtacgccgaacagcgcggtggcccgtgcgacgtacgcctcgtagacggcgagcttgtcgccgccggggacggcggccgcggcctcctcgtacaccttcaggacacgcttggcgaggccgaagtcctcctcgaacctcgcgtactgcatgtacacggccgccttcttctccgccggcgcatgccggacggcgtcgtcgaacaggtccctcacccgctgcggcttgctcgcgccgtgcctctcgacgaactttgtcaggtacgccgcccatattgcctcgtcgtgcgggtacttgaacgtcctgacgccgcgctcgtagacacggaacgcgtcctcgaatcgcttgtgctcttggaggagggaagcatggcggagcaccagcagcggcgtgatgatccctagctcgtgcatcctatcgtacacggcgcaggtggattccggcgacccgtgcgtctccatcaggtcggcgtagaagcaccacagcttgagagaccgatgcagctttgtttggacgacggtctcgccgacgccggcggcgacctgcctcctgacctcgagcgacggctctgacgtcgcctgccgaatgagctcgatggccctgttggcattgtgctgtctcagctccatctccgcccactcgcaccaaacggcggcgaggtggtccgccgccttgaagctcgcctgcgtggctctccgcaacacctcccgcgcgctgtcgaggaggccgcggtcctcgtacatcttggcgaacgcgagccagagcgtgtgcggcggcggcttccccgtcgccttcgccgggtcgacggtcttgacggcctcgacgtaggtggctactttcctcgcggggtcctcgtcgaacagcttggccctcgcgtgccacgcctgcacgtcgtgcgggttctgcctgagctgcacgcggttgagcagctccggccggcgttccagaagccgctcgagcctcgcgagcgccatgtcgccgtcgtcgcggtcggccagccagcagccttgaccgagagtgttctcctctgcgtcgccgtgctccccgagctccacgtcaatcatggcgttctcgaagtgcaggtacgcctcgaacaccaaccggaagtccttgacggtggtcgccgtggcgacgccctcctcgaacacgtcccttgccttgccgtggagacccacccgcgcgtagtggccggccaaacacgtccacagcgcgccggcctcgtcggggaacctgcgtacgctgccgcggagtatggcgtcgaccggtagcccggcgacctcctccgggtgctgcgcgagcaggtggcacagatcgagcaggagctggcgcttggtcctgcccttggccgagacgaagcagtcatcgttgacggccgcggcgaggtgatcagcggcttctcgccatcggccagcggagacaaggaaggcgatgaagtgctcggcgtgggcggggtcgaattggaggtggcggcggaggacgcggatggcggtgggaacggggcagccggggagggaggcgaggcggaggaggagcggccacatgcggtggtgctgcgtgacgggcagcgagcggagcgcgcggtcgagggctcggcgagcgcgggtgaggaggcgctggtcgaggagagccgagaagtacatgtgccacacgcgcggcatccgcgacatgcccgcggcgagcgagcgctcgaaggcggagttgagggcggcgtgggcgcggtgggcgacgggcatggcgcgcgcggcgtcggcgagctccgtgaggtacgcgtgccacagcttgtaggagcccgggagagcccgcagagcgcgctcgtagatgaccgagcgcttcgccagcggcgccgagcggatggccgacaggtagcgcgtccagcaccgtagccggaacggttcgcgcaggacgtcctcctcgtatggaacgtcctccggcgagatcatcatcgccgccaccatctctctaactcttttgactgatgaagggccggtctatcttctcttctcgtctcgtctgatcgttgcgttgcgctggatttggatgggcgattgtcgacgaggcggcacgaaccccagatttatagagaaggatgaccggtacgagcccgagtcggtttccacttccagcattccgcgtgaacgccagaagcccagaagtcggtgcccccctcggggttgcgaacaggagtcgtactccgactcgctggcccatgttccccgttgccccgctcgtcaagtcgtcattgggcagtacaaatatcaaggcaaaagccctgctaatcagctaatgtaaaatcttattttaatcttatcttatcttaatctatacctacacctatacctatacctacttttttaattaaaaaataagctaatttttcatccgtcattaaaacatgggcccacgcgatatttcaccactaagagcaagtttaatagtatagctaactactagctctaattcatttatagccaatctaacagctcatttatacaatagttatatactacactattaatatctggtcccacttgtcatacacacactgcgtcttggagtccgtactacagctagctacaaatctgtagctcgctgcccttctctcttctcatttatctacttaaaatatatttgcagctggcttatagcctgctattgtacttgctctaatccgcgagtccagacacgtgacagcgatctctaagggagtgtttggcaaatgggaaagggaaatgatttcccacccatctttaaatcttaaccattcattctcccttttccatttaatcctaacccttcattcatttcccaatcccaatctcaccccctattttccattatccaaacacatcctaacgctctgcaaataaaaagaggaagctggcaagtagctcggccaaagcagaagcagaccggcccaacaaaaaaacaaacatagcccagcagccagcccacggagcagaggagtagcaacccagcacagtactgcgcgacatgtagcaaccgagcattgtagcacgaataataccacctcacttatctagcttgggcagcactagattaaataggaggtttgccagaggctactaacactgataaagtttggaaccatgctgtcgagcgagcgattgctcggacaacgggcctagatcagtgcatcaaagcaagatgtttttgttgttttccctagatcagctagatcagtgcatcaaagcaatatcagatccctagatcagtgcatcaaagcaagatcggatctgcttgcacggcgtgtacggcgtagaaagataacaaagtagatcagtgcatcaaagcaagatcggatctgcttgcacgcctatgtttttgttgtcttcccaaggtcagtgcacggcgtagaaataaagagatcaaaatatcaaagcaagattggatctgcgggaccctactcctgtgttttgttgtcttccctaaatcaggttttgttgtcttcccttgtgttttgttgtcttccctaaatcaggttttgttgtcttccctagatcagtgcacagcgtagaaagagatcaaagcaagattctgtgtttcgttgtcttccctagaacagtgcatggcgtagaaagagatcaaagcaagatcggatctgcgggaccctactcctatgttttgttgtcttcccaagatcagtgcatggcgtagatcagtgcacgacgtagaaagagaagatcagtgcacggcgtagaaagggatcaaagcaagatcctgtgttttgttgtcttccctagatcagtgcacggcgtagaaagagatcaaagcaagatcggatctgcaagaccctactcctgtgttttgttgtcttccctagatcagtacacgacgtagaaagagaagatcattgcacggcgtagaaagagatcaaagcaagatccagtgttttgttgtcttccctagatcagtgcacggcttagaaatgtgttagtgttttgttgtcttccctacatcagtgcacggcgtagaaatgtgttttgttgtcttccctagatcagtgtactcctgtgttttgttgtattccctagatcagtgcacggcgggaccctactcctgtgttttgttgtcttccctagattagtgcatgacgtagaaagagatcaaagcaagatcggatctgcgggacccgagctccgactagggagacacaggaattatgcaggttcagccaaaggtgtaataccctactcctgtgttttatgttggtgtagttgtcttccctagatcagttgaatacaatacaggttcagccagaggtataatattgtactcctgtgtgttttgtattggtttagttgtcttccctagataaggaattatataggttcagccggaggtgtaatgcctagtcctgtgttttgcgttggtgtagttttcttccctagatcagctaaatacaatacaggttcatccaaagatgcaatatcctactcctgtgttttgtaatggtttagttgtcttccctagatcgggaattatataggtttagctagaggtgtaataccctacttgtgtgtttcgtgttggtgtagttgtcttctctagatcagctgaatacaatacaggttcagccagaggtgtaataccctactccatccggctgctttatttaacatgactgggtgtcgtcgcgcgccatcatcggctttgtctatcacccgccagcatgccacgcggagggcgggtccaccatgattcatgggtattcagttgaatacccaaaatttttgacaaaaaaaaattcatatatgtaatatatatttcatatgtatatgaaaaaaaatatgtaaaatagacttgtttcttcagagaagcccgacttagcaccatcccatcccacctccgtcctctcctcggctggtcggcccattggcccaatagcccatatcagcaaaagggaataatgaaaccctaacctctccttcccattcgatcttctccctggcggcctcccgaccctgattcccgactcccgacggcgcacgggcacagcgacagcggactagcggaggcgcgtcggggtcgcagcatcgcctcccaaccccgatggcggcggcgcccagctggctgccaagctgctgcagctccacggctacccagtggccacgcccgcgcccccgggctgccgcctgccgcgaagggcgccatccgcccatcccctatggcgcccacgcgccgccgcccctgtgggctgtggcgcccaagtgcccacgcagccgcgctccgtgctccggcctcctctgtcctctccaccactccaccgcgccaaacgcccagacggctggacccagatgaaggtaaaactggttaggaacattttggtaattaggttcgaataggatttaggagtttcggatttatagttcctagttgaatccaggatggttcattttatttaggatttgaatccagccatacagggatggttcatggtttatggatgaacaattgaactttgaaacttgtgattcactgatttgtgaggctttgtagcagagttagtgcacatatttagcagagttagcatggttaatacttaaattagaagaccgtagtgttgttttgtaggtttgaaacatgaagaggaaagtgaaggataaagacatcgtcacttattttcaaaatatcaagaaacgaaaagtctctctaaattgtaagatttcttatcatttttccattttctatgctttataaatttgacatgttttgtcaattaatactttagtactgtactttaaaatatgcttaacatatttaatttatggtcaattctatgaatctatgactttacaactcgttcgctcactacgaagaaacatttcatctagttgacttgaaccccattcaactcaactcgatttcaggttttgaataaatccctgatggacggaagggagcgggagtcagctcccttcctatgaaagacacgcatcatgcttataccattatatattatacaactattagactttgtgttggaaaaaaatatctcttccaatttcgaatacccaagttgaaaatcctgggcccgccccacgcctgacatcgcgaagtggcgaagatgtgtgtgcagactcaccgaaggagattcgtccctacgttttgccgtttggtgattctctgaggtgacaactgacaacaagtgagtggccctcctgtcacatcggatgtatagacactaatttaaagtattaaatataaactagtaaaaaactaatttcataaatgagagctaatccgcgagacgaattttttaagcctaattaatccataattagcaaatgtttactgtagcatcacataggctaatcatggattaattaggctacgaattagctcaaggttatggaatgtgttttgtaattatctatgtttaatactctaaattagcgtcaaacatccgatgtcacagggccgtatcgaacggaataatgtaccgaggagctaagcaatttcagaaaacaaaaacatgtgcatgacaaaaaggaaataataaattttaagtggcctagcaaaagtgcctgcgcgatgcaacaagaacagatttatgattgcaatcaaactccacatactccaataaattcaggtttctgtaattcttttaggtgatgaaaattcaggtttctgtaattcttttaggtgatgggcagcggcttcagtaattaatcaaactctagacaaaaaagtaaacaaaattcaagcataatcctcacagttaaaaccaaaccgagatcgaagctgtggttgtttatagggacaatttgaaccaagccacacaaattttgcaaaatttgtgatatgccaccctaaccccttgtttataatttataatatattgcagtactggtctattcattccactagagcgaatcaaaagatataaacagtgctgtaactgaatgcaagtttatgtaaggcagacaacttagggttataagaaaaatagcactaaatttcataaaaccccacctaatatgattcaaatctctactattataaaaatcaaagatatttttgccggtattttggtacgtcatccgtgtatgagtcggtttttaaattcgtttgcttttggaaatacatatccgtatttgagtcggtttttaagatcgttcacttttggcaaatacagaagaaatcatataagaaatctgttttaaaaaactcgcatactaacttgagacgatcgaactcctaactacagctcatgattttctaaaaatatatatccaagcgaacttccacagtgaattttatctttactaaaccatataacaataataaaattaaaatagacttcacccgttgcaacgcacgggcattttttttctagttacataaaaccataggaattttgacatgtgacacataactcagggaattatggtcctaaagtttcataaaaccatatcattaactattttgacatatttctatatcaaaattttataaaatagatgtaacattaatacgatggataatttgtcataaatttgagatgtgattgtacaactcaaatatgtattagatcaaatttaaaatgattaatattgtggtttgtgaaactttagtatcataatacctaggttatgtgtcacaagccaaaatttctatgattttatgtaatttggaccatagtatatgtggttttctaaaatttacgattatatatatgatcccagagggaagagggaagatgaaacaacagaaataaagaatgaagagtaaatttcacaaaactacatgttttgtggtccaagttgcagaaaatcacacgcactttgacacttggcacttgagtacatatattttggttgtgtagtactacactatcgatgtatagatttacccgcgagatgatgtggttgtttcacctaggacgaggacatggcatcctattaccagccattgcacgaaattaatatgatgccacggc

SEQ ID NO: 9429 - DNA, 36991 bp, Oryza sativa
ctggttctggaacccggccgtgtaccacaggcgcggcgaggtggtcggcgtgcacgcgcacccggagctcaacgcgaccgagatcggcttcacctcgccgtaccgggaggcgttccggagggccctggagcggctgggctccgacgggcggcggcggaccgtggtgctgggcacgttcgcgccgccgcacttcgacgggaagccgatctttgacccgacggcgtgcacgaggacggagccgtacagggacggggagaaggaggtggggagcatcgagagggagatgaggagcatcgtgttcgaggaggcgaccgccgcggcggcggcggcggcgacgatgagggtggaggtggaggacgtgacgaggctggcgacgatgcggccggacgggcacccgggggtgtacatgcaccgcgacccgttcgctggcggcggcgcgcggccggagcggatgcagacggactgcctccactcctgcctccctggcccggtcgacacgttcaatgagatcttgctgcagattctgagcaggcagcggtgattcgagccagtgcgtgcgtgcgtgcgtcggtgcgtgcatgggcattgtttaattgtgaattgtgactgtggtgtgtacgtgcagttcaatttctcgtttatttcgtcctgctaattgtaacttctgtgtgttctggtcaactctgaattaaccaatttcatggcaacagaacaattcttaggctgtgttcgcttgtgctggctgagaatctttccttccagcatggaaaacacatgattaattaattactacctccatattttaatatatgacaccgttgactttttatccaacgtttgatcattcgacttattaaaaaaattatgtaattatcatttattttattgtgacttgattcatcattaaatattctttaagcataacataaatattttaatatttgcacaaagattttgaataaaacaaatggtcaaacgttgtttaaaaagtcaacggcgtcatacattaaaatacggagggagtattaactaaaactaacttgagaaatggattaatataatttttaaaacaacttttctatatatatattttttaaaaaaacacaccgtttagtaatttgaaaaacgtgcgcgcggaaaaggagaaataagagttgggaacccctacaaacgaagcacccttagaaccgttaaatccattggttttggtgttggtctacatgctaaggacagtctcaatcctccatcttagagcaagtataattgtaggttgtaagccgactaaatgctgagatggaggagagaagagaggagagagaggagaagcgggctgtaaacttacagctggcttgaacataaaaatcaagaaactctatgagagagacaagtggatcctatattaattgtaaagagctaactattatatgggtgggttgagagaagactgaaaaacctttatagccaacaagttggctgtattattagccttgctcttagttagttttcataacattaaatataatgccatataagcaaataactaattaaggtagctagagaattaactaggcgaaataaaaaacgtgaagaaaccatttctcatataagaaaccaaccctacgtagaaaccaacaatgaaaacaacaaaatacatggatgaaatgagagagaagggagatgattggatagagtttattttgaagaaactactcattgagtatattttttttatacatgatatctaagtgacatgacgagtatgaaaaatattcgatagtttttgggttgggattgtcgtatgttttggtgatgtggcattcaagtgtgtacaaacatttgcttcattataagggaggagtagaatgatgagaggacaaaatttagtgatatgggagctaatgtatgtgccatgacaccgaaatcacggtggttttggttctacgctttgacattatcttttaaaaaaatattgtggagctgtgggcttaactaatttcagcatcaataaatgtcaagtgcccaattttgtagtccatgaacaatttgaaatgaacaattaatttcaagactacggttcatgaaacagatttttcgttcatgaacgtgttacatattcatcactacttcaaaagaaatagtttttgatatatttcagaaacaagcaaatgactaatttggatatatatatttaaaacgaaccgccctcaatggcgtgtaatatttccctaaatggaatgatacaagaaaataggctcgctagttggctcgccttgttagttagcccgtgcatataactttagaaaattcatacccaacatggtatattattttctatttttgtgtaacctaaagcagataatatttccccttgtcctatgcatattgtttagggtataatcattaaaagattgtgattctgcgttttgttgaaacacacttcatttatgtaaaaagactatggttgtatattgactaataccctcgtttcaatattgaaagataatatttgcctctttttaattaatacatactacctttcccttgtatttaattgttttaacattattatttatttttgctgtcaattttttaggccagtttaaaattttatttggaaatagaagtgttggtattttatttgataccaacattttttatcataagatgaggatattggtatttcaaaattttagaacacagagaagtgtaataacaaaaaaaaagaaggaaaaagaatgaaattggggtgggagtttggcccaagccagataggcccagtgcctctcctctgttgttgggccaaccaagttgcagcccaagtggccagttcgattcgcatgcgcacgacgtgagtaggggcaggggcgcgagcacacaatggagcggagagcacgcgtcgtccaactattggtgccacgtgtcatgcacttttgcatgaaaacccgccggctttagaatattagatatgcacaaggaggccacgattgattcagaatggttgaccttaagaaatgggcctgttttatttgctaataattgaatggctgaatttttagataatggaatgaaatattccgacagccaattattacaaggttcgcacaaaagcaaactcacactgtgagtatgtagccaaagtaacaaaaccaaaagtaaaagcaaactaataaaaaccaagcaaggtaaagacccaacaactattgaattctattggtgaatctccacccgaagttggcaaagagctacatgatcgtcgactcaagtttacgacacgtatcctttattagcttgatatgatcatcatacctttgtagttaagcacattcccgaaagtaatatgttgccctgaaaagaacctgcaaataatgaatagccgaatgttttaatttgtcagtactatttgagattacaaatgaataaattagctatcataaagttgaaaataaatttaaaataatagtttttttttaaaaaaaactcatatatatatttaaaaagttcttgtgaaaatcgtgtgtcatattaacccattatttccttttattcattggaaaataattgtttgcgtcacgtgtggatatccgtgtgtctatttttctttggttagctctagatctcaaattaatgactacccctgtttttctcttttgctcgatgagtttattttacagtttttgaaaataattgaaatgcgaccttggtcattactttttataactttgcactacgatacagtagcaaaacataatattatgaaaacattattactgaaaacctagatgatttcagatatactagtgatcaaacttcggaaaatttgatggcaggaatttttcaaaacgtcaaaataataataacaaaaagaatgacagcctagcttgtagtagtagagaaaaataagagtcgactaatactaaatcaggtgattacttgtactaatttgtaaaccgtgtgagcgtccgagcgatgatctagccataaatctttccgttgactctcgcgattccaaacacgatggcttggaattggagctcatacttcgatccattccgttaattaatccagaaatactccattaggcacttcatcattctccatttttgtttgctcctacaagaataatcagtagtgttgtgatcgcatcatcaattcattattcatcatacagcaatggcagctgcagaagtagaacacagcggcagctccctccccaagaagctcgtcacttttgctctctgcgccatcttcaccttgtccctcatctacttctcctcccctcctctcatcatctcctccaccaccaatcttctctcccaattccaaacacgcgcacgagctagaaccaccgatttttctactcatctcccaggtaattattaggatttttttttctgagctcaattgagcagcatttcttgcgatcttgattggtttcttgatttgtttttagactcatttcccaggtaattattaggattttttctgagctgaattgggcatcatttcttgcgatctcgatcgattggtttcttgattttgtttttagattcatctcccaggtaattattagattttttttctgagataaattgggcagcatttcttgcgatcttgattgattggtttcttgatttgtttttagactcatctcccaggtaattattagatttttttctgcgctaaattgggcatcatttcttgcgatgttgattgattggttatcttgattttgtttttaggggtagctgtttggaagcaatgcgactacagtgatgggaagtgggtgtgggacggcgaccatggcggcgccgccgccggcggcggctcgaggtacgacagcgagaactgcgacatgaagatgacgtacaagtgcgtcatcaacggcaagccggacggcggctaccttcactggcggtggcagccggcgtcgtgcaacctcccggcgctcgacccggcggcgttcttgcggctcctccggggcaagcggctggcgttcgtcggcgactcgacggcgcggaaccaggcggaggccctcgtgtgccacctcgccacggcggcgcggccggtgacagtgcggcgcgacgaggagcggctggggcgcaagtctggcggtgggcgttcccgtcgccgcacgacgtgaacgtgtccacgtactggtcgccgttcctggtgcggtcggaggggcactcggaggactacggcatggcgcacgaggtcgtcgtcctcgacgcgctcaccgagccgtgggcgtccgacctcgccgccatggacgtgatggtgatctccgcggggcactggttcccccacagcgccgtctactacgacgacggcgagatcgtcggcgtgcacggccggccggacatgaaccgcaccgagatgagcgccccgtccgtgtaccgcaaggtgttgcgccggacgctggagcacgtgatcaacgccaccatggcggacaagctcgagctcgtcgtggtggagacgatcgcgccggcgcacttcgacggcaggtacagctggaaccaccgcgacgcgtgctcgcgccagaggccgtacgacggcgacgtcgacggggaggcgaaggtgggggacaccgaggccgagctaaggaaggccgtgctggaggaggtggcggcggcggccacggcggcgaggcggcgctgccctgggctgcggttcgaggtgctcgacgtgacgaggctggccgccatgcggcccgacgcgcacccgggcgtgtacatctacaagaacgcctacggcggcggcccggtgccggagacggcggcgaacgactgcctgcactggtgcgcgccggggccggtcgacacgttcaacgacatcctgatgcagatgatcgccggcggctagctggccgccgccgcccgccgtcgtcgagctcgatccggcacgtgcggcgcggtgtgtcgccgcacgccgcgttgcatggtctctgcgtctgcgtggatggtggatcagatcacgagaatccgaagctgtcggttttgttctgactggttcttgaatcctgacaattgactttggtatgcgttttttataagcactttttcagttccataaaaaatatttcttcaaatacgtattactagagatatataagaatatgtctatattcaatatgagattaatttttgatgggacgagattgatttttgttagatggagggaatgttcttctgccaatgggattcagaatcgcagtttgcagatgcaacgtgtgctgacttcaatctcgatgccattgattggcacagtgtacaatggtctatttcaccttgaatataagcatttttatattatttagcagttaaggaaaaaaagcgtgctgacttcaatctcgatgccattgattggcacagtgtataatggtctatttcaccttgaatataagcatttttatattatttagcagttaaggaaaaaaaggctttagagtgtttgtacttgtagacagaggaaataggatatatacggccattgaaatagggaacttagccctgcaaacaacccaatctgaaatataagcatttttatattatttagcagttaaggaaaaaaaaggctttagagtatttgtacttgtagacagaggaaataggatatatacggtcattgaaatagggaacttagccctgcaaacaacccaatctgaaattcgctccataggagatttgagccctgcaaacaacccaatctgaaattcgttccataggagatttgaactcaagaccatagggtactactcaggtcactataaccactaggctatatccctttcgtatatattttattgagtatgtggtgtgttatggtgctgattttattgcaaggaaatgttacaaatttcaatagagaagtgctacacgaagggatccttttctatctcgtcctatacaaagggattgctagaaatataccattgtcacgtaataaaagtgcgagtacgtgtgatgccacgcggtgaggacgtgagaccgcttaatctcgtgcaacgaggatgcaatacggctacttcgcatccctaagagtatctccaacagcttcttcaaatcacactctccaaacacccatatagtcagctctccaattgatttggcaagccaaactcattcctcacttcaacagcctctccatctacactctctattatgagcctacgacactgagacccgcacatcagcctttattattctcatggttgtgtaggaggcagcatccttatgcgccatttcgtcgaacaggttgcaggcaggccacatcggcatgcctgggcatgtatctggtaggccaagcgggcatcgcagtagctgaggacggagcaggtgagctcgttggcggcggcggtggccgggtggacggtgagagcgcggcggagggtggcggccctggatccggaggcagagcaacggaggcaaatatcaatcgatcggtatgggttcatttcatgggttgggttcggtgggggattgcaatgcagactgcaattcccttctctctctctctacactttcctcttcctcttctctcttctatgcagtggcacggattctatgtggcggcggctctcttcggaggaggattctatgtggcggcggctctcttcggaggaggattctatgtggcggcggctctcttcggaggagaggtcgatggtggtggtggcggtgttgttctactgggtggtggtggtgaagccggagaggatgtggtaggcgggggaggacgccgacggggagtaggagggcgccagcgcaggaaggggaggggagcacgcggcggaggtggagcgcacggcggaggagcgtggccaccatggttggggaggcgaggtgagaggagaggatatgggaggaggatgacgacgcggcggcctcgcaatcagacgacgacgcggcggagggggggcgccggcggagggacgcggcagagggagtgatgccggttgtggctggggacgttggcggctatggatgcggcagcgccggacttggctggggacagaggcggcggtgccggatgtggacacggacggaggcaacggcggcggttgtggccggggacggaggcggcggggatgggctgtgcgggaggcgagagcgaaggaagaggggagcgagacatgtgggagggatagtgcgtggggccacagttggccagttccatgggatctttagctagccgaatggcttggccaatcaattggagagtatttttttttctctatgttagctataatttagcttggagagccatttggctactctgttggagttgctctaactagctaactcagtgattaatagattaatttgtatcattagaaattaattaattaatgttatttctttaataagcatcattagtacttaattaatcgataatatggttgattaatcactaatcactataccatcctgctagttggtgaagtgagactgcactaattattgccatttattaaatcaacatcattaataataaattaatcattaatctggtcgattaatcactatcattgtacaatgtcgcttgttggtgaagcgagacctccctcgcgccgcgggtgtcgtcacgccgtcgtcattttcaggcaactgtttaacgatatcatatcgttttcgcactttccctcagcaacgatgatatgttatatgtttgtgccaaaaaaatatacccctttatatttctgaggaaaaatagtaaataaaaaatatattttcaaatttaattataaggtattacactcggactagagtgtggtatcctcgtcatcaccttaaaaaaaggcttctatgactatgtcctttttttttaatcttaaatgtgctctttattagctcgttggtttggtacgatcacgagacaccagtacatttacagactctgggagggggtcagcccaaacatacaagtcccaacccacacttatacgagcaatgtcaattttttttaatgtctcacacgttgtattgatagagcagaaaaaaattacaagattacaaccctgaagggtcgtaaccaggaaaaagaaaaaaaatataccaccacccacacaccgatagcaccaacacacaagatcgggagaaggctaacaccggaccagccgccgctaaacgtgaccgaccgctactagaccaacaaaggaacacatacgagatcacccaaaagaacgccctcacaaccaacgcaaagccaactcctagagtgtgcttgcaccaatcgttcgagaggcttcggctagggtatgccaaaacgacgtcttcaagaagagaagcgacggaaaaccgccgccgccgtcagtcgggatcaaaaggagtcaagactgggctttcgcccggcaaccacccttgagggatgagactgcatgacaatgccctcaggagggggaattaaccatcgttgtcggtccggccaaggccgggctgggttttcacccgctacttaccacctgcgaatccacggctgatgcaccgatactccaccaccactcaacctctgccaacatgtgggaccactacaccgacgccccccgccggccagccttcgtgtgccgaagaccacgccacattcattggcagctcctcctcgctccgaggtcgccttctccaccgccggccacgcctctcgcactaagccggcctcctccaccggatgtgcctctcgcaccaatctggcctccccccatcagccgcgcctctcacgccaagccggcctccatctccaccgcctgcgcctcttgcgccgagccagcctccgctgccatcggctgcgcctctttgcgccaagccggtctccaacccctcctccaaacgctgtcgcgtcggccagatgcagtcatctgccacgccctcggctagccgtccgaggctgccatgcctcctcccacctcagccaccgtgcctcctcccaccgccgtctgtcgctgcagccgtcaccagccgccgcagccaacagctgctgccgccaccgccgtcggcagtcgtctgccgctgccgccgtcaccaaccaccatcaccagccgccgtcgccagccgccatcgctagccgccgcagtcaacagctgccgccgccaccgccatcggaagtcgtcatcgccagccaccaccgccgctagctgctgccgccaccgtcgccagttgccatcaccagccgccgtccgcacccatcactgctggccaggcagtgtccgagacagatccggcccggcaaggctggatcccaccgtgtgggggccggatccgtggccgccctcgccggggcgtgccgccgccgacgagcaatgtcatgagcacaactattacaagaacgacccgcaaaagacagcttagcacttgggaactctaaatggagcagagctctaatatgcctgaagagcacgccacccggagagcagtcaaaatctgttgatgacaaggcacacagcaatgcagagtaatcagtctgatcaaaatgcgagaaaccatggtgagctgtgatccgtagagcatgcagacaagcttcattctatgactatgtctcgacgcccctggacatgtccaacccggacggaatagtcaacaccagccacaccatttattcatgctggggtcgtcattggcggggagcatgttacggggtaagaggcgaggaaaaggggatcgacgatgaaggtcatctgtgccttgggaatcatgtttggtacgacgattctcaaaactattgatacctggtacttaaaaagcatcagactcggtacttggtaggtactccctccgttttacaatataagtcattttagcatttctcacattcatattgatgctaatgaatctaaacatatatacctatctagattcattagtatcaatatgaatatggaaaatgatagaatgacttacattgtgaaacggagaaagtagtagcgaatatcaatcctaatatatatctggtattcgactagtactcatccggtatcatatggttttggaataagatcttgtacaaatgtacaataacaactcttatttcaaaatcgttaataacaacagcttatatagttatacagaatcaagttgctgtaggaccaggatgtcagatcaagcgttcacggatccaggccatgtattatttttccaacgagaagtgcacaaaagggatgtagtttttcaatctgccaagagggctttcttaacccatctctggatattttgcagtgggaaaaagtatatcgaaggtcacctcatcttgtcatcatattacaaaatcatctcccaaccgcaaaatcagatatatgtcatctcttaacttataaaaccgaatcatttttgttcaatgtggcagctgagtcaacgagggccccacatatcagtgaaacccaacctcttcctctcttcctctcttcccatctctttcccgtgtgagagaccgacgggaaacgatagcgtgggcggcgccccggcagggagaacggcaacggagaggagatacgtagcagcggcgcagacggagaggagttgggtggtagccgcgagaagctcctccgcctcccaccacagctaggatcactcccgagctcctctagagccgcctccaccacggcctccatatgcgtcgcggtggccccgcgagcccatggtacgcatggaggaggtgaggctacccccacgccgatgctgccgccgagttcaacatcatcctcaatgcccatctcccttcccttccccagtactcccgcaaccctacctcgaacgatgcgggaccgtcactggctcaaggaagaagggacaagatccccgcgtggctgcggcgtgagggaacagacacactgccgccgtcgccatcgtcgatgacctgaatgccctgagacatggaggggatgccgaaggtgtgatgggcgtggagcgggacgttaagctcggagacgacttggagcatggagatgcgattgtggaggtggtcgatggcgtgggggcgtggcgaccatggggacggttgggtggagcgtgaagaaggcgtccagttgcccgcgcccctcctcgccgtacaacttgtggatgaggaggtggaagggcccctgctcggagaggggccgtgacgggtttgacggggacaaggtccataccgcgcctaccggcgcgcatcactagcgacggctagttgaagcttcgggatgacacgcgctgggccgccgctcctctcctctgaccacgactcctctccccactcattttaaccatcgagggctcgtcatcgggcgcgcctcccctgtcgttggtcgccaagaagagagaggaagtgaggcggtcgcgtcgtgctcgggggcggcgcccgtgggtctaagccgacgcccaactcctctccgctggtgctggtcctctccccgctcgtcttcaccagcaagcgcccccaccgccaactcgtgcgtctttggttctccccacctatcgccgccagcgctctccccctaccgccgatcactaagaagaaaggtaaaaagagaagggttagtcgctgacatgtggggcccacgtgggttctaagctgacttagctgccacgtcgcacaaaactgggtcaaaatcacctaaggaccaaaagtgatacggttttataagttaagggatgacaatgataaaatgagggaccttggatgtactttttcatttgctgtttaatagtccttgacactttggtatgggcctaaagtaggtttccaaagcaggcctagtgcttgactatacgagacaatcgttagttccatacgtcacaccagataaatgggagtaaaattgctaactgttgatatgttttatcttactatatgttcaacaacaatacataattatgggaaacatattatatgcacataagttttctgtgcacaccaacaaataaatatcacgtaaaattctagaaaaaaataaaatgtactttcaatagtgctatttggtaaaatctaaaccgagagcgctctcagattaatattaaagagcgacgcatccgtgagagagggttcacttgcaactagtacacctacgtgagagatggtctagttgtttactactgcataaagtgtatctcttttttttcttgttatggacttttctcttaaaatatttattcaatctacaatctaattacactattatgtttgttgtaattaaatctttataacaagattttacatgattatattataataaaaaatatttatgttgtaaattacttttatcatatatgtaagttacttttatcatacatataaattacttttagatttgattaagttacgttttagacattcagtgaacaatatatatactttactttatcgttagttctatgatatgttgattagatttaatttctagataaacttaggtttttaccctctataatagatttacttttgatatcgtgacaagttatttttttaagttacttatattaaattacattactatttattgaacttacttttatatgtctaagaagtaatttaatgaaatctaaaaagtaatttaatgaaatctaaaagtaatttagatatattataaaagtaaattgtatttttcataaaaaatataaggcaaattttgctacaggacatcgcgactttgtggttttagctccaggacaccgcacgaagttacttttagggaaaaacactctcaaaacatggctatttgccagtggacaccgcgtctattaaaataataatttctggttgaagagaagagagaaatcgtgtgaaatattaaaaatacccttgaacccatatgtcatctctcttatctctcttctctttttctccctctcccctcaccgacagcagctagccggcagcggcggtagcaacaacagcggcagtagcagcagtaaacggcagcggcagcagcagctggcagcggcggcagcaacagcagcggcggcagcagcagtagcagccccagtagcaagcagcagcggcggcagcaagagcgccagcagctagccggcaacggcggcagcaacagcagcggcagtagcagcccgctccacgcaatattcaacgggatttgcacggattggttagagttcgccggaaaaataggagatgaaatccgcttcgaatccacgcaatattcaaagggatttgctccaattcttgaggggaatgaaagaggaggataagacgaagaaatcccctcaatcaatgtttgaaacgagcaacgggattggccgaatttggagggggaggtggcggtgtggcgcacgggcatgagagctggaggttgaagacgttcagtagcgcgagggagggaaattagactttagatgtgcagggcaatttggtccggtcgcgtcaaaatatgggcccactcaagcctagtcagcacgaatacactaaacaaatgggcgcggtgtcctctggcaaatagccatgttttaggagtgtcttcccccaaaactcacttcgtgcggtgtcctggagctaatttcacaaagtcgcgatgtcctgtagtaaaagttgccaaaatataatcatgtgagatcttgttgtaaagatttaattgttacgaacataacggtgtaatcggatcataaatcggatgagtgatttaagagaaaattctataagaagaaaaaaaacatgcactgttgggtgtactagtagcaacaagagaggtcgctggttaagacaatctagcttacatctcgttgtagtcatgtcctatttatatctatgaaatctcatgtttaaattcattatattttagccgtatagaaggtaaaattctgacaaaattttgttatggcaagaatataacaaatttaaatataagaatttacaaacttttacttttataactatcagatttttcatttttatggcaagaatataacaaatttgaatataagaattttgttacatctaacatgcattgaatttgaacatgagatttcatagatatgcataatactattaaaagtacatgtcagattttttagaatttttcatgatatttgctagttggtgtgcacagagtgctcacgagagaaacttgtgtgcatagatatgtttccggttatatgttcggttatatgttgctgagttaattgctagagatcctgacacgagatttcgttgttacaaggttattggttggactgctagccagtttttagatatctgatgcatgcatacatagaggagaaagtttatttgttactcaaggtcaaggggacgtcccccttcattttacatttggtcctatagtttgaatcaaataatttcttgttaatccagtattataaccggtcataacatacggttgcgattgttgctgcttgggggatatgtcgaaaagttatgtttttattgataattgttggtagcgtgaaagattgaaaaagccgtcaggtgtgctcatcaattagattaattgaacatcaaagggccatgatgttcggccacctgtccattccctgcaacaactgaagtactgaactgaccccttttcttctactttgtgttcatcgactcctgtaacatagctcaatgttgaaggttttccgttctgtaaactgcaaatttcaagaaaccaagagtatgaccattaattgcaatattcagaaatttctttcagttgttgaaacgttgtacgatgaaaaagaaaaaaaaacattgtaagaacaaatattccattggagttcgaatagtattacacttgaaagttcaggattttaggatatctggatcactgtttatatattcagtactactagttgggaaagcattagcactatgcctatataatacatcccattccaactgataaaaatcgacaggtgagacctttgcttccatggaagctagcatcaggtcagcaaaaaacaaatgacgccacctgccatctgttagccagcctacctcatcaaccatccacgggtcatttctccctccatatccaacacacatttttgtgcatgctgccatcccaagctttctcattttctcagatcatgacgcatatctatttttttgatagtggaattcttttcagaagctatagccaattattatagagtttacgggacggataactacaaattacataattcaagacaagaagacaaccataaagatacaaatcttcatctatggttgattagagtatgcataacctaccaacaacttttaagttgtacttagtctttgcgaatggcatatagtctagtggttgcaatgacctgagtagctccctaagattctgagtttaaatctccatagaagcaaattttagattggtttgtttgaaggggctaagttcctaattaaggatgtgttctttccggtgagttcccaactcacctacctcgtttttcgcgcacatgtttttcaaactattaaacggtgtgtgtttttgcacaagttttctaaacgaaagttgctttaaaaaacatattaatccatttatccatttttcaaaaaatagtaaatacttaattaatcataagaaaatatgtcggctccgttttacgtgtgcggtctcacctcccaaacacagccttaaaaggttccataggtgcagatttcagattgggttgtttgatgggctaagttgtcaatataaaaggctgtgtatattcggttggatatagaggccgggtaaaaaattctcttaaaaaaaaagttgtgtttagtctttatttttctcaaaccagaaaagtggaatctaagaaatcagcgaacacatataggcatatagctgatgtaaaacacggctcacaacgatcatcatcagctcgtcacatcacaatctcacaattctctcaggattggctcaaacacggcccagcaaaagtacagcatagtgacatgcttccggctgggcgtacatatatacgatctgaactctgaagtctgatctgcaactgagaagaaaccaatgcaaaaaacaaaaaacaaaaaaagaaagaaagaaaaagctagctactagcctactactacctaatggttaaaatcaagaactctttgaagcaaagtgagacgagacgagacgagctactgaactgaaccatcggcagaagtgtgtagtttggtgagctactagtgtcacagcgtgacagtgttaggctttaccagaagtgatgagccatccagcagccagcagtgaccatattattctcctcaaacgtccaccaaacactgcaatttcaataacacgtaaccggtcgatcgcaagtactccctctgttaaaaaaaacaaacactgattttcgtgtctaatgtttgaccgtccatcttatttaaaaaaattaaaaagacaagtcacgtataaaatattaatcatgttttatcatctaacaacaataaaaatacgaattataaaaaaatttcatataaaacggacagtcaaagttgaacacggaaacttaggatttgtctttttttttttttggacggaaggacgcacgcacaaatccttcaaaaagctggctgtggctgccggcattttatcgtcgtcatcgtccacacgtacggtgagtcgagtgagctagccatagctagctatgaagaaggcggccgccggcggcatggcgcctcttcctccgtcgtcgtctcctccgtcgtgcaaagccggcggtggtggtggcagcccgaggtggtcgttgcttcacggcggcggcggcgagtggggcgtcgtggtgcggcggaacgtcgtcaagtcgtcgtcgctgctgctgctggtgttctccaccttcttcgtcttctccgtcttgcgctcgtcgcagacgagcttagtcccgccgccgccgccggctgctgccggccccggcgagccggcgctggcgcagagtggtcacgacgttgccggcgatgatggcggcgaacatgtcgccgtcgcagtcaacaatgtggcagctgagacgcagagcacgccggatgacatctcgctgccgtcgacgaactcatcggctgcagctgttccaacaacaacaaacaaagctgaacaacaacaaacaggtgatcctggtaggtgcatttcaatagtgtattcattattttgaagcaataaacactaagataaattctttgtaagcagtggtagagccaaaaagtatcgaagcctaaagctcgaataggactcaactaatgagatattattttttttcaaaaaatatacatgatgatttaagagaatttaaacgtcaagccaagctatcctaggtttgcctccccttctagatgtaaaaccacataaatcttgatgcatattctctcgtttcttacatgtcacaacttctcgttatttcgagggttaaactttttggtttagccgatttaatcagatgtcaccgaaaaattagaaatttcggtccaaaattttaaacaaaattcaattgaatttgaacaaatattactaaaatttatgaaaaaaattgaaaatttttggccgaagtaatatcgtatcggagtggtccaaaattaccgaaatcagtccgaaaattccaaccatggttatttggacgcggttggtaaataactaaataagggatcaaagtaaatttttaccacgacaaatgtgaggcatttaactttgtgatgtttgatgtgtgctctggataatggcaggagcgaacaacatggaggagaaatgcgacatgtcgatggggaagtgggtgagggagcccaagggcccggtgtacaccaacacgacgtgcccgacgctgccggacttcaagaactgccagaagcacggcaaggatcccggccacctctactggcggtggcagccccacggctgcgacctcccgcgcttctcgccggaccgcttcctcgccgccgtccgtggcaagcgcctcgccttcatcggcgactcgctggctcgcaaccagatggactcccttctctgcctcctctctcaggtatatcatcgcacaggatttgaaatttcggtaatttcgcccccaccggtatgctcaaatctcgcccgaaattttcggctttttacaaatttttgtgaatctggtcaaattttattcaaattcagtcaaattttcaaataatttcggccagaaacttctgaaatttcggtaattttggtcacccccgacataaaatccaatttcaaaattgaaaactatgtcattgcaccggctagcttccaatgtcttagcaatggcggctgccactgattaatggcccgtgtcgtgtctcgtgtcaggccgagacgccgacggaggtgtaccgcgacgcgcacgacaagttccagacgtggcggttcgcggcgcacgagttcacgctgatggtgatgtggacggagttctacgtgcacgcggagccggtggtgggcgccgacggcaagccgacgccgtcgttcgacatccacctcgacaggctgagcgccaactggacgcgccgcctgccggagctcgactacgcggtcatctccggcggcaactggttcaaccgccccaactacctctgggagggcggccgccgcgtcggctgcgtcaagtgcggcggcgcagccaacctcaccgacgttggcgtcccctacgccgtccgccgcgtggtgcgcgccgctgtcgagggcatcgcgcggtgcaccggctgcaaggccggcctcgtcgcgttcctccggaccttctcgccggaccacttcgagcacggcgcgtggttcagcggcggctactgcaaccgcacgcggccgctggaggaggacgaggtgagcccggacagcgccgcgtgggagctgaggagggtgcagcgagaggaggtgatgcgggtgaaggagacggcggcggcggcggccgcggcgagcgggaacgcgaggaggttcgaggtgctcgacgtgacgaaggccatgatgctgcgcgccgacggccaccccggcgcggccatcgacaagaggtggcagaagaacatcgtcagcgactgcctccactggtgcatgccgggccccgtcgacatgtggaacgagatgctgctccagaggctcaccgagatctccacgctggaccaggatgcttccatctttgaggcaccttaactttgtcacttacatgtaggtccggatcattaatgtatcactgcatacaatcatacggggaacgatgcatgactggtgatgctataggggaggtcttcctatccattgagaggacgtgcatatctctcaaatggttataaattttttgaaaaacaatctagatcaatatatgatgtatcactttataaatatgtaaattaaaacaaaacgaacaacaaacaagagactaccaatccatcagttagacgaatgtttgctacaaaaggatcaggtttttcaatggctaggactattttaagattagtactacttctattacctaattacgtccccgattaaattgacacaaacataaagctttatatgccatcacttccctccggctaattccccttaggccctcacttccctcccctctcccccactctcgatcactttgccagagccgtcgttgttattgtcttttcgatttctgatgtcattctctcgacccacgtctcctccatctctatcggatcgacggttactgccaccacctcttaaccacatggtttttccttgccctgaccccacccaccgtcatcctcaaatccctccttccattaccaccaacctaaaaaacctaatataacaaaagcttttttagtccaaaagtcgccaaaaatgagagcttgccaattaagtcaccatcgacgtttctattaccatagtcacatgtgagtacttgccatctttctcctcatcacttgctcttgctagccctagatctttaatccaatggtgttcatcaatcgattgataaatagcaaatcccaacgaacaaatatgaccatgaacaatacatatatagttagtgcaatttcttctttcttttaacttgtatgtttttaatttatcataaaattcataatgatttagataacatggatgaaaaaaggggcataccctagagggaaaaaacatctcctgatgctttggtttggtgatggtatggtcaaaagttttttggaagaaaatttagtccaaagttttcaaagtaaaaggatgttaaatattgtctttacataagatgaagatgctaattaaattcccccacagaaacttatcatctaaggaaggatccatgaaaacttatcatgactatttcaatgacttggcaaaatgagggatatcctcgagaggaaaaactccactttccttctttaatctctatgaatgatgaactacagaagtgaaaataattactcgagtaaaacaacaagaaagagatctactccctccctccgttttatattataagactttctagcattgcccacattcatatagatgttaatgaatttagacaaatctagatattagttcttggtacgccagatattctattgtgcacatgcaaattgcaagaggccggatttagtcgtacaatggaagaacggcctagatttggaggaaacgtttattatttctctggtttatatggaagagaaagaaaggaatgtattcaaggcttgatgatgcttgtgcaatagcaaaacagggatgagtacagctactccatttaatgctatggttatccctccaggatgaaatggatatcttcttattttggacacacataaatatataccaaaaaagttatctttttttttatcctcatgggtcattgaccctaagaagaaattaaggtcatatccataaaccttaccaatgtcctcaccaacaagtgttgttagccttagccatggcacaggcaagtggatgctgcaacaacaacgttcggaggcggtcgaggaggagaagaagaagcagccatgggcggtgggcaagaacgccgcgctgttcgcgttcttcgtcgtcgtgctaccgacgatgatgatcctggccggcgtcagccacacgccgccgccggcggcggcgacgacgaggctcggttggacgatgctgggtacctttacggcacgaggtatatatatctcccccggtatctgtgttcgatttcactgtccacaccaactcaaaagttatggattgtttggtttaaggaatagagtttctctatccgtttttccaccttgaatcaaaagctctctaattgaccaggataattttaaactttgatcattaataagttctaaattagcatattttctttaagaaaaattatatggctatgtttaatgtgcaacatactactataagttataaaacccagtgctttgctgtgaaaataatgtatgagtatatgttcaatgtattatagaaatgataatatttgatttttttaaacgatgtgaagaagatggtttgacatacttgaatattgagctcttcaatattatattccagatgatatatcatctttcatgagatttaagatgctagaatagcgatagttagtgggtgataatgtggtatatttagcttctaataagtggatagcaattatataaaaagtatagataattttcaaatgttcacaattacgtggataaattaaaagtagtaacagttgaaatgtaaatagtgtctcatgacaagtatttaaagagggggtataccatctaatctagttatactgccttatggttgacattgctttctgtttacattttagaatttgtctttggatggtttgttgtcaattaacatcgcccttaatagcttagattgacttcggaactaaagtggatctattagattcctacgagaaacttagaaaggggcatcacattcagtgccaagtttaatgatttaattaccatatacctcattgattgtactatgagttcgtgttacaatagtgtagattgatcattataagtatataacaatattcttttttttgaaatggaaccaacccatatagttctattttcaactaaattttgtgtagttatcgccgctcaatttgtacagaaaattatactagccatgtaacatataaatgtatcaacataaacacatagctatatttgtggatgttttctaacaacaaaatctgttgttgtttgtcgccaagccttaaggcttttttttttttgtgggcgcgcgcgccgtaaaaaaaaaaagtcaacttcacatccctcaggtagagttttattaacatatgtcttaacttttaaaacctaaacaaattgagtccttagaaatattgagaatgatttcggatgaagtagctcagcgtcggagtagggacatgtgacaatttgagcttgctgaggtgggcgagcggatcgaggggcctcccctttcgcaccatcacaacagggtcagcttgacctcgaggacaggatgtagtcggcgatggcagagtggatcataggggcaatgatggagcgggcgcgtggtggccttgttggcagcaacggcttgggaataactatttgccacttttagatttgacaattaactattaaccacccctatctacatgtgtctataatatgtggatacacatgtgtctatgacatgtaggtccagtgacaaatagttaattgccacatttaaaagtggcaaatagttaaatatatctgggaatccgggagaaggggagaggatgcacggtcttttgctgacacgtgggacccactatctttttttttatttcttttggctgactaggacgtcgcacatgacaaaaccaccataaaaaatatacaaggacgtaggctgatcgggttttagaagttaggggcacttcgtacccagtcttggaatcgcggttgaggacgcgtacgaaactcgttgagggaccataagtagactttctttacctccgtgtatgtgtcctgggccataaaatcatcgatctcacagaataagttcacttttgatccctcctcctcacgtcgagtttgaatcacatccctaatccgtaaaaccaagtacgacgcatcactcatctttagaaaccgatgcgaatgtagtcctaagatagtattgaaggtggctttgcccttacattctatttaggattaggaataggtgtaatcagacctacttttgacatatctatcatatccttatttgggtatcatatgcacctctttgggcttctattgaatcgagaaattggattgtacatctttttgatttttgatacatataaggtgtcctacggataatgcaaatcgaagctatttgatgtctgactcaggcctatatgaccgatcgatcgacatactccaagactccacctttgtcatatattccatatatcacattagatagatatcatattccatcatggaatatgattcactttcaagatgccttgatggtgaaatggtagacacgcgagactgaaaatctcgtgcaaagagcgtggaggttcgagtcctcttcaaggcataatacggagaatgctcataacgtggtacaagaaagaaaaataaaaaaccataaggaatatattgtatcatgttttacggtttaaggatatgacttaaactcgacgttaaagatgagagaccgcaagtgaacttatttgtttgctcactccagtagtcgatgagtcattcagtgcgttctgtgctttgctcaggtgcggtgcaaaaacgagccgaggaaaacaacaacagctgcgacacgtcggtggggagatgggttcgggatccgagtggcccggcgtacacggccgcgacgtgcccgacgctgccggcctccaagaactgccacaagtacggcaaggatcccggccacctctactggcggtggcgccccgacggcggctgcgacgacctgccgcgctcctcgccggcgcgcttcctcgccgccgtccgcggcaagcgcctcgccttcatcggcgactcgctggcgcgcaaccacatggagtccctcctctgcctcctctcccaggcggaggcgccgacgaaggtgtccgccgacgacgacggtgtccgggagtggcgcttccccgcgcacgggttcacgctcatggcgatcacgacgcggttcctggcgcgcgccgaggaggtgctcggcggcgacgggaggccgacggcgtcgttcgacgtgcacctcgacgcgccggaccccgtctgggcgagccgccgcctgcgggagctcgactacgccgtcttctccaccggcaactggttcttccgcgtcaactacttctccgagggcggtcgccgcgtcgcttgcagcggctgcagcggcgacgccgacgccggcgagctcgccgacttcggcgtcgcgcacgccgtccgccgcgtcgtcagggcggcgctcgaggccaccgcccggtgcggcgacggcgactgcaagcgcggcctcgtcgcgttcgtgcggacctacacgccgagccacttcgagcacggctcgtggttcgacggcggctactgcaatcggacgcggccactggaggaagacgaggcgccgagctgggaccagtccatcgggtgggatgtgaggagagcccatatcgaggaggtgacgtcggcgaggaagacgacgccggcgacgacgacgaggttcgaggtgctcgacgtgacgaaggcgatgatgctgcgcgccgacggccacccggggcggcactacgacaagaggtcggccggcggcggcgccaacgactgcctgcactggtgcatcccggggcccatcgacatgtggaacgacgtgctcctccacaagatcgccgagaccgcctcgccgccggcgacgaatctccggtgatgtcggcggtgatttggtgacaaatttagcaacaattgatgcaaaaataagtagcggaaattgagtggtcgtgatgtagtactgttgagtgtaagttaattacccgcgctttctattggagatgaaccaaccacccacaacatcacctccataagggacaaatgttttctatcactcaagaaaatatctactcgtttcccatctatctatctatctattatctatctatctatctatctatctatcttctattatatactaaaagtccatgaaacttcctaaaaatactctcaaaccgccacgtggcttcctcaaaaccctcctaaatcgccacgtggcattatattaaatagacaaaattccaaccattgattttcacttaaaataggtggacccattattttgagccattaaatttaagctaatccgtatcctctcatctccgaacaccgcgtacctcctccccgcatgcaaggcgtagatagctaggtacgcatccactcctctccatctccccttttttctccaaggttgttaagatacaaagcataatttattacaataagttagatagaggtatggagcctgcaggagctcgctgtgcaccatgcatgctacctaaattataggagtgatcacagtgatacacttgaactacacattcagtttattatacacttgaactactgttttttaatcaaatcaacggtttaagactcatattagttagctatattttggtggtaaagaattattacatgttgggctttttcaatttatcacatgcacgtatcattttcatgagtcctccccaaaattgaaggaaaccctaaaaattttcttcaatatcaagtctaattttttattcaaatcggtggatcaattatgatacaataaggcaatagtaactaattaactacatacgtactctctcatcctcctctcctctctcattcaattattcattcttctaatttttaactaattagcaacttaatataaaaacaaaaaaaaattagaaagctaaatgattataattcttaagttatatctggtttttaagttcaacaatataaaagtaaaatatattacttcacaaatataaatatatttagtaaaattaagatctatatatgataaatatccactcaatgttctttaaaacatcttctaaataattcaagatccatattacccatatttcactataaataatacgtcatttgtagacacctatgcgtgtcaaccaaataaaaaaaatcaaacaaactatatcaccttaaatcatcgtacattctcaatagagcacttacatgtcacgtgttacgtcttaaatttaaaaataaaatcttagaaattatagaaaaacacatttgaccactggttatgaattaaatatgtatatccattattttaaaccattagatctatttttttaaaaaaatcttaagccgctaggggttacattttaataattaaaaaaatattattcaaaattttaggaacaaaacaataaatcatcggttttcatttaaatcatttataaaaactaggaaataaaccccgccccaccccccaaacttcaccccctcctcacatatgcacaaacacaacactacccgtcccctcaccccttggctcgcactttcccctataccctccttgatatttttataaccaataaaaagagaaataatcaataatattaaaacatacatatcttttgaaccacacatctgattctaatataaattgctctatttataattaaaccaataatttaaagatccataacgcctatattttaaacttaaaataagagtagtatcaaaataaaacaagatatagaaaatatcaatatgaacattggttcctacttttcactaaaattagaacaattatacatgttcctattttttaagtgcttagatattattggttttcatgacattatgagttcctctgtacattattgtatatatataagccacacaatgtttgcggtttatagttggttgagaagttatatttgtaattattaaaatgttcagactcatattaactaggtattttttttaaaaaaagaaagatactatagatcacacatatattagggaagggagatctacgatatatctttagaaatttatatataaatatataacaaattgcgtcaataaaatatattcattaaaaaataaaatatattcattaacaataatagttatttaggattttctaaaaaaagaaagcacctaaacattttattaaacaagacaaaacatcacatgtttccaaacaaattaaatctaactcctttctagataatgaagagatcatagataattatttataggaatgtattaaatattatgtattttaaaagctaacaaatagattggaaaaattatctaagcaacactgatgagataagttatggataaacaatacttatgaaatgacaagtgtcatctggctgatattatgccattttatatatttttttcaaacataatttatagtacatgcctacgcatcgcgcgggctaccttcctaattatatctaaatggttatcaaatttttttaaaaaaaaaatatgacgagatagattaacatgaaatacattacttcacaaggtatacaaattcaaatttaactcagttttttttacaagttatagaactcgaatttcaacttgcattttgtagagtggtatatttcctattaatatgtattattaatttttttataaaaaaactttatgactatttaggtggcatgtaagaaatgagaagaccagccccggtcctatgattttgagggcctcagagtgaactcatcgcgataggccctctagactatatataaaattttatgatatatatagacgctaattttacttgcaaagcgaacacaaatccattgaaatatttaatttaacatatttgataattatcaaggaataaagacaaccaaaataacaatatatttgtgcccttggaatcaatatgattaccttaacaaagaatagaactctatcacatccattgcttcccatgaaaagatactcttcgagcatctctagggctgaggacgagacgatcagattgaaggcggcggatgatgaattgagggtgagcggaggaggaattgaggatggcgcctagcggctagcgtgaggaattgaggatggcggcgcctggcagctagatcgatctgatctgatctcctgtctctgactctctatctccgtcgcggcatttccacttccaccacaaagctgcgtccagagctggccctcctgctgcgagcctgcgactatgcatattggctagttatctgctattaggtgtgggccccgggcactggagaagacatttacttgagggatgaaaatccatctccagacaatctccacaattaattaagagataaatcaacagttaattcacatatttgggtaaggagattgaaggataaagggataaggttgaactcctcacctccataaagtgaggcaatctccttatgatcttcatcatacataaggttgaaatctatatcatgtttatccttcaagtgaagtgattgcctcaaaaaaatgaatcaattgataaggctgaactcttatcttatggtgaaataagatatttgacaaatatttattctacttaacataagagtagatgtcatccataacatgtttatccttcaaatcaagaaatatatgggtctgtgaatcaaggcagaaatctcctcagcaatgggaatcatggggaaatgggagagatgcatcggaggcagaagcaagccaatgtcgaggcagcgcacgcaggaggctctccgtcgagcacctggcgactccgaggtggacaggaaggagaagccatgggcggcgcggtggaaagcttctctgatcgcgacctgcctcgtcgcgctgccggcgctggtgttcctcgccgtcggcggcggcatgccctccgccgtgacggtgcttggcggcgcgggcgcggcgagagcaatggcggagtgcgacgtgtcgagggggagatgggtgagggagccgagggggccgagctacacgaacgtgacgtgctcgacggtggccgactacgtcaactgccagaagttcggcaaggatcccggctacctctactggcggtggcggcccgacgggtgcgagctcccgcggttctcgccggcgacgtttctcgccgccgtgcgcggcaagcggctcgccttcatcggcgactcgctggcgcgcaaccacatggagtcgctgctctgcctgctgtcccaggtggagacgcccaccgacatgcacgccggcgcgttcgtggacgcgttccggaggtggcgcttccccgagcacgacttcatgctcatggcggtgtggacggagttcctcgtccacgccgtcccggtcgtcgccggcaggcggacggggccgttcgacgtccacctcgaccggatcaacgcagaatggacgcgccgcctgccgttgctcgactacgcggtgatctccaacggcaactggttcttccgcgccaactacctctgggagggcggccgccgcgtcggctgcgtcgactgcggcgagcccggcctcgcccacttccccatggcgtacgccgtcggccgcgtcgtcggcgcggcgctcgacgccatcgccgggtgcgcggactgcaagcgcgagctcgtcgcgctcgtgcgcacctacacgccggaccactttgagcacggctcgtggttcagcggcggctactgcaacaggacgcggccattggaggaggatgaggtgagctcgggcgtcattgcctgggagctgagggcggcgcagatcgaggaggtgaggaaggcgagggagaaggtgacgacgacgatgaggacgaggaggaggttcggcgtggtggacgtgacgccggcgatgatggcgcgtgccgacgggcaccccggcgagcaccaccgcaggtggagggggaggaatgccaacgactgcctgcacctatgcttgccggggcccatcaacatgtggaacgacgtgctgctccggcggctcgccgagctctcgccgccatcggatgcacggtgagatagtggcgcgcgtggaaacagatcctctgacttatttgtcctccgattttgagtggctgacatgtagatctcataacttgtggacccacgtgttagtcacccacgttggaggagtttcttcatgcgtgcccactatgaagaggtttcctttgctagctgagtactccctccgtccaattttaagcgcaaccatgagttttcatgtccaattttgatcgtccgttttatttaaaaatttttatgattagtattttattattattagatgataaaatataaataataatttatacataatttatgctttatttattttttttaaaaaaaagataaataagacggacgattaaaattgaacatagaaatttatgggtgcacttaaaatgggacggagggaggagctgttgatatgcagttgattcaccaagttgcaatcttctgaaggttttttttttagaaaatgtgtcacaatgttgcagtggaggggactgaaataaccaggtgaattaattttagctttatgaggccattttgttgggatgaaattaagatgacagtttattaggttgtactcctgtttcatataatgtaagatattttggttttttattctaagttaaacttcttttaattcgatcaattttataaaagacataacaacattttacccaaaaaaaatattataaaaatgtattgaatgatggatttaatggaattaatttgacgttataaaatgttactgcattttaatggaactaatttgacgttataaaatgttactacattttatataaattttatcaaacttggaataaaaccaaaacaacttccattctgagatgtagggagtgctattaaccttcctaatacattacatggacaggatagtaatctactactagtactccctccgtcccaaaatataagtatttttagctatgaatctggataactgtgcgttcagattcatagccaaaagttgttatattttgggacggaggtagtagttaattgccaaacaggatatatataggttggaaatgcaactatcaaactggaacttttgagataaagcaattatcaaacacaagacatcattttgtctcacagacctctgctctgctcatcaaagaacccctcttgttcacttgaagcatactagccttcttctggacatgacacccttgcagctgcaatgccaaagaaaaaggacttagcatcttaaataaaaactctccaagaattaagcagaaaaataacagtctacatgactacaaattcacagacattgacgtgagaaagctaaaattttgcagcatattcactcacaagaaagaacatccgcgccgtgttttcttcttcttcctgtccctctgctttgttggaggcttgattactaccttgatggcagcatcaaacacagcttttacattctacatattattgatatttgttaagggattacccaagctatatcttcaggattgaaatgtaggcaccttcaggagcatagagaggcaacatgagaaattaacctgctgtgtctttgagctgcattcgatgtaacacgttgcgccaatgtgcttgcggagttcctctccctgcaagataagcattgcaggagaacacagaaatgtaagatgctggaatgcagtgatatctcaaaattttgcagagatttactgtgaaattttcagtcctcaggtatgcagagtgcataggtactggagaataatacctgtgctgtagtcacaggcaccaagctaggatggtcaagtaagtagtgtttatcttcacgaagatctgtatggtcgacaaaagttgtggtttaattgaacagtaactgattgagatttgttgcaagataagattgtaggcttggttttcaaaaaaaaaataaaaatccaaggcgaaatgcaagaaacttgaaaacatgatcagcataattactaggtaaatttcactagcctatttcattcaatattactgaagtgcaaccttccttttaaaacaggtgcaacatttattttacttaagtatttagtactagagaattatcatctgtttaattaattgtagtggttactatgttagatgattaactgcaaaggaatatagtgtctcccatctaggtaagagcttggaactttgagttccggaaaccgaattcttgcttcggtaagttactaacaaataagcttcaatttaaagcagaaaaagtccaaataaacccctaaactttcattgaaagtccatctagaatcctgaagtttgaaatcggaaattcaaccccctaactttacaataccattcatatggaaccctaaggtggttttacaaagttgttttatttaattggcatataaattggatgagctttgatcatgtgacatacgcatatgttaaaattttcacttaaatatttctttttatcccttgttcgctctcacttataccattgtaaaaataatatgacatcactctatattataaattgacaaactacaattgatgatacataaatgtattatataagttatttaaagctgcttgtttaagatcccaaatacgtaaaaccactattcaaaatcaccttaggaggttatataaacggcattgcaaagtttagggggttggttgtccggttttaaagttcaacgtgctaaatggacttctatcataagtttaaggaggtagttggacttttccatttgaagaaaacaagaattggtatttccaaacatcaattatggaggttttgaaattgtttgagtgaaaaaaaaagagaaagaaacctcattggctcattcataaaccttgcctctctttttttaactacgatttacttttattttgttcagagaaaataaaataatgtagtgcaactaatcttagtgaaataaaaattaagatagttccaaacaattccttgaggaatcataatccaacagtgataaggtaaattgatccgagccggtgaaatactactggcaaggtacaagacagaacgtacaaaatgcaatagttcctacttaaacatcgcaaggactaaatcttggtgagttatagtaactattataggtccatcaatatttttagggaccacacaattccatgctccaagaatgaaaagacaaaatcatccaaatcactaccagcaagtgacaagcttagacagaggatgtacagcacaccagttctattatcacagccaaggggatatgcaataaaatggaaattgtgctttcactgtcacacaactcacccaatttggtcccaaccaacacaattggcacccctggtgcataatgctgaagctctggtaaccacttcaaggggacaaaaagcacaaggtaaacctaactgaaatactgaatctctctgaatgcatccacattatgggtttaacagattaattgcaagagattttttttttctgaaccttcttcatgacattctcatagctagctcggctcactagggagaaggcaagcacaaagacatcggcgccacggtagcttagcggcctcaatctgttgtaatcttcctgccctgtaaacaatttgaagtccacactatcagcatcacaagaatgaaattttttttcagctggaaggattagtaaaattacctggaaatgtagaacaaacaaagcatctgcaaaggaattacaaaaattacctgcagtatcccagagacccaaattcaccgtggtgccgtcgaccaccacgtttgcactgaaattgtcaaaaacagtgggtacgtaatcctgcagaaggccaaacaaaaacaaaaagaagttataaacatgcaacaaatttgaattgaaatattaactgtgattcaggaagaaaacacacacaagaacagagtttttctgtaactcaacaatgataccacctcttgtttccatacaagcataccactataccagagtccccaagaaatcaagaacaagaaaggaaaatctagaagaagttacagctggagcaggcaaatgaagaatcccgaaatttcgacgaaatcaagaaaaaccccgaatcttttccgaaaggaatgaacagaaaacagataggatggagcaaaaaggtttgcattttgcattacagtggggaacttgttgctggtgtagcagatgagcatgcaggtcttgccgacggcgccgtccccgaccgtgacgcacttgatgaaccgcgacgcgctggacgccatggccgccggccgaatcgagcagcagcagcagcaagcagagacagcaagagaggggagagaacttgatagagaggaggaggtgatggcttcttggtgaagcgatggttggaggctagagagagagagagggacagagggaagtgtcacatgcttcctctctgaactgttctcactactgtctatactgattagctagagaggccatccatccatcttttatctttggcgtcctgacgccgtgttctttctcgctatggggggatctggatcatctactgttcatcttctgaaaatggggtctactgctccactagttatgctggtaggctgctagtagaattgcaagaactgtttgttgttgattgtgcatttgttgataccctgatggtgtctgatgatcctgtagttgataagttggtttctggttgtctagtgctttcagccattatatgatgctatagtattcagtctttagaaatactccttccatctctagatatactaatttttagagtttagaatttgacttgaatatagcaacctagtccttttgaaagatgacttttgttactataaactattcatattacccatactatcccttgtctctattatatttggaacttcggacttacacctcacctatcccgagaaaacaaagaagtattttacgacaatgaagtatattttaaaactgaaaatatatagaccacatggaccattataatttattcgatttaaatataatgagagtgtagattaaggcaagaagggttgacatcatagctgttctgccaaggattagcacaatttggtgcaaagttacaaaatgacagattgcatgccaattctgaagtgaacagaagaattcagacgccgacgatctgagtgcaagtagtcagtaggtcagtgtcttctcttttcgatctccatcctatggcgtagtggcttgcttagcaagcacacaagtagtaagatgttgcaagaaacaaacgcaagctgtagttaagctggattttcttcacaatttgtgctttacgtctttttctcctctctctctctctttttgccgtcttttgcttggaagtttgctgctgaaaagtatatacgcaccatgactactgattagcatctcttcgttttcaataaagcagattcttgacgctaaactcgcccatcatccaagaaaaatggagttaaattattttcgttagtgtgcttatacgatggcgaaatgaatgttttataagattgtaaagattcagggtcgattccctcgtttgctctgcggcttattagctgtaactaaaatctgaattttaaatcttaatttcagagttgatttttaaatcttttttatcacagtttatttttagtattagcttttaagtcgctaacaacaaatatatatatatttctacccacaatagcatcatggcatcatgctgtagatatgggcggatctagtacgggtgctggggggacccgagtccccttatccttctagatcaccattgatagaacgagagagagaaggggaacaccattgatagaagaaaagaggaaaggggaagaagagggaaagaaggataggagagcttgtgaaagaagaagataagtctctcctgtaattccattttagatctgcccctagctgaaggagttgatgagcagtatattatccttgtaaagttgtaatacattgactgtagatatatcacaacaaattgcagaggattaccaagcaaataactcctcaaattaatgaaaccagcatgtgggctctttgattctccagtatttttgttgattcttccaggcacgcttttgtcttccttctttggacatgcgtgcatgcaaggctgatggcccaaaagtcgatcctaatttgatcttctggccaggtgctcctctttgcagatttacagctctttaatcattgagatccacaaaagaggctatgatggttgattatg
